United States Patent Application Publication US 2018/0305689 A1 - sequence listing, part 44

SEQ ID NO: 587762 - DNA, 4001 bp, Homo sapiens
ctaagtacatctttgcatgtcaacttatctctgtatctattgacaccctcaatggttacatattattccatcatatggatggactgaaatttgttcataaaatctttacatgagttcttctcaatacactgctatttaagtaatactaagaaaagcagatgtatctatttccaaaagatatttcagtataatggaattgatgggtaaaaggcatatacatttttaaaatgtggttcttaccaccaaaatgtctatttgaaaactcacagcaacttaaaccttaagaagctgtataagtaccactgttcttcatcctcacaaactttgtggatagaaacagaatttcattcctcttctaacttagatagaaaagagtatttcatttctcttctaatttaaattccttctcttatcaggaacactatgttctcctatgtgcataggtcattggtagacatgcaaaaaagtactttgcccaattttaaattgagcttgttttatttagttgtcttcttgttgatttgaaagaattctctgtaaaatgaaaatacatgttttgcaagtgttttgtcctttgttaatttttttcttatttacagggtgttttaatttttattttgccaaaccacccttcagaatacttgtttttgaggttcttaggtctctgtgaacataaaatatatctgcatataaaaatagacatttgtgtttccttctggcacttttcttaatttgtatatttaaaatttttaatgtataccccaggaacttatttttgtgacataaaaaatctagctagttttctccaaacagcatgcatttcatttatgaataattcatctttttatactactatgaaacatcaccactatcaagttctaaattcatatatttgggtatttctggattttgtattctgttctatttatttatgtcttttgagctgttagtaaacaatttgtggaaatagcacatgaacattttgatatctggaagagcaagtctttttccattctgtcacaaacatttatcacaatagtaaaagacagcatgtgtaattttaaaatgttaaaactttactatttttatttggcttgggtaaaagtgataaacacaaaagagctcacatcttaagaaaaataaatcttcctattcaaggacacgaactatcttcccatttcagtttccttctaaggttcctcagtaaagaacatatttacataggggtacattgatataaaatgcatattggattttatctgaagaatatttaatctcagaatttgatatattatgggacttagttctcattatactcctttctataatgtatataacattgttttaaaatgtgtacattaaaaataatctgctgcatcgacttaattttgagagttaaatcactttaaaacagtctcttaagtgttccataagggaaattattatgggattggaaatcaactaaagttttgtttttgtgttgctgctcataaagaggcctgtgccccgagctctctgaagtatccacacaccgggtggcgtgggacctgaggaggcaagaaagccagggcgccccccacaaacacacacacacacacgagggcacgtccaaccccatcccccaaggtcccgcctcctcccagccccaggcccggttacctcttcttcttgtcccttttgttaatgccagggcccctgagcatgacgatgagatccgctctggggacttcaccccaccaggcagctctgtggagcttgcccagatcttctcgacggacgtgataccttggctccgtgaaggcgctgtcgtcgtggtctctccaagcacccatgttgttcttgccgcttcccctgcagcaggggaagcagcagcagcaccacttgcccatcttgcccctgaagccaaagggcttcttcataggggaggcagccagctttggagaaacctcagccaccatctgctttcaacagcctggtagtagcgagcagatggtgtctgtcaacgagtttcaccaaaaagcgggaaattacgagtttccaatctgttaggggagaaaggtcaatcccagccaaaaccccaccctgggagagcccacgacccctcccccaccaccaactggggagatcccacgtccccccaccacccggggagagcccacgccccctccaccacccagggaaagtgcacgccccaccggggaaacacccagcccagccaggggaatgccaagcccagcaagaaaaggtcaagcccagcaaaggaatgccagggtaaagccaatccaaaccaggaccaccaagccaagcgggggtgcccagccaagccgttacgtgggcgtgcgcgtgcggtgtgcgcaccgtgcgcacctcgggcggcgtcactgcacgtgacacagacagtggctgacgtttgcaacccgcgtgggcaagtcctggcgccacaaatgtcagtgacagcctgtgttactgccaaactttgtgggagttggccaagcttttaggccattgaggagaggccgcaggtgggaaaaagcctgttgtagcaggctagagcgcctggaacttgaggacgctgacagcctcctctgaagaaagcccccaagacactcgtggtggtgctgttgtggctggcagcggctgcagctcagagcggtgggctggcggagctgctgcaaatggcctcaaaatcgcggagcacaagccgcccatggagcccagggcctgcctgaggcgcctttgccaccggctcctccttggtccgcacccagaacaccggaccatcagcgacagggcactcgggggccacaggatcgggtacactgcgacatttcagttcacatttgttgcgttgacttcaatgtgacactatggggatttggtcccaataatgccaaggagaaatttcaccagaggcttcctatgctacaaattccttctcatcaggctctcagcaagcaccttaaattactgagaacaaaaacgttcccatagcggctcctcctggaggcagctgtgccaggagggcaggctgcaaggtgctcagtgtggagactctggaggcagtggggctgggatctgccctgcaggcccccgtgcccggatgctggccagggatttcagaggcagagagcaccagacatgcgggactcaggtggcatgcatgaggcatcaatgagatcgttcacagaaacaaacacgacatggaatcaccctaagcatccatcagctgacacacagataatggggtggaacatgaacacagcagcgatgttcatccttaaacaagaagcaaaccctgctgtctctggcagcagggctgaaccctgaatgcatggtattaagtgacataagccagatgcatgaagccgagcaccctaagatctcacctacctgaagacactcaaacttatgggagtagagagtggaagggaggctgcggaggatggggctgagggacagaattgagagaggttggacaaaaggtacaaaatttcagacaaggaggaggagcaagtttaagagctctattgcacttcacggtggctacaggtaatagcaatgtatcatattctcgaaaattgctaagagtagatttcattgttctcacgacaaaaaatgtgaggtaatgcatatgttaattagcttgatttagctattccacaaagtattcttatttcaaaacatcatattgtacaccttaaatatatatttttgtcaactaaaatttataaaactaaataagtacttgaaaaaaggggctaatcccattgctgagctcaactagcaactgcttcatggacctggctgtgattgatcatagtaacaagagtatcttgacagccccagccacagctccaaccccagctcatcacagcagtcggtttcactgggtagagaagagaaagccgcccagaaagtgtggagaccactcacaccttaaatccatctcagagatccctgggagactgacaggagctataaatctccagctatacagggca

SEQ ID NO: 587763 - DNA, 4001 bp, Homo sapiens
gaccagcctagacaatatggcaaaaccccatctccaccaaaaatacaaaaattagccagtctcataacctggtctcaaaataaataagtaaataaataaaattttaaaaaattaaattaaaaaatgaattatctgtatcatggggaatggttaatgctcacatttttgtggaatatgtgagggaatggtgagggccgaactatgccgttagcggtcaaaagaggttttgtatcaggacaaataggatgtcttgaagaaaaactacagctaccatcaagtagcactctaggaaaaggtaaaaaggaggaaaaaagcaagtatttattgaatacctactacgtgccacacattttaccacacttaaaaaattattactcaattatgttacttttcttttctttcttttttttttttttttactgtgtcccaggcttctttatttaagaaaaaagtgatacatgatgtgggattaaaatcaagagcatcattgaacttcaccttccctccaaccagttgccccaaactcccctgcccccacccttagtgttcccaattccttccttagtgaatgaagaacttaatcccaaaagccctgccacaaactccaggttctctttccctagctcctcccctcccctgttccccattcctagaagggcaggcacctcagtttgaatgcatgggagagcccagagtgatgacggagactgggggaaagacttccccctcagggaaagggactgaggagtacagtgcagtgaagtgagggctcccatagcctggggtaccaaaatggggccctggggccggaggaaaggacactggtccccctgagaaaggagacccagcagcctcaaaatcctctcgttgtgcatagtcgctgcttgatcgcttgcccttctggcgccggttacagaaccacactcggaccacatccttctcgagcccaagctgctgggcgatgtggctgatctgcagtgtgggtttcgggcactgcaggaacaaattctccaggttgcctctcactcggttctcgatactggttcgctttctctttcgggcctgcatgagggtttctgctttgcatatctcctgaagattttcattgttgtcagcttcctccacccacttctgcagcaagggccgcagcttacacatgttcttgaagctaagctgcagagcctcaaagcggcagatggtcttttggctgaacaccttcccaaatagaacccccaggatgagccccacatcggcctgtgtatatcccagggtgatcctcttctgcttcaggagcttggcaaattgctcgagttctttctgcagagctttgatgtcctgggacttctccgggttttgctctagcttctccttctccagcttcacggcaccaggggggacggtgcagggttccggggaggccccattggagttgctctccaccccgactcctgcttcgctctcaggctgagaggtctccaagccgccttggggcactagccccactccaacctgaggcccacagtacgccatccccccacataactcatacggcggggggcaagggggaatcccccacacctcagagcctggcccaacccccggcccgattcctggccctccaggagggccttggaagcttagccaggtcagaggatcaacccagcccggctccgccccccatggcccatcacccccaccgcctggagggggcgagaaggcgaaatccgaagccaggtgtcccgccatggggaaggaaggcgccccaagccgggggcctggtgaaatgagcaattatgttacttttcattgaaagctctgtgaccgtatggctgtgtgtgtcatacgctcactagcaatgaacacagtgcctgaagcatcattaaatgttgactgaatgtgttaggaactcttcaaaagtaatctctttaaatcataatcacctgtgaattgacaattattatcttcactttgtggataagaatgccaagatttggaaatgttgaataatgtgtccattgtgtcagtggccgatctgaaattccagtgtaggcaccatgattcctgagtccattctgcttctgccataccatgatgctagattcttcatgggagccatctacttgtgttctgtgctatggaatggtgtgtccttctttctgattcttatttcctgcagattgtggggaaacggttctaccattaacaaccaaaggcaaaatgggctgcaaccaaagaaattccctgacctaattctttatagttggtgacaagtgtgctgtagtgacgggaaatagcactctatgaagatttaatagtgcaaattctaccctcctgacaacccctttcttcagcactggatgggtgtattagttgtttatcattgtgtaatagatcacctcaaaacttaatagcttaaaaacaactaacacatagctcacagttttgtaaaatagcaattgtggtgtggcttaactgggtatcctggataagggtatttcatgaggttgtggtcaagatgagagcaggggatgttgtcatctgggagcctaacgggggctggaggatccactttccaaaatgtctcacttacttggctgttggcaaaggccccggtttcttgttggctgttggtaggaggcctcagttgctcaccatgtgggcttttccataaagctgcttgagtgtcctcacaacatgtcagctggattcacccagagagaatgacctaagaaagagagagcagggaagaagccactgcgttctttatgacctagtctctgaaatcgcacacttttacttgtgccatattttattcattagaagtgagtcacattctgtaggagggtaattagccttcaccatttggcaggaggactatcaaataattggtgggcatattgtaaagctatcataatggttctggtaggccatgtttttgcctctgccactcaaatattggatgtccatttcttaaagggattgtgaaaagagaaggggctttagaataagacaggcaaatgtttaaacattgagtaaatttttaatgtccttaacccttgtttctcaaccataaaatgagaatgatcatatcaaatcttcacagttttgcaggatgggttgcaggtaataaagtcctagtgcaatgtctggcacaaggtaagtgtttaagcagtgggctcctttctgttacataatgtggcaaccctcttctcccctctctacctctcaaatatgtgtctgagtcagaacaccaaagtcacacacacacaggtacaaaacaattcctgattctattccatttccatcatgccatgctgccagtttctccatggggccatctttacttctgtagtaaggaatatagttacttgttacagaaattagattccagaattgggatatgagttggaaagggaacttaaacgttctccttcagtcttgctcaaattctcatgcttatttgacgttcttgagtgtttccaataagatagatatgactttacctctagattctcccacttgttatcctgccaaccttaagtcccctttctcagggtaataactttctgctcaattctgttgtgaggtttaagtcaagtaagatgtgtgtaattttctcatgaaacagtagctattatttattgtttatcattttatcattaacttctgttcctttagacctgactaaaatatttctagtgtcatttgaaaatattgtattatatcgggtgttgtgtgtgtgtgtgtgtgtgtgtaccacctttttttaagaagcacaaaatgtgtttgaccagttacttagattatttatttctcacaaaatgaagtcaagtccatattgtctcatttagcagaaaagtgaaatagaaggttaataggttggcctaagcctcacagctggtaagtatagctacctagatttgaaccatgaaaatcgtttgaggtgatgctctgctttatttaatctgttcagacaatggcattgtggtttcatggggaga

SEQ ID NO: 587764 - DNA, 4001 bp, Homo sapiens
atgatgtgaaaacaagcatagggtagagtccatatgatattcatacaggaagaatgtccactggggaagctctttcggccctcattcaccacgtccttatcccctgtacacatcaagtcagaatgggctagcccatcagggaagcagcggtagaagaaatctgggcgtggcctggaagaaagcagcatggttggaacgtaaatcattaactccagaaattatttttcagttgtagcagacattaataatcctgttaactattggtcaaatagtgccccaggcaaaataaggtaactggcttagtatagtcaccacactaagagaaaagcctttcaaggtgagcatttaaattaggggaaaaacgcccattccagcacatgattactttttagggcaaacagcaaatgacactgcagcttcaggaggtgctcaagaggacactgaccgactgctgtggccgttggtgggaaatgctgttcaggcagaaaagagcccaggtgtcacctggaggactgaggtatggggaagggagtaagcgttgaatgacaaaagaaaaatcagagtgaagataaaggagaaaagaatgagaaagacgtgtggtggacaccattaacctctctgttctggtgggtaagggctgaggcagatgctggggtggttagctgttgtcacttacctccctacgatcagttttattgtgttggtaaagacgccattcagagccagggcaaggctggcagctgcaaagcaaagccattagttgaaaggatctgtctaggaggaaaggtatggtcatggcctcgttatgagagcagccgtgctgtttctgagatggatagaatccaaccaggcctgggcacaaaaataattagggtcctcagtgatcactcttttgtagccgagaacttttgtactaggccaaagacatttctgaggtacaaataacccagtgcatttaggcacagggctgcctgccgtgtagcctgcgtaaccaagtccctgcagtgctattttcctctcccgcggggatagagttcctttaggaatgcagaactcagtggcctccacacaggctcaccgtggctgaatcccacaacgacctcctaggttcccagcacgaagaaaccggcccgaaagggctagcgctcacccaggcaggcttgtctgctgtctcttgtgtctgccttcttgagaaatttggccaggaagatcagagacagtggagagagaaatgcaataacctgaatcagaatgtcagaggttaaaaacaatccaaaaaaaagccacactcgtgctcctacaggaaagagggatgtgacacagcaggactcactggagctaacataaggtctctgagtgcgcgtaaccgggcgccaggcagcgccaccagtgaacagcagcgcccgtgcggctcgggccccggtacctcaggctgaggcacagagcgcccgggaaaacgttgtctcagcccaaagaggctcggacaccctcctctctcaatcaggatcttaaacactcgagccctaggaggcggaacccagcgcacagcagcggagtgggcagtgggtccctacaaaggccgtctcggggtggaaaacgcacaggtgcccgcgggaagccgggtcatggggagggaggaaagacgatctttctccacgcacaaacatcggcttggtggggaaatactccgcctccacgtaggggttccggtagagccacatctcctccggctggatgagtctctggaacggggggagcagctccgtcaccctagaggggaacaaagaagcgcagagcaggtcgcctggcttcctccccgcttccccactgcccgacccgccgccccgtgccgcccgcctgcctgggaagcggggccgcccgggcccggccgtggatctttcttacaggaaggccgcgaacagcgcgagccgcacgcccacttcggccccaaaggccaccgccgccgccgccttccccatccggccgcgagctccgagcgacgctgcgctgacgtggccacctccgcggggagggccgggccgggaactgggcaccgccccctctcccagttgcccgcgctccggcggctccccaggaagacggcctggcggctgtgccgagggcatcgtctggcaaagggtacgcaaagccagcggagctgccctctggtgcgttcagcagggagccagcgccccagttccagccgagtaggtcggcgtacggtccatcatcagcagctcgtctccacggcccaaccacaccaccgcggggagcagccttctcccgggacctcgcctctaaatggaaaaccaaacagcccgctctcagatcctcgttccttagcaacacagccgcattctgcaggaagctacactacctgaggttggctggattgtgtcatttagtcctcccacccaggatggcctcctgcccagagtgttgtagcaaaaaattattggcaaagaacaagcccacatatttaatttggaacatacaggacaatttattgaagtcaatctcaagcaaaatctgaaatcagtggaatgtcattaaaaacctttccaaattaatcctcacggaagcaaaaaacacattggaattccaaagtatttgtaaaataaaaaaggcaacatctcagtaaatataatgtacaaaaattatatgttcctaccagcacacacatcagtaaagaagcttaaatattacaggcaaccctaaatacactataactagtcaacaataagctatctatatacaggttaaccaagctttacacgtttcacactatgcaataaaacataggccaatcaacaaaatcctcaaaatattatatatcttgaagtctatgtggcaacatcaagtcattatacagtaatgccctagtggaacacccccagggaaaattaacactaatcccttagtgtcaagagcttctagccaagtcacagaaactcaaaagagattgactttagtgaatattgatgctttgttattaaagactcaagtctcaagtgatttaggcaaagtaatggttcacaggatctacaaagtttattacagataaagtacagaaataaccaatctacaaagatcattatcataaagaacacgagaaaatgaaaacggagtctgtaggtatctgtgtttgttgtgcaatatcactcaaatgggtacaaatgagtttctcatatcaattccaaatatacacatacccttgtatataaaaaatgatattagccagttgtaatactcatttagcatcttgattattagtggcaatataattatcttaacatagggcatgtaacaggacaaatgagataaaataatgacaaccaagtaagttttatccagtccatttctaaactgacaagaataccttattcaataccttatataggtcatctgacagatacttgagggctgtttgcacacatcaagtgtgttggcaggcagggaggggagcagtaaaagctgagggtgctttctcactaactagcagatgcagtaatgccacataagaaaactaaggactgaataaatgactttggcatctattctattttccctttttacttacatgtaaattacttttacagcctactgaaggacaggcaattctcatccccctcccgcttcatacatacgtgccacaagcacccaaacttgtcacttatgcaatggactgaccaaaacaaaacaaaaaacagaaatgttttttgaaagacacggattacccacattttgggagtgtaacgtaagtgcaattttttgttttgtttttttccctacatagacatagtaaaaggaaagaagatgtgcttggggagagggttgacaaaatgacaaaataaagaatgtacataaaaagtatttgtaaaaatgctggtatctcatgcaggagtctcttcctcaaatgtgttcaatcaatctgagctatctactgtgaacactctcccatttgcagaacttcacctttaatccacgctaaagaggataag

SEQ ID NO: 587765 - DNA, 4001 bp, Homo sapiens
caggtcctgtcaactgtgcttcggcccaggacccagggaaggacaaggaagacagtggtgccgatggcaggaggcacaccagagcccaggggtgggggcagaagcaccaggcatctgtctggcccaggccggtcacactcccagaagccctctgcctccacccacctgcaggcccttcatggtggtgctccagccctccgacccccagaacaggccgtgctcctgtgtgagagcagcactccaacaatcccacacctccctccagcccaggaagagctccctgcctggaggctaccacagctccttcggctcttccctgacaacctgccagccctgtgttcatgagctctcctgggtcctctgggacctgacctgaggctccccaccaccagagcacatccctgctctcactcccctccccatcaaagatcccaactcgggcccagctctcgcccaggtcaccagggttctccctgacggtgcctggggtgcagcaggagggctcccaccttcccacagctccctgtggaccatggcaccctccgcctcttccctctgcctccaggcctcccgggagggctcctgtccacatggaaagatgcaggccagacactgccggctcctctttactctctgctccggagggaggcaggaaggagtctcaagggccaccacagtgcctcttcccccaagactccagagcaccagaagtggaacccacacagctggggctgcaagcgtggggcacaggtgaggagaagagagtcacaagcagagcctagggcaggcactgagagggggccacctgcatagctctgtgcctgcccagggcctggctctctcacccacagaggtggctggtcccaccctatttcacggaggtggagaccagggctctcctgagcagcctaacaagaagcagcaatgactaccggccacccctgctcccgtggggccccgcactaggtttttctgcaggctcctgggggtccactcatggcctcagctcacctcacagcaggagccctctgcatgcagcccccgcctgaaggacggctgtcccgcacaggctcacctcagggctgcccactgcttggggcttgcctgatgggggcaccctgggccacccagcctgaagagaccaggcaagatctgggggctggagcccaggagctgtggacaggcccagcccccagccttggcatgagacggcacccaggtagcagggagtgggccgtctgctgggagctgctctgggctcagccacactcaccttcttccaggtcatttcgggcagcggcctccagaaggacaacactgggagggaagaggacctgcttcaggagcccttggctggctgcctccttccggggacgctccccaggacccttcttgccctgggcctccttctcagcctgggcccacatcttcacctgctgggcgcgccgcttctgggcatgcttcagccgctcctgtgtgctcatcctgcccaccatgggcatctctgccagcagctccaggtgctcggccatggcggcggctgcttgcccacagggctgctcggggcaccagagtggggagcttgggggccaggctgggcctgaggggtggggcagctagctggactggcaccctcgggggcatccccttcccagagcttcgtgcccttggctgggtcaggaggccccacacaataaccaggcccaggcagccctggggggcatgggccggggcagggagggcagtgtgggagggcaccccaaacctgctccccaggccagcctctagctgtcgacaagcagcgcctcgcctccctctcggggtcagggtgcacaacctatgggaggcagccccgagacctggccggcctcagtgcagggtctgaaactaattacccagataacaaggttccagcttccgggcaccctgctgagggggaagggagggcagggccaaccagcagtgagagcccctgtgagcccctgagagtcctcttttcaccttctaggctcaggagcctgggtggggcctgggagcagccatgacccagcccccaacccctcccagctgtgtgccgaggtcagtgcatcagtactaacgaggaggtgcagccgctgaggctgggggagggcaggtagtcagagtcctggagtcctggccccagggcccaggggtgaggctctctaggcagccagggcaccaagggcacaggcgggccggccgcagtgtcttcaggagcacctcctcttccagcagctgctcacacctgagaagtggggaacaaggaagcatatcaaggccggcttgaggcagggtggcccgggggagcccctgccctgggcctcaggtgagaccaggcttccagctgtctcaggtcctgccctgtgtgaggcccaccctttgtccacagagagcactgcaggtcaacagtcctgggggtacggggagctactctgcccccattctgccccaggttcagagaggggcgggggaaaggcatgtcaggctcctcccacccaccctttccagaaagggccgcccaccccagcgaggcgttccctgctaggctgctcctccagggccaggcgctgccctaaggctgggcagggtgaggtctcgtggaacagccttgagggctttgcaggctactgccttccaagggcaggccccgcctcctgggcctccacctctcctgccttccaagggtaggccccgcctcctcctgtcctgactgataccccagcctctcactgcccagtctctagacctcttccttgatgggctcccacaatgcctctgccatcctaggctgcaataaaagcccccacctggtgcctggcttgaggcctatggggacagacaggcaggcagacagcttcggctggggcacaaccctgcctatgtacctgctatggccctagtcctgcccgacacactaagtgtggttgctgggctggccacaggcctcacctcagaaggcactctgtgcttggccaggcgcggtggctcaggcctgtaatcccagcactttgggaggccaaggcgggtggatcacgaggtcaggagatcgagaccatcctagctaacagggtgaaaccccatctctgctaaaaatacaaaaaaaatagctgggcgtggtggcacgtgcctgtagtcccagctactcgggaggctgaggcaggagaatggcgtgaaccagggaggcagagcttgcaatgagccaagatcacgccactgcactccagcctgggtgacagagcgagactccgagaaagaaagaaaggaagaaagaaaagaaagaaggcactccgtgctctgcagaagatgcctgccaggagtcctattctccacccagccaggcctcatggccatctacacactgacccaactcttcactgctggacttctacccaggtgtttcatagaatgcccccttctttcagaaagggaactgtcctgggccaggtcaaattaagccagtcaggtccttcctgctcaggggcccccaatttatctgggagccccactttacaggttcagcctactctagacatagtccccccctgtaggcctagcctcagaggcttcctgaggacacggccaataaggccagtggccctgacctggctttctgcctgccaagtaaagagcttttccaggcagtaactctccctccgagcagcctgctcctaagcctggccagctctgtagaccgcagaggccagggcaagcacacactggccagacaccctgcccaggctcccaagtcctccccttgccctctagagacacagcatgggtaccagagaggcaggagagccagtcttgcaggcatgctgccaggtccgcatccatgaggacagaggaggcagaccacacctggcatgccagagccctccctccctgccagccactcacagcccacaccctcttcctgacagggctggcaagaggagatcctcacctttctgtcattagcatctctggacctgccagagaac

SEQ ID NO: 587766 - DNA, 4001 bp, Homo sapiens
acctccctccaacaattctgtgttcccttccaaaaggtttcactgatccagcatgaagagagtgcatgtctttcccctttgtactcagaccatgggggcctattcacagccttaaaggctccttgtaccccttgatcctgtccccatcatccaaagcatcttggagactgacatttgtgaatacagttgcatattctaggaaagaggcaagttcaaatgacacagcccctgccgtctaaaaacgtacgagggaaaacagagtactaggctaagaatgcccgcaccttgctttgctacttgagcgagtcactcagctgctctgggcttgaggtcccctccaaggtccctgctggccctgacattgtatgttgcgacccacccctggtgccgcttctcttcccactaactttttttcctaaatacctcaactgtacttttgtgtaagtcctccagctgtcttcactttagttttggctcctggacaactctgcccaaggaaacatttcctcctctcctcctcttcctcccagaccaaagctctaattgtctcttctgctgcaccctgggtctcccaggcaggcccccgccactcagaccacaggttccaacaccttccaagtctccaagttcccaagtccagtctttcctctgttttctcctctttttcagaaaacagtgctctgacaggccccaaatcttccagtaagtcattaccggcccccactccctcttttgcagctactgtgccttccacacccctttttctggattccaaagagacgcaggagcaggccagtgctctccaggctggaggatcccacaagttactctccgactctgtcccctccgtccagtttgaccagggctgcactccgcccccaacctccctacaagcctccttggcctcgcgccgcacccaccttttgggccgcggagaagccccctccccagctcgctcgccgcatcggagagcccgcagggttgtggcaagcgcgactacgtgagcgtcggtgtgtccgggaggcagggcctgggctgggttcccggagatgtcggcggtgggaggaagacgacgaggaggaggagcccgttatcgcacccgggcggggccggcaaaggggcaaccccggccggagcaagcagcgcgacaccagcacccccgcgcggccgcctggcctccgccagcccgggacggggatcgtgctaggtcccgtcgccctcggtggcctgagagcctaccaagtgtatttcctcgcgttttatagggaaaataaggcccggagagagacgaagcggcttgtccttaagctccaaaccccactacccaactttggagaagtctccagacctctcgggacccggggctgggaacttgtgctagtttcgaagccagaacaacaggtggtaaagggatcagccgccgcagccgcagctcccgggtcacggtcgcagccgggcccagcagcgcggtggagcacgtgggcccgggaggcgcttcccagctgcggtccctggatcgccctctccacgctgaagcaacagctccctggggccagctacctagagtgttccagccccggtgtgccagtgcaagtcgcacggtgaaaatgtaggtgacaggaacccaaagaggtccccgctgcacgccctcgccttgttgtccccagcccttccctcggactcgagacttggggagctacgtaccgggttcagctcataagtcccgagggcagacgcgccagcccgcggcagcatacgccctgggggaacagggacagctgccgtgacggcaggagctgggcccgggctcgggttcgcgccccccgcgggcggcgaagtccgtccgtgcacgagagctgcgcggtcacctcctccctccagcagtcacccgggactcgagctccccgcggccgcgctgccccctttaactttcctgccagctctcgggaccccggggtccatcccaggccccctgccacgtgaacgccccccgcagccaatgggcgcgcccgggactccagccgccgaccaatgggcgcgcagccacggcgctggggagcaccgcttcgccacgtgatcggcagcgcgcccggagtgatccggctgcgggccagggtctgggaagggggtggtgggtcgccgtttcatcagaagccggaggacgggcgccagggggcaacttcctacaggagggcgtcccgttagaatgacagggcttttgcaaaagtctgacacccgtggcacagagcgccccagatatggagggtttcacaggtaggtatacttcagaagaaatttcctgacttgaatcggttataatcgctatctaaatctacagggcctccgcgatgcatattatgcaccttgagatctatagaaaatggtcttagaaaaagaaaaaaatgatgaccttaaagagtttgaatcagaggctcttcctttcttcagtttacatgtaacttgatctgaactagccactttaggcatgaggctaccagttttctaattttaatgaccagtagagttttagaaaaaaattagaaattgatataggattgccaactttttaaactgccaagaaagacatgaaaataaaccctgctgtcttctattactatccttttatttttattttttaaagtacactttaatagcaataacaacgaaatgcaggaaggatgtaatggccagtctttcccattggatatatttagctttctgaaaactcattatgttgaatatggcatttgggagtttctactgtaagggatacaggctcagcttcaattttactaggaatgcaagcctaaaacagtgatcggtgacaataatccaatacaagcctttagctctatagagagcttccccggagggagtcctggtgtctgaagaatgatcattaatcttcttccttcttttctgatgggcagatctgataagggaccacttgtgaagtcagctattggtaggtggttggcaaatagcgtttctgtgcaatattccctctgccaactttaaaccctctcttgttaggtgatgagtaggttgaagatttttaagccaagtactggctaagtttctcaggtgtagtgagcatgctggaggagtgggcaaagatgaagagccaagaggtattgcaaaacatatgcaggcaaagggtaatccgaaccacaccgggaaagagttgggacaagtaaatacagctttgtagcattagggtttgggagcatttttcttgcatagatctaggaaaccatggtcaataatttcccctgtggtttagatgactttttcagaccaggagagaggggttaaacttagttgtggtacaccacagccttagtaggtaggagggtgtcatctatgagtttgaaaagagcacagtctttgccatcaggatagagctgagatgcaagctcagaggagggctttaccaggagacccagcagtgcagagctccagagcctgagagctggacccaccctcagacacgatcttgcctcaccctctcattttatggcaacaaagagagaaagtgaaaatggaaaatttcaatgcttactgcatcagtcaatgcacaccaagttctttctattatatctggcattgggttacagctttaattttatttaacaaccctcctcccccaaccaaaaaaaaaaaaaaaaatgaaaccagaaaacagcagtggctaagcatagtaaattattattcttccataaactgttctttttctttttttttaatttatttatttatttttttaatttatttattttttattgataattcttgggtgtttctcacagagggggatttggcagggtcataggacaatagtggagggaaggtcagcagataaacaagtgaacaaaggtctctggttttcctaggcagaggaccctgcggccttccgcagtgtttgtgtccctgggtacttgagattagggagtggcgatgactcttaacgagcatgctgccttcaagcatctgtttaacaa

SEQ ID NO: 587767 - DNA, 4001 bp, Homo sapiens
agacggccatggtgataactatagacctgcacagaaaataaccctatgaccttcacggtttcaggcagctgaactactgactttctggctgtacctttcatagggaggaaatcttttttgtatcagggccacgacattatcccctccattctcttattctctctctctctttcttctggtaagaaaagacaaaaaggccgggcgtggtggctcacgcctgtaatcccagcactttgggaggccgaggcgggcggatcacgagatcaggagatcgagaccatcctggcgaacacggtgaaaccccgtctctactaaaaatacaaaaaaaaaaaattagccgggcgtggcggcgggcgcctgtagtcccagctactcaggaggccgaggcaggagaatggcgcgaacccgggaggcggagcttgcagtgagccgagatggcgccactgcagtccagcctgggcgacagagcgaaactacgtctcaaaaaaaaaaaaaaaaggcaaaaaaaggccgggcgtggtggctcacgcctgtaatcccagcactttgggaggccgaggcgggcagatcacgaggtcaggagatcgacaccatcctggctaacacggtgaaaccccgtctctactaaaaatacaaataaaaattagctgggcgtggtggcgggcgcctgtagtcccagctactcaggaggccgaggcaggagaatggcgtgaacccgggaggcggagcttacaatgagccagagatggcgccactgcactccagcctgggcgacagagcgacactccgtctcaaaacaaacaaacaaaaccaaacaaacaaaaaaatcagatgcacaagcaacccaccaggaacactgaaagctgccgaactgcattcagtaaacattcacaaccaggttataattttcatttttaaagacatggccatctacctccctccaacaattctgtgttcccttccaaaaggtttcactgatccagcatgaagagagtgcatgtctttcccctttgtactcagaccatgggggcctattcacagccttaaaggctccttgtaccccttgatcctgtccccatcatccaaagcatcttggagactgacatttgtgaatacagttgcatattctaggaaagaggcaagttcaaatgacacagcccctgccgtctaaaaacgtacgagggaaaacagagtactaggctaagaatgcccgcaccttgctttgctacttgagcgagtcactcagctgctctgggcttgaggtcccctccaaggtccctgctggccctgacattgtatgttgcgacccacccctggtgccgcttctcttcccactaactttttttcctaaatacctcaactgtacttttgtgtaagtcctccagctgtcttcactttagttttggctcctggacaactctgcccaaggaaacatttcctcctctcctcctcttcctcccagaccaaagctctaattgtctcttctgctgcaccctgggtctcccaggcaggcccccgccactcagaccacaggttccaacaccttccaagtctccaagttcccaagtccagtctttcctctgttttctcctctttttcagaaaacagtgctctgacaggccccaaatcttccagtaagtcattaccggcccccactccctcttttgcagctactgtgccttccacacccctttttctggattccaaagagacgcaggagcaggccagtgctctccaggctggaggatcccacaagttactctccgactctgtcccctccgtccagtttgaccagggctgcactccgcccccaacctccctacaagcctccttggcctcgcgccgcacccaccttttgggccgcggagaagccccctccccagctcgctcgccgcatcggagagcccgcagggttgtggcaagcgcgactacgtgagcgtcggtgtgtccgggaggcagggcctgggctgggttcccggagatgtcggcggtgggaggaagacgacgaggaggaggagcccgttatcgcacccgggcggggccggcaaaggggcaaccccggccggagcaagcagcgcgacaccagcacccccgcgcggccgcctggcctccgccagcccgggacggggatcgtgctaggtcccgtcgccctcggtggcctgagagcctaccaagtgtatttcctcgcgttttatagggaaaataaggcccggagagagacgaagcggcttgtccttaagctccaaaccccactacccaactttggagaagtctccagacctctcgggacccggggctgggaacttgtgctagtttcgaagccagaacaacaggtggtaaagggatcagccgccgcagccgcagctcccgggtcacggtcgcagccgggcccagcagcgcggtggagcacgtgggcccgggaggcgcttcccagctgcggtccctggatcgccctctccacgctgaagcaacagctccctggggccagctacctagagtgttccagccccggtgtgccagtgcaagtcgcacggtgaaaatgtaggtgacaggaacccaaagaggtccccgctgcacgccctcgccttgttgtccccagcccttccctcggactcgagacttggggagctacgtaccgggttcagctcataagtcccgagggcagacgcgccagcccgcggcagcatacgccctgggggaacagggacagctgccgtgacggcaggagctgggcccgggctcgggttcgcgccccccgcgggcggcgaagtccgtccgtgcacgagagctgcgcggtcacctcctccctccagcagtcacccgggactcgagctccccgcggccgcgctgccccctttaactttcctgccagctctcgggaccccggggtccatcccaggccccctgccacgtgaacgccccccgcagccaatgggcgcgcccgggactccagccgccgaccaatgggcgcgcagccacggcgctggggagcaccgcttcgccacgtgatcggcagcgcgcccggagtgatccggctgcgggccagggtctgggaagggggtggtgggtcgccgtttcatcagaagccggaggacgggcgccagggggcaacttcctacaggagggcgtcccgttagaatgacagggcttttgcaaaagtctgacacccgtggcacagagcgccccagatatggagggtttcacaggtaggtatacttcagaagaaatttcctgacttgaatcggttataatcgctatctaaatctacagggcctccgcgatgcatattatgcaccttgagatctatagaaaatggtcttagaaaaagaaaaaaatgatgaccttaaagagtttgaatcagaggctcttcctttcttcagtttacatgtaacttgatctgaactagccactttaggcatgaggctaccagttttctaattttaatgaccagtagagttttagaaaaaaattagaaattgatataggattgccaactttttaaactgccaagaaagacatgaaaataaaccctgctgtcttctattactatccttttatttttattttttaaagtacactttaatagcaataacaacgaaatgcaggaaggatgtaatggccagtctttcccattggatatatttagctttctgaaaactcattatgttgaatatggcatttgggagtttctactgtaagggatacaggctcagcttcaattttactaggaatgcaagcctaaaacagtgatcggtgacaataatccaatacaagcctttagctctatagagagcttccccggagggagtcctggtgtctgaagaatgatcattaatcttcttccttcttttctgatgggcagatctgataagggaccacttgtgaagtcagctattggtaggtggttggcaaatagcgtttctgtgcaatattccctctgccaactttaaaccctctcttgttaggtgatgagtaggttgaagatttttaagccaagtact

SEQ ID NO: 587768 - DNA, 4001 bp, Homo sapiens
caggcagggtgtgttggctcacacctgtagtcccagcactttgggaggctgaggtgggaggattgcttgagcccaggagttcgagaccagcctgagcaacatggcgagacccctgtctctacaaaaataaatgagccgggcatggtggtacacgcctgtggtcccagctatttgggaggttgaggcaggaggattgcttgagcctgggaagtcaaggctgtggtgagctgtgattgcgccactgcacttcagcctgggaaacagagcatgaacctgtctcaaaacaaaaaacaaaaaacagaataaaagtcagagcaatcgtcttttacctgtcatttttcaagtgctttttttttttttttttcctgagatggagtcttggtctgttgctcaggttggagttcagtggtgcgatttcggcacactgcaacctctgccttctgggttcaagcgattcttctgcctcagtctcccgagcagctgggattacaggcatgcaccaccacgcctggctaatttttgtatttttagtagagatggggttttgctatgttggccaggctggtctggaactcctgatctcaagtgatccgcccgcctcagcctcccaaagtgctaggattacaagtgtgagccaccatgcccagcaatttttcaagtgcttttatctaaatatagtcaatatgccagagcagcatattttgaaatgacatattcttaatactttcactttagaaatggattccgtctatagatttcagtgtataaactggtgttcacatagataaaaattaatgaccttagataattttggaaaaggacagaggcaaactttgtatgtaagtgaagtatttattaaaccaagggaaggtcaatggacctcatcagcaagctataggaaaactttctaggggcttgaatatggaaaaggagagaactgaatcaacccacaacacaaaataatagactgttaactcaaaagaatttgcattgtagcagtccataagaaagaatttagtttcatcaaaacaccaccattcatcttgttaaaaacaatattaatttaaactgtattggtagtttttattgttttagaaaattaaaagcttcaggagcttaaactgaacctaaagtggatttggatatattttagaacattataataaaaataatgtccgcacttgtgaagtgtctttggttttcttttaaaagagattgtgttctaaagtttgagaaactgcttttgcctactttccaccttctagatatctcgtgttactttgggactcctcttactagatctctctctcccaggccaccggtgggaacagcttagagcttctttacaggctctagggatccattttattgttagctttttgttggtgttttttgtttttttgtttgttcgttttgttgttgttttccagcttttcggtttggggggtacatgtgcaggtttcttacatgggtggaatccattttaatggaccccttggctttcatctactggaattcccacagactagaggcagtggacaacgttttctgaattctgttagtatctatacttccacttaggccacaggctcagtggcttccagatgctctaaatcactggctccagccctcaggcttttcaaaacccttccctttcaaactcagctccacgcccaccgggctgcttcctcagccccgcgaccacccctccacctgtgtctccctcctctagagctgtttcacaatcttgccagctaaccatttgttaaaaacacagacttccagactattttttctggaaattctgtatgtctaaagatagggcccaaggatctgcattttaacaaatgtcccggaaagtcttactggcaggcaagtttgagaaacatggttctagggtttcctcggtccccacgcttattccccgcgggcagctcaccgctcgcgggacagtccggtagctaactccagtttggtcggtttcatcggcgccgggtccctacgcagaccagcggcggttgctgggcgaccagacgcgctgtccaagcgccgctcacgagaaatctcgcgacatcgcaggctgctccctccccggtgggtccttcccctgtgaggcggcggccgggcgctgatgggcactgacggtggtcactaggccgactccgactagagtcctgttagcttgaagaggccgtgaggcatcggtcaccgcattgttttagtggaccagttagtagccggaacaatttttggcagaccaccatttccccctaccggattatcctgccatcggctttgaccgtttcagtgcccaacaaccaccttttcccaataacagaccaggaaaggaattatctgattcagaatacagcctgtactccatcctttcctcggtgaaacctcaaattccttagggtgacattgagggccatttatcatgaccaacctcaccgcttgccgcctgccctctacactccagtgtttttcagtataccctgttcttaataataaaaataataataattcccctctcttctccgcccttcaaggtaggcatagcacacactttctcacctccttcagtcttatttttccttttaagatttaaagactcagtttggaattagtgcaacctttccgaagtcttcctgggtatcccatcttgttaagtaatgccctttcttccccccaaacagctgagatgtattactttttccagcatagcacttaatacaatattacatgttagctacttagccatatctccaatgaggtggtaaattctttgagggcaaggattatgtggtttacctcgctatttccaggacctagcaaagtgccttgttcattaatagttactccataaatgtttgcaaaatgagtaatttaattgcagaagaagaacaatagtacagggaactgacatttatagtggaaagcctggggctcattagggatatggtgaagtgagcagtctggatgtaagggacaatgcaagctggaaaacatttgagtaccagctgtgattctggtggagaaaaggtcgtcattgccattctttgagcaaagacgtgtcagagcagaagattgttagaatgcaaggcagcttagagctcatgagggtaatccaaattgccattttgcagataaggaaattcccagggctcaaaagaagaaagaaacatgctcaaggtcacacctggggtgacagagagggaacttcttggcctcctgatttcaagcccacttctcctttcattttatccccctgaccattacaataagagtatcctaggaaggtgggggaatggtggcaaaggagccctaaccccattcaggatatttttgcttaagtccagttgtgagagcaatcttggcctgggttggagtgaaggcaaagaaagtggaaaagaatgaaaaaatttaggagatattttgaagcatgatttaatagagactggatagtataaagggaggggagaagttgaagataattcccagatgttagctatgataaaggaacaatactggggaaagaggagagatggtgagtaatttgaggggaagtggatgagtttggtttacatacattaagtgtgaggtgagaaaggttttaatagtctccaatataaagctgattatttaaaccatgaggccataaatggtagggagggagaaaataaggaaagcgaaatagtgggttagtagctatgccaactagtttggataaaagagggaagaaaaactagtaaagatggtatagaaagaatcatcagaggtaagatttgtcctgagaagtacaataattcagtgattccgaaactcataattcagattcagacactgggggagggagtttaaagagggggtacctaacagaataaaaagccacagaaggataagaaataaaagaatggctgggcatggtggctcatgcctgtaatcccagcactttgggaggctgaggcgggtggattatgaggtcaggagtttgagaccag

SEQ ID NO: 587769 - DNA, 4001 bp, Homo sapiens
catctattagtgctccttttctaagtaaatttcatgatcttaagagtaccctaaaatcagactaacaaaatctttccttctccagtgcacttctgccacatcatgacttctaaacattacggttaagaaaattttatagattacgttttaaaataacatcgttacttcttcatgcacttcaagtgagaatttttaacctaaaaatacatgaaaattatttagtccaccttgtaaaggatgaatgtggacaactctagacttcaaagatggagagatcgaaataatttcaggggttaagaaaacaatggatacagaatttacaaagtgaagatcacacactcacgatgtacaagaacgaactgatcacccgcatgttttattattctttggaaaaaaactttatatatattaaaaacaaaaataactttctgcaaagtgctatcgtgcatgaaaacacacatcccacttatcatttccagcaaacactgttcccaaacttaagatcggctctcgtttctgaaaatcaacactttacttccaagagccactcaacacaaagaccagtcaccatctgtttccaccaaagtcaacctctattttaaaaatcacagttggccatcacgcctacctctccgcaaacaaacgcttggcacattcaagaatcagcgatttttttttttttttttttgctgtcgcccaggctggagtgcagtggcgcgatctcgactcactgcaaccagcctccacctcctgggctcaagcgatcctcccgcctcagcctcccgaatagctgggattacaggcacccgccgtcacaccctgctaattaaaaaaaattttttgtgtgtggagacggggcctcactatgttgcccaggctggtctctaactcctgggctcaagcaatcctcccgcttcagcctcccgagtagctgtggccacaggcgtgagccaccacgcccggcttgagttagtgatttctgaggtgccccgttcacctgacaaaaattctgcatttattaacaagttcattaatacgcacgacattctggttaattttagttgcattttcagaaactggtctgaaaatggtccttttcggacgtcgctctcgctagtccactcgggaaatgctagagtggcaggaactccccagtggagcgcaggcgaccccgaccaacctcctgcttggctcagggggctacgtttccccgcccgtccgcacccgagccccccacgcccgggatctgggcagccggccgggggcgtgaggcggaggtggaaggggcaggcgagggcagcccaacgccccgggccctgaaccgatgggccggccgcctaggtggacgccggagccggacccacagccccgcaggcccccggtgggccgcgccgggccaggggcggacgggaccggggcgggcaggaaagcggcggcccgtcccagccccgcgctcccgcactcgcccccgcggcgccctcaccttctcgcacagcgtccgcacttggttctcgttcagctgcttacactcgttcagctgctcgacccactggtccagctccttggtgaacgccttgtcgtccatggcggcccgatcccgatgcggatcccgagccccagcccggccgccgccctcccccctccccacccgcccccggccccggcccgggcgccgctcccctctccctccgccgccgtcgccaggtcccacagggggaggactgagccgggtagggcggccgcgggccccgcgccccgcccaagcccagcaggcggctccgagcgcgcagcctggaggagacccccgcccgcccttccccgcccggccgcgcgccgcgggagtcggtgaaggacgcggtgaggtgccggggagcgcggcgcgggtcctcggcctagctctcgccggacgaaggccgcccgctgccgcttcaggcccgcctcacgcctaccggcctctcccgacttgtctttccccttctctcgctctttctctcccctccctccgggtttccgtcatcgctcgggcatttccgccgggaaaaggcgagcaggcggcgccgccgggacacggcgccctaggagcagaacagcgccctcgcgtggcttggcggagaaacggtccgaggaggccagggtccctcttttccccaccctgccccagaccaagctctgctggttctccctttaaatatcctgatctctgggaactttgtcctcactttagcttcctgcagtactttgcagcgctctggacagggagttggaaaacttgggcttcccttaacattgtctccccagagtctagcactcaatagcaggcattcaatattgatggagtaaattaattatttccagcctcacctgtagcccctaacatctcgaatcctccctttcgacattagaaaagtgaaatgattgttctgtaggataatctgtggcccttccagctccagagctcttggctatattttctgcaatgtgtactgagttgtaatgatttgttcattcaacaaatatttattgagagacagaacagggacccctcttaggggccatctaggcacccccctccccaagcatggaaataaaggaaaatcttgagttccctgaagggacattccaggcacctaacttcctcaataagtcaatgagcaacctgataagcaagaaggtaataatagcttaagacagtagccaaggacgttagattcacaaaatgtttgcttccctatagaaactaaagacgacatatgtccctgagttgtttttcagaaacctggacctcaccaaatggaaaatggtgtccactggcatggagatctcaaactacctatctttgttctaaatttcttcctgaggagcctggaagaattcacaaagctttgcctccttaaccaattgcaaatcagaaaatctttgaatccatctatgacctgtgggtccctgcttcagatatcctggctttttagatcaaacccacgtatagcctccatgtattgatttatgactttgcctgtaacctctgcctccctgcctttaaaaatccttacctgggctgggcgcagtggctcatgcctgtaatcccagcactttgggaggccgaggccaggagttggagaccagcctgccaacatggtgaaaccccttctctactaaaaatacaaaaactagctgggcatggtggtgggcgcctgtaatcccggctacttgggaggctgaggcagatgaatcacttgaaatcgggaggtggaggttgcagtgagccgaaatctcgccattgcactccagcatgggtgacaagagtgaaactctgtttcaaaaaaaaaaaaaaaagcacacaaaaaaccccttacctgtaaaccatcagggagttggggtcttaagcatgagctgcctgattcttcttgcttggtgcaatgcaataaatgcctcactttcactacaaaccccaatgtcagtgtttggctttgccgtacttgagggaggacctaaattcagttaggtaacatgagcagctgctagctgccagataccttgaatagcatgtgctaaatgatcatactgtgtctattaaaggtacatactactgcggctgaacccaagtggaaggtaacatcctgtatcagaaagcaagggttcttgtgtttgctaaccccctagctatgtccttgggcaatcatcaaacctccgtaagcctcaaattcttcatctgttaaaatcaataaaaggcctacctttgtgaagattaagttttaaaagtgcctgcccaatagtacggtatgggagcgatatgttagttgccttacccctcctagggaacaattacagaaagctttagaaaagcggtaattgaactgaattttcaaccttctctcaaggcaaaagcttgaagttgcctggagaagaggaaagaaggtctaaggaatttttttgtgcgtgtgccagtagacaaatgagtgaaagaccattcattgtctgtttggaaagctataaattctcct

SEQ ID NO: 587770 - DNA, 4001 bp, Homo sapiens
accctcagtgctcagcatttaggggaactttcctaagggaataaatggaattcaaccaaagaacattttccaagtatacagcactttcataacttggtgagtattacacaactgcacagaactaatgatccaatactggagtgtttactattcaacaggtaatgtagttacaacatgagtaatacacaactcctcccttgaagtcaggacttacttctctgaacaagtcaaacaccactgacttcatcagaaaaccttgatttacactatgtgcatgaccatcagtcagtctcttttgtttctggtttctcatctaagaaacagatgaggatccaatagaaaaggaacgtgagagagctctgcaaaatatgacaagtataatctacaccagttggcttgccataggattcaccacactctaaaacagacaattaaggatgacactgacacaagcaaataagagagttcggctaccacccaccacctgaaaaaaaatctccagaacaaacagtaccctacagacaggtcagaaatatgaggacaacacaatctagggaaaaaaggtttatgaattttcaccaaatttttaaaactcacaagtacatgtttaaatttatctgagttttgtttggaaaattcctactgtaattcaagacacacaataccattaaaactcaaacttcaacatttctcaggaatgaaacaatgcaacaactttgtggaaaatgcctccgctgcctaagaccatctcaaatgaatgcaaaaccttgaagtttcaaaacttaaacttctgaaacacgttagaaaataaatttggggagaaaattagacgtaagtacttcaactgatcaaacacagtttctacctgcacaagaatatacgattcctaaaagacaagcgatatatgcatagcattgttactgtcttatccacctaaataccagaaagacaacaaaatgaataatctgagctatcatctcttcacagaatatgccaagcagcatcacactcccaaagtggacaaattcaaaagtagttaaaaaatcttcccataaaaatcaaagatgccgttaagaatgtttctgagccaaatgttgatggcacctatttcaatttacttatctaaaaccaatgtacaaacataaaaatgcatcaccatttatttgtatgtggaatttacataacaaagaaacccttatatggagctcagagctttcatgtgaggatcttatatgtctcatcatctaccgctccttccatgtaaattcagaggaaaaaataataaaaacaaggcgtaaataacaaatgaaatttaaggctgtttttcagaaaggtatcttttaaaactgttcttacatttcttggacaacaaaatcatcttgaatttatagcagtctcggcttcaaggaaatcctccagtaggaaacatttctgcaaaaattatatatccaaattttgcattaaacgctttcttaccttctgctacatcatcatctactgctcctttcacctgagaaaaacaccactgaatatcattccctcctccagctcctggaaaaagaaaacataccaattaaaaccgagttctgcttatgttgactctcgtaaacacaaagatggtatccatggttggcatgatactaacagcctagttctgcccacacatacaactaccaccaagagcaccagtttggaaagaggttagtccccaatacttggtactgcattagaaagaaaaaaaagattccaggtacgaaatatttaaaggcacatgttctgtggtcattaaacatctgttcacaaacttcctgtcaaatacagtaaaagccttacattcaggcaagacctaccagaaaaaaagtaaataccaagagttaaagagttttcttaagtgtacaaaaagcctgcagaagagttaataaggttaaactaccatgaaacatagaacgaagagaaaacttcgggaacattactgcctgggtaaggagtaatgattcatatgaaccttatcaccaaagtgcacacacagcaaacactacacccatttctttgcattcattaccagcaaatcactggctccagacagagaggaaaagaaaccgaaatgaatgctgctaaagagactgtcaaaggaagcttgttctgcctcccttcacctcatcccttgactccaaaggacctggcaaagaattcattttgctaatgtcatctcgtgcaaaacaattttaatctcatttcatttttcaacaaggccaacaagcaacttgtttatagcaaaccgtaagtcaatccgacatgttaactttttcaaaaggtttaattatctaaataatgaatacagcacggaaaactggtctcatctcggaatgtttctatttcacgtgcaagtactgaggtcgaaatgattgaaaatgtcctggggctctagggagaaagaaactgaatctaaatctgcaactgattctactacatgaaggaaaagatttagcaataccaacatgtacaaaaagaattctcaaagcaattacattacttctctctcccccatcacccctattccttgctaaatttatttccaaactggttttctctctacatcctttcccctccccttcaaagcttctacctaaatctctctcctccttgctatttatatctctgaactccgcaactattttaactaactctaccaaacccttttgggaaaaggacatctgcaaaaaagctaacatgctaaacgcaaagtttaaattattttcatgcaacttgctgtacatgaaaggccttgcactcttcggcggtaaaagggaagaaacggaaacgaaatggttcgaaacaaaaaatttaggcttccagtctcaaaaatattggcatctacagtggggaaaaaatacacatatgcccccactgtattttaacttataaggcgctcttccttctcgaggcaaaataaatgtgtatatacacccaagaaggcttgcagcagggggaaaaatagaaattaaatgaagacctgcaggaaaaaaaaataaaggcggggggcaaggtggggaggtgggagaagatccaccaggctcccgagcgggagggacaaatctgcacgcacccccaccccgccccacccacgcctcaccccaagctcgccggcacaccccacccccacccccgccacggcgccagccccgttctccaagcccagtgactctcaccgtgaccacttgcctcccgggagccctccccgcccccaccccacccctctggaccctactccctcaaacccgaggggcgccctgtggctctgcgcgaggcgcgggcggtcgctagggggtgatggagggaggaataaggaagcggtgccttgtcagggggcgagggggatttctcctttacctgccatgttgcgctgcaaatggtgaccctgctgggttcctcggggtctccgcttcctgaactcacccccctcacctggggatgggggggtagagagggcggatggcggcggatggcacctgcggggggaggggacgggggccggggggaaaaggaaggaggggcgggcagaccagccggcaggatgctagatttcactctggggcttccccgctcgtgctctttctccggcagcggcggcggcgactacgacagcgacggcggcggcggcagcggcaggggcaggcgactccactttcaaaatggcgccggctggcctggccagtgacgtcacctagggggcggagccgccgggctggggcggagagcggagggggaggggcgggggagcggccgggcggctcttggccacgcccccttcctgctgcgcctgtgccccgccctccgtgtcccggccggcagggcctgcgccgcgccagcgtctcgccatggcataccctctgtccgcaccgcctgcgccaggccgcggctgtgtgcacctagcagtgtcccagcctcgagcactagcgccggggctctggggcgggcttaggagtccagtttacgtgctc

SEQ ID NO: 587771 - DNA, 4001 bp, Homo sapiens
attagaaagaaaaaaaagattccaggtacgaaatatttaaaggcacatgttctgtggtcattaaacatctgttcacaaacttcctgtcaaatacagtaaaagccttacattcaggcaagacctaccagaaaaaaagtaaataccaagagttaaagagttttcttaagtgtacaaaaagcctgcagaagagttaataaggttaaactaccatgaaacatagaacgaagagaaaacttcgggaacattactgcctgggtaaggagtaatgattcatatgaaccttatcaccaaagtgcacacacagcaaacactacacccatttctttgcattcattaccagcaaatcactggctccagacagagaggaaaagaaaccgaaatgaatgctgctaaagagactgtcaaaggaagcttgttctgcctcccttcacctcatcccttgactccaaaggacctggcaaagaattcattttgctaatgtcatctcgtgcaaaacaattttaatctcatttcatttttcaacaaggccaacaagcaacttgtttatagcaaaccgtaagtcaatccgacatgttaactttttcaaaaggtttaattatctaaataatgaatacagcacggaaaactggtctcatctcggaatgtttctatttcacgtgcaagtactgaggtcgaaatgattgaaaatgtcctggggctctagggagaaagaaactgaatctaaatctgcaactgattctactacatgaaggaaaagatttagcaataccaacatgtacaaaaagaattctcaaagcaattacattacttctctctcccccatcacccctattccttgctaaatttatttccaaactggttttctctctacatcctttcccctccccttcaaagcttctacctaaatctctctcctccttgctatttatatctctgaactccgcaactattttaactaactctaccaaacccttttgggaaaaggacatctgcaaaaaagctaacatgctaaacgcaaagtttaaattattttcatgcaacttgctgtacatgaaaggccttgcactcttcggcggtaaaagggaagaaacggaaacgaaatggttcgaaacaaaaaatttaggcttccagtctcaaaaatattggcatctacagtggggaaaaaatacacatatgcccccactgtattttaacttataaggcgctcttccttctcgaggcaaaataaatgtgtatatacacccaagaaggcttgcagcagggggaaaaatagaaattaaatgaagacctgcaggaaaaaaaaataaaggcggggggcaaggtggggaggtgggagaagatccaccaggctcccgagcgggagggacaaatctgcacgcacccccaccccgccccacccacgcctcaccccaagctcgccggcacaccccacccccacccccgccacggcgccagccccgttctccaagcccagtgactctcaccgtgaccacttgcctcccgggagccctccccgcccccaccccacccctctggaccctactccctcaaacccgaggggcgccctgtggctctgcgcgaggcgcgggcggtcgctagggggtgatggagggaggaataaggaagcggtgccttgtcagggggcgagggggatttctcctttacctgccatgttgcgctgcaaatggtgaccctgctgggttcctcggggtctccgcttcctgaactcacccccctcacctggggatgggggggtagagagggcggatggcggcggatggcacctgcggggggaggggacgggggccggggggaaaaggaaggaggggcgggcagaccagccggcaggatgctagatttcactctggggcttccccgctcgtgctctttctccggcagcggcggcggcgactacgacagcgacggcggcggcggcagcggcaggggcaggcgactccactttcaaaatggcgccggctggcctggccagtgacgtcacctagggggcggagccgccgggctggggcggagagcggagggggaggggcgggggagcggccgggcggctcttggccacgcccccttcctgctgcgcctgtgccccgccctccgtgtcccggccggcagggcctgcgccgcgccagcgtctcgccatggcataccctctgtccgcaccgcctgcgccaggccgcggctgtgtgcacctagcagtgtcccagcctcgagcactagcgccggggctctggggcgggcttaggagtccagtttacgtgctctcctgcaaggattcatggggtcctatgtcttctaggaatacctgggccgggcacggtggctcatgcctgtaatcccagcactttgggaggctgaggcgggcggatcacaaggtcaggagttcgagaccagcctggccaacatggtgaaaccccgtctctacttaaaaatatacaaaaattagccaggcgtggtggtgtgcgcctgtaatcctagctacttgggaggctgaggtgtgagaattgcttgaacccgggaggcagaggttgcagtgagccgagatcgcaccactgcactccagcctgggtgacagagcaagactccgtctcaaaaacaaaaaacaaacaaacaaaaaaccccgtactgcttcttaggaaattgtcactttggattagccctgagaccacaaagaaagggacagcggtgcagacttactgctcagccggggtgaaagttcacggggttcagagggacacgattgggctggttctatctgggtgaattaaattaccttctcgtgggccccaggatccaaggcgggagtcctaggcactgcggacactaagagtgatttctaagagaaacctgagtttgtgatgagagggtatggcccaagaagtgacccggcgtctctccagctaaacgtgttggactgcgtgcttaagagctgggctcagggccgggcgcggtggctcacgcctgtagtcccagcactttgggaagccgaggtgggaggatcgcttgaggccaggagttccgagttcggcctggagaacatagggagacccatctctccaaaaaaaatttttttttttaaattagccaggtatgatggcgtgcctatagtcccagctactagaaggctgcagtaggaggactgcttgagcccagtaggtcaaggctgcagtgagctatgtgatcacatcactgcactccagcctgggagacagaatgcgatcctgtcaaaacaaaaacaaaaacacaaaaagtgctgggctctgaagccaggctgcctaatatgattccaaggctcaggagatgaagatgacagtcctacctgataggattgttggggagatgaaatgacttaatttgagcacatgataaatgttagctgccgttattattagatttgtattgaaagcatcgtcagtaaggttaagaggtagaaggaaaaaaatgaacaggaaatgccagtcatcagctatgaggggatgtgcacttctgttgaaagatgctctaatgatgcagttgctatatacagcacactttacatatcccattccatctccacgatactcctaggagatagatatgcacattttacacgtgaaaaacacctgtaaaagcatccagaatttggcctaaggctgaatggagtgataaaggcgtttggaaaccaagaagggggagttaaagatatttacacgtcctccccaccatctccactttctaccatatttttgatttccaggacagttgaactgtaatgcaacgttcaaaattccttcaaaggaacaactgcaccactgcatgatcattcctctgtttctgcatgaatatttcccacgttaccaatgaattaatcaaaactaaaaatccaccctctatgtgtcatcttttggctacctgtacaacaggtacaaaacttcagtgcactgcgtgctgtattttcttcaatgctggtgtttttcataaatgtatttctctgggtatgccttcattta

SEQ ID NO: 587772 - DNA, 4001 bp, Homo sapiens
agttaagggcatattttgacagaaaacagtactggagagagaaactaaaagcaaacaaaacactgaactggtatagcattgcgaagtcattttagtacaggacgaaactgctaacaactttatacagcagaacgcaccggccatattaacagcacagtacagaaattaatgtacataatgaccttgattcctcaaaaaaggttatgttaagtacactctgaatcttaagagagggctatatacttcttataggctatacactaataatatgaagacacatttaaatggtcacaataatttagctgttcaggggataatgtcagttagatgaacaattcagttaaacctctaacgatagcatacaaatgctaagcagataaatctcaaaaatcccattataattatgtagtacagataattaacatttatgaggctgatttggggagagaggggggaaacctaagttatacactaaaattcttccccctccctgaacatgcaataaggcgtttcaccttttaaaaatgtattcccgtcactagtattagttgcctttctccttctaataccaaaatgaaaaagaagaaaagtatcttaataattttccccactgtcacgctaacccctgcatccagaggccactaacacagctggtctaagtctattcccttcttacaaaatagcgctttcaaaccgattgttaatctcagagagaagggttgtgcctaagacttacggctgaataaaagcagcacataaattagtggttatgtgtaatccatcttcttagtttaaagggagaaacaactataacctaaaactctacaagatttagagagcaaagagccctttacattttgttcttataacaacaacagaaatctaacgcaggtacacatatgaatcagaaaacgtcattctccaagtctttataaccaaagggaaaataaaataccattaccctgtcaagagctccgtaaacttattttaaacatcatataatggatttatctgacttgttcatactaagtttattccagtaatagcagtgacttgcaatgatctagagaaagcgggtcaaaaggcacatggtatacgtcctaaaaaagggtggggggcggacgtcaagaaagatctaatcttaaatatcttacttggaagagtcgactccctgctcacaccacccccgatggcttcccccgagtcgtttcttaaagagaaaaaaagacagggatccgggcccttcggggcggtgggagaagaagtccccactgcaccctgaacccttcgggagggaacttggcactgacggccaggcacctgaccaggtgcagcagaaaacgccgggtccgggtggctgctctcggaggctgccgcccggctctgtctacacccctccgagccctcctagggtgggcgcagcccggccccagcctccctccgccccgagccgccgcccagccgaaggccgtttcccgcgggtcccagaggaaggcccggcccgccaggcacctttgatgacgcggtcggtggtggagaggtggaagcgcctcccggacatggtcccctcggcctcctccaggctccaggagcccgccggacgtgcgcctacgccgcggccgccgccttctcctcgggcagccttagctgcccggagccgtcagccagccgtgcccggccccggctcctcagcggtgtccgagcaccagaagggcgcggccaccgcagcgccggcctccgacgccactgacaggacgagggcccaccggccgctctcttgggaggcgccagcggctaaggcggggaacaccgcttcggcaccgaccgcgaccgctgctaagggtggcgaccgggacggccgcggctgctcgcggcccgggccctcgtgcacgcaagcgcgcccccgagcgccgctctcacaacttcccagcggccccgctgtcctagcggacccggccgggcctcccgccccgagcgccgccctccccacccttccgccttcccgcgaggcagtagagctcggcgcacgcgctgctctcggctcctccggctccgggtccctgctgctaaccgcccattttcgcttcttctcagccagccctccccgcagccggccccttctctcctgccagcccctacccgggcccggaacatctgaaacccgcccgcgtggcccgcgcgacccgcgcgggaggccggcccggccatcttgcgacccggccctgcggcctcgcagcggctccgcgccgcctcctgggaccgcctcgccgagaacccctggcctcccagtcctcgcccacaggcgaccaccctcctcacctctgggtctcccacccgctttgtctcaaggagtgtgatcagtccggccgcgctccttcagtttttgtgggtcattcaacaaacgcacacatttaaaccccctcgcttcatctttcccgcttgttgagtgcagttagtacaatgagaaggacattcgtgtccatcctagttccagtccagtagctagggcggtgggggattgggggagctccgtttctgagcaaggctctgctccctcctcactttccacatcgaagagaagggagatctctgctcctgggacccccgggccggacctcctcggccacaagaactgacctcttcctatgccctgtgtgtcacctgcccagctagaagccccttttttcttccccctgacacagtacctgcctccccggcccaggctcactgtggaaccccatgggcaagtccgtagaaacttaacagtctgttcatctcgaggttaaaaactaacctttatctgtccttaaaactgtaagcctagaacagaaactggctccaactgtcctctcactgagtaactggcaaagtcaaaaggattttgacttttagcaatgcaaatgaaatattgaaactgatgtccaataaaacatatgcaagttacaggcaaaaccagtcttaacaattaccgcagtgaccgataagtagttgtagctatgtaaatttaaattaatcccgttcctctaggggactagccacatttcaagtgttcaagagctacacgcggctaccttattggacatccagaaaattctactggacagctgttaggtaaaagattataggattaagcgtaaatctccaataatatggatttatgtataggcggtctggggatatatagtggaatcagaccctgaattatcccttggaattttgaccatagctctttgatggtaaccgcaggaggcaaaaggactttaggagccgactagaatttggttttcgttttcatgatccttgagtcttccacccaagagaattgttcagatatcctggggaaactcttcatttaagaagtaaccagaactccacgcctatcaaatcatacccctgggtcagaggctaaaattcatctggaagaacctcaacaggatagctaaaaataaaaagtttaagaaaacattgcgggccggcaaaaaagaaaaaaaaaaagaccgggtggggtggctcacgcctgtaatcccagcactttgggaggccgaggtgggtggatcacgaggtcaggagatcgaggccatcctggctaacacggtgcaaccccgtctctactaaaaatacaaaaaattagccgggcgtggtggcaggcgcctgtagtcctagctacttggaagactaaggcaggagaatggcgtgaacccgggaggcggagcttgcagtgagccgagatcgcgccactgcaccactccagcctgggcaatagagcgagactccgtctcaaaaaaaaaataaaataaagaaagaaagaaggaaagaaagaaaaaacattgcgggccgggcaaggtggctcacgcctgtaatcccagcactttgggaggccaaggcaggcggatcacctgaagtcaggggtttgaaaacagcctggccaacgtggtgaaaccccgtctctactaaaaatacaaaaattagcctagcgtggtggcacatgcctgtaatcccag

SEQ ID NO: 587773 - DNA, 4001 bp, Homo sapiens
gactgcttgctgggtgagcaaggtaataactgggaggtcctcagcccctcaggtaacagagaagcatccgcagggggcggtggaattaaagtgtcaggtccacaacacgggccactctcgttgtcgccaccaatgatttggtggcccagatcttcactgctggcacccgcgtactcgtggctgctgctcaggaagggcggcacttccctggggacgtggggaattgggtaccacggtggcagcttgctgtaccagggcagatcgtagagaggctccctctgtaggcccagacccgggctcagcaagggaggcgccatccggaaggggaaggggggcatggcgggggcagcagacgctgcggcctccagctgccggaaaggttggaagtcttcctccacggtggccaggctgtttctgtagtgtccataggacgggaaaggcgtgtagtacgcggccaggttctgcgggctgctctccggcgggtagcacaccttgtcctgaggcacggcctcacttggccggggtagagccatcccgggaccgcacgctcggcggctctgcagaaaagcgggcgccgctgaggacaccgcgcgggagcttcccggggtccgacccgcgcctccccaccagcctcctccaccccagccagccccagatccaagggaacaggataaacgcccccagtccgatcccgccagcccgctcccacaattaagacaaaacgaaaaaacagcaatagaagcaaacacaaaaaagccccaaacggaaatctgccgggatcctgccctactctaaattccgggttagtgttgccttccccttccctctccaagcaccccttccctaagcccggccgccttcccacacccgctctccgctttcggcccccaacccggttcctgcaaaacccattgaagttccctttccttccttcttctcagtcctacaaaactcgttggtagggtctgtgggagccgcggggccctgccaacctcggggctgggccgggagccgagcgcaggcggtcggagggcaatggagcaagcgacagctccaggcgctcctgggccctcggctgggagggaagagccgaggaccctgggtcgcaccgcgcagatggagacgcgctcccagagcccccgggcaggtccagggaccccgcgacctgctctggcccagcggtgtgaccccgcgggtcctggcggtcctgactgcccgcaggggaggggcgcgccacttttggctgccctaggatgcgccgcctgaacctcttttccctcgcgggcagcgtccgccacattccccgggttcctcggaaactccaatcattctaccaggactattggggcctggggtagcccctcgggagccgcgtggacgagccctggccaggtgggagcgaagagcctcggcgactgccagtcctcccgcccccgcaccgccgggaaaggatggcgttttaatagacaggcagcaagttcaccgaggctgaagaatgaagccccttcagggccggcgggtcttgagatcaatgagcccaataagaaaaccaagcagggtcatgactcagaaattaaagaacacggggtcaggagaagaggtcagccacgacacaggcagcggcccgtctcctcccgatcctccaaaggcgcccttctcctagcctcctccgacctcagggatctgcaacttgggattcaaagcccccgagagggcagaacgaccatccaaaacgaactgcgccagcgagtgctgccgccctccccaacggccctggaagaccaccgccccgggccccaggcgcgtcctgtcccgtgcctacctccgacaccacctccaagagcgccaccgcggagcgggcgcctcctggacgctgcggggccactcgggctcggtaggccactcgggctcggtagacttcgggcgggccctgagggctgagccaggcttaagagggcgggcggggccgcggggcatcgacaggtcgagggtagggaattgacccggcccacgcagatccccgcgtcgtcttctccccgcccaccgcagccattggccgactctcgactcgccctctgtcccctggggtcgctcacttaactcatcagttttccaaaccctccctgggaccctagtggcgagcactcgccgctggccttctagggcaggcagtattgccgctccaggcgtgcggagtcggggagaaaaaaaccgaacacgtgtgctacccagggcccccagataagcccctccgcgcgcacacacaccctgaaccggagtccagaaggccggactcgcgtcccggggtcgagccccttactctccgctcccagttcggaagatcccagcctgcccgaaggcggcgtctgacccgctggtggacctggtgggtgtctgttcctgatacctggggacgaggcgggagcgccttgagcgctgggaagcttcgcctcgcgagtccccggcagtgacacgtgggagcgttgggcccggcacccccgacgcttccgaggtttcgggtggtcgttttgctctctcgggggcttttattccttaagtggctttaaacgaccgaggatgggcctcccgcgccgccgcagctgtcacttccttcgggaaaggctagcgaccttggacgcgcaggctctgaaaaccaaggtccagacccataccgagcgcccaaagaccgcatttgaattctcctcgccggccattgagggagagaaaggaacgcttagttccattcacattcacagaaagaagcgccgagggtgggggaaacgcagtcttgccgggtgagccgggacaggttcctcgcctgccccccggccgctgcttcctcttagctgaatggggagcgacccgccccgggcgcggccttcggggctgaagactgaggtgcagcctcacccccggcctggcagcggcttggaagagagagggaaaggaggaacatctacccggctaagagacgccgccagagtccctaaagctggcgggggacggaggccggggtcccggatcttcagagcgcccgcagccgggcttctgggctcctcggtgcggggaacctgaccctgtagccttcgccagggcgcggcggggctgcaagaagggaggaaggagtgggactagagccttcgagggcgcgggcggcgtgcactcagccttgtctccccgcgcgccctgccgcctgcttgccccctttgctgcaccgggtggccctggtccccgcgcccgcccgcccccgacgccttcgcgtggttccgcgctgcccgcggccagccccgtttcgcttcgcaaggagcgtgttgttttctcaatcgaaatgggatcaagatcccagggtttcctcgtctccttgttttgaggtgataggatcttagccaatagatcgaaaacgtgaaaagtacccgtcgcctcttgtcccaagtgcctctgtggaaggatcatttacttggaaaagcagaataaattctgttgccgttttccttccggaggcgtgctcaccccagagctcctagacccactggcattcgctatacttcctcctgggctttacaggtaggatttcaagaatgatatgggggcacctgggtgatctgtgggttgcaggtcctcaagaggccgttttttcgtgcacggaagtgtcgtagctttattttagcggaagcaatatcaaaccttatcttagaggtttgttttgcaaagaatccagagtttactatatttgacactattttaaaataacacttgcttgttttaagaagttgggagaaatcgataaaagaaaagttgaaatccatgcttcccatttctactctaggagataatcctgatcaacagtttggtttgctccctacccccattccttaaaaacaaacaaacaaacaaacaaaccaaaacccactatacttttagattgtgtaggattacgtaggattttgtaaaaataaaaatgggattatacttcactcgtttctgcaacggcctagctccta

SEQ ID NO: 587774 - DNA, 4001 bp, Homo sapiens
gatcttaggctttgtaagccagagtaaacttttatttaggatggcattcagactaattagtgcatttgtgcatataaacataaacaggcacaaatgatgcacaaagaaaatgaaaagtggaagagcccataaattctgaaagagataaaaagaaatcatgaaatgatgttctccttataaaaggggaaaatttattttatactttccacactttcttacctaactctatatactaacagtaagttttctgttgtaatgatcaggtttaagattagaagaaaaactgatattttaaataaagatcaacaaattggtttttaatataattagattaactgtctctgcaaattagcattctgcacagtactttgttcacagatcttcagaaagagtaattatgtaagaaatgactcagattcttcaaaagacaaagaactttgttaccaaaaaagtttcatgaaagccaaatttaaagctattaaaaatcaaatcttaaaaacatacttttttgacaatctttgttacaaggaagtatataataattctataaaccaccagttaccaggatattctcaaatacctgtatatttgcagagaatgtggcccctggaagtcaagtatattgattttgagaagtcaaccataacgcagcctgtacattttacatcacttgagacatttttctttccttcttgccacagccaagaagtgaattttatctgtcatgattataagcagaaagttgacagatttcagaacactaagcaggaagtttggcacctgaaatattttccttcagaccaagggggcatggaattggttgttggaaggagaaggatttggatgagatcacaaaaactaaagctcctggttctttgaatgatgctctcccaggaatctgggtggaaagaagccaaggctcaaattctttgtcttttcagcaatgaataggaaaaattcaacttttgagtgttatctcagcagttactttcactcagttttgccccttcggccctaaaatgaatgagacgttttcaaagcagatggcagtgagtcaagcagaaacgtggaatataagtacatccccacttccacgaagtcccgaagcttgattacagcactctcatgggccatgtaaacaggggaccagaaactgagcagaagacagatttaagccggggcggggggcgggggggagggaattgtaagactaggacagggtgagcgccacatgtggctttaatatccaacagctgctagagatcatcaccccgctgctctctctgtacccctacaccagaatcctctgtctcaaagaccataactaaagcggccactgccatgttatctgagtaacgaactcaagctcgagcacattcaaggattttttttaacttagtgtacctggatgtagccgactggacctttaatcacaaaaccaaagctttaaaacaaagtctccaggaaagaacaagaaggaaaatcaattacacagtgcacttgagcagactggggaggcgggtaaaagaaaagtgagggaagatagggcagccgggattccctggactggagctctcttctctagagctaacttttcagacctggaggtctccaaggcccccgcaactcagtgagtctcggggcaccaacaaatccccgcgggggtcaccgcgcccgcgaacgcagagtccacacgtggattcccgcgcctgtgatgccccgacccgtcccgggtccccgcacagacaatgccgcgcgtccttcccgcagccactccgggacccgcgccccgcgccgcccggacgtccccctgcgtctgccggggacactcaccgacaccaggaactccagcgtgcccacatagtcccgctcggtcttctggagctcgctgagcacgcacacgcgcaggcgaagctgcttctccaggtccttggcgctctcggcgcggctgtctccgcggctgtcctcgctcatggtcggcggcggtgcgcagcgcggcgctgcccgccgtgctgagcgctgacccgcgcgcccgctgctgcccggcccccggcggcgagaatggaaagttgccgcctccgccaactccgaggagagacagaagactttacatgctggggagaggctgggcgcagggagaggaggggatcgggctgaaatcccggcgcggggggcgcggggctctgcagaggaaactcctgggagtgggggctccggccaggccctgcgcgcccggccccgctgctctggcctcacacggccggggctggaggggaagcggcttcggcagccacagcagtgacttggacattaatcaaaagctttgtatccatgtgactccgaccctttacccttcgccaaatctcaggaaaaaggaaacacaaccctggggaagtactgcgtactggctaatcacacacacgcgcgcgcgcgcacacacacacacacacgcacacacacacacacacacacacacagcagcacttgatatggaactcacaggaggttcccaatcccagggacacacactccaaggcgcagctcgagggttactcctaagcctccgctattgtttaactttaatgtgtttcgtacaaatcctgaaagcaaagaaacaagtccccacggttacataactggatgggaacaaaaacaaccacggtattgaccctccctctttgaaaagaaacacattgattttttgtttcattcaggcacaaaacaggtttgcttttaaaaccctccaactgagaatagttcacagggcagacaccctccagtctgagcttggaaagtcaattagcataataaatgaagacactatgggaaaatgacagcctctgcccatgcaataaaccccagataaaataagcatcacccttgtactgtgctgttttccatgtctacaacttttttcaacatcaagatagtatgtaaatccattgagaggcgagggtatttgtgccagttttgtttctaagagctgctgtgatttaagacggtgtcactaattgaaaagataaagctgttgttgaatgctcatcagaagatagaaagctagatagataacggaaataatcttagatttttgaagatagacacacagaacattcttgattttaaagttaaagtttattgccttttctcacttggaaactaagccttaaatatttccaatacatttaacaaacaaaacaatttatatatttttttgaattggtattatacacatatattttccacagatcaacttcagtctaaaactaatggcatttaaataaactgaagagtgaatagagttgttgcaagaaagtggtatgttaatttgttgcagtcactgaaagcattagcaaaactctaaaacataaagatgcttttcactatatttacattaaaataattacctattggttttccagatgatgtctttccagagcatagtgtgaccattcccctctgtaaccacacaaagaaggattgtactttctttgtatattaaagataaaattttcgaatgatgtacacaaagctgatgggcaagatgtgattttcctctttcttttacaaatgactatttagaggtagccaagagcaaagggcaaacaacatagatggcttcacaccctgtggcagaagaacaaagggcaaagcatattaaagagcagacctcacagcacctagtaaacaataaacaaaagaagcggaagacataggaagcacacatccagaaatgaatgggaaatgcaagcatgactgaaccttctccccatgtactacaggcagcatttcttcctccccaggtctgcacctttccctagggaaaaaagcaaataaataaagcaactttctatcagttgttctcctacataaaatagaatctcttgtactaattgtccccagtaaagaactgcttatgcaacttccttctatcaaaaaattagtctatggacaatccgttagggctgcaagctcatctctgaaagcaggacacttgagtttga

SEQ ID NO: 587775 - DNA, 4001 bp, Homo sapiens
ttagggggacttgacatgctgttgctggccttgaagaccaagggaagggagctgtgatccaaggaaaggggacagcttcaagaagtatggaatgtcagggacctcaatcctatataacctgaatgaataaggcaatggatcctccccaagagccttcagaaagaaagcagccctgtctggtactttggttctagcttggtgagacctgtgtgggattctgactcacagaatcccccttacagtgggaactgtaagagtaacagacctgtgctgttttaaaccactaagcttgtggtaattgttacagcagcaataaggaactaatacacttcccctggaatctctcaagtgaaaggagatatggcataaatggaaggtaaacttggaagtgctttagaaacaagttactaaacgaacaaaaatgaattctaaatttgaaaccctgagaagagaaagtaatcacgcaatgttagttttttgtttgatatttccccattgttaatatattcttgacaacagatagagtacatataggatacatgtatatagcatctttttttttttttttttgggacggagtcgtgctctgttgcccaggctggagtgcagtggcacaatctcggctcactgcaatctccttctcctgggttcaagacattctcctgtctcagcctcccgaatagctgggactacaggcgctcgccaccatgcccagttaatttttgtatttttagtagagacaaggtttcaccatactggtcaggttggtctccatctcctgacctcaggtgatccagctgccacagcctcccaaagtgctgggattacaggcatgagccaccgcaccgtgccacatatagcatctagtttaaactgtttaagttattcctacaccatattcactactagaccctccggaagaaaatctcaccttttaatagggcacaacatcaaggtctgcatactcgtgttttaaagaaggaatacaggagatccacataattaagtatttgaatatttaaaatgctaaaaagaggcacttttactacaaaggggaaaaagttcccacccaggcattgctaaagagttaaaagaacatgacttcaattacatttcttcaatttttctcaaagtaggaacggcaaatagaggggtttggaaaaggtactggtgggattaggcgagattcaggtgaaagaaaatactttctcttggccgggcccggtggctcacgtctgtaatcccagcactttgggaggccgaggcggggggatcacgaggtcaggagttcgagaccagcctgaccaacatggtgaaaccccatctctactaaaaatacaaaaaaattagccgggcgtggtggcgcgcgcctgtaatcccagctactcggggggctgaggcaggagaatagcttgaacccgggaggcggaggttgcagtgagccgagatcgcgccacttcactccagcctgggcgacagagcgagactccgtctcaaaaaaaaaaaaaattatttctcttgccctgccccccactctgcatagcaatgattgccatattaggggtcgttttcaccaactttggctttaaaatatctttcctctaatactagggggtaaaaagcagtatgacaaatccctttatacacatacacagaaattcccccaagaatctaattgctgtacttcaaaataccgtcatctaaacacagagaagcgccgggctgcccggctccagaacgactcgggaagccaggacccacccgcggcccagctcgggccggtacccacccagcaccgcggggctgctgctcaggacgcattcctgccccaggccgcggatcagttgatgaccggccagggcagcaccgcagcggtccgcagcggacaaggtctcctgcagccgcagcagggagcaacgcacaccggctccggagcccgccatgccgccgagtcccgctcccgcgcgtgcgcccgctcggcccggacccggaaatgcccctacgcgcggaggcggggctgcggggcgcggcggcaggaactttcccggggacccctgcgggaaggcctggccagtaagcgcgcctctttggcccgaatcaacatggaaacctaaggaaaaacgtctgacctgcggaggtagtttgggtggctacttggtgttggacttggctaaataaataccagaggcagataaaacaagcgaggggcctaggtcaagagttccaagtttgttcctcgataaaaaacgacaaacgcggtcgggggcggtgatgcccgcctgcagtcccaacactttaggaagctgaggcggggggatcgcaggagttcgagaccagtctgggcaacataatgagaccatccccaccacctcccgtccttaattttttttaataaaaaaaatctttaagtgagaaatgcatctgtaatgtccttattaaccaaaaacgcctaagggataaagaagcacacgctccctagccaacgctagaggaacacaccccgagagctggtgctgtaggacccagttttcccgcgaaaacgctgccgcgcagggggtcagaccatctggaccaaggggggccgagcgaggcctacttctggtttacgcacgggcgctgaaagaagcggcactgtccccccctgccgatgcgcagtggcgcctcccggaggcggagccacgtacgagcgccgctgtgattggtgaggccccgccaggggcggagacgaccttgccgccggcgggaactctgggtctcgcggtttgggagcgctactcgccaggtggactcggagtccgcgagcgtcgtcggcaagcggccgcctttccacggtaaccgcgcgccggcggggagggcgtggcgcggagccgacgggaacgtccgcgctgcggagcagggcagggaagccgggaggcgggcccggcccgagcttgtccttgtcgcgcaggtactccgagcactatgtcgtccccggcgtcgaccccgagccgccgcggcagccggcgtggaagggccacccccgcccagacgcgtgagtcccccgagccgggcccactacagcccccggcgccgccccgtctgccctctcgccgcagctggcagcgctgggtgggtgcgcgggacccgggcgctcagcctcgggctgggcgctgccgcttggtgcgcacagacacccacagcaggctgtggcctgggtgctgcttaattcgattgccatttgcctctgtttggtttggttcagtggtgagtcataatgccccaaggaaaagacaaatccaggaaggccggccctgaaagttaatggctgtcttttctgttttgtgtgacacaagctcggagtgaggatgccaggtcatctccctctcagagacgtagaggcgaggattccacctccacgggggagttgcagccgatgccaacctcgcctggagtggacctgcagagccctgctgcgcaggacgtgctgttttccagccctccccaaatgcattcttcaggtgcgtgtctgaagatcttggttttgctgtgcttgatacacagctgatgctttatctgctcaggtttactggctttataacagttggcataacgcctaaagcatcccctctgcacgtgactgagcatgttcttaaccagaggagctgaacggagtgcagaaaatagtagttttagggcttagtgagcagaggaagcagcttctctggtgcttttttttaatagaacatttaagagtgctcagaatctcagccaccgcaggttgcaataaatattcagtttgctgttgcgattagatggtatagatcaacagacaacatgctgtaatttcaggtttgatatgccaccagaatttcctaattttgtttttatagctatccctcttgactttgatgttagttcaccactgacatacggcactcccagctctcgggtagagggaaccccaagaagtggtgttaggggcacacctgtgagacagaggcctgacctgggctctgcacaga

SEQ ID NO: 587776 - DNA, 4001 bp, Homo sapiens
tgtgggaggccgaggtgggtggatcacctgaagttacgagttcgagaccagcctggccaaaaggtgaaaccccatctctattaaaatactaaaacttagccaggtgtggtggtgggcatctgtaatccgagctacttgggaagctaaggcaggagaattgcttgaatccgggaggtggaggttgcagtgagctgaggctgtgccattgcactccagcctgggtgacagagtgagactccgtctcaaaataaaacaaaaaacaacagtctggccaacataatgaaaccctgtctctactaaaaatacacaaaaaattagccaggtgtggtggtgtgtgcctgtaatcccagctactcaggaggctgaggcaggagaattgcgtgaacccgggaggtggaggttgcggtgagccaagatcgtgccactgcactccagcctgggcgacagaacgagactctgtctcaaacaaaacaaaacaaaacaaaacaacacaacaaaaaaaaaaaaaaaaagaaagaaaagaaccagtggcagaactaaggctgcgacacaaaaaattctggattcaggatcagacctatgtgacatcctctcacgaccactatacaaagagcgggggttctatgcgttctgctgccacccaatccacatagaaacagtaagagaagagattcgtttatccttgcacgatttagtcttcttgtatccatcatcccctgaagttttcacagaatcacagtgttctcaaggacgtgacggagtcagatcaattagaaaaatgtctcctcttccttccttccacagcgatgcgtaaccagcctcgtttgagtccaagtcgtgactactgggagtatgctgatgattgacgctttccagagagttacccgaacaggcagcccatctgcctgagagtttccctgagagaacctccaaggtgatgtttattaggggaagccctagatttttcttggagaatcaccgagaatcacagaatattaacatcagaagagatctcagagctttcagagctgagggccggaatagttacctgacttgttcaaggtaacgtctaaggaatagtcaaagaaagactataatacaggtcttgtcttcagccagcataaatgctcgatcagagaaacctgtgacctctctgttaaggtccgtctcattccacaccattcagcttaaacttgcactgaggtgggcagattttgattcttggtctaatcaaagtccaagaggatgtaatatatatatacacaaaagacgaaagctccccttaaccggcttgggattggacttctccctcctgccccataaacaagtgccgctctgatgccagcgaagtccggccagtccaccctcacctcggcctccgggcggcactggcatttcttgggcacttagcaggtgagacgctgccacacacgcgatctcgggcgtctctggcctccgcggggtgctcttgtacccccgtctccccttaccatccgtgggcacaggcctggcccccctcgcatccgccaaggctatcgaccccgaaacgacgcggtgcgcaagtggccacgacacctaggcactaagtcattttcccgaggtagcggtaccctctgctccaacgaagccaatctccagaaaacctaacagactcaaggtaaggaggctggggaaacccttcgctagcctttcggtggccctaggcggccgaccagtcccgcctctctgggagacccctctgcgtcaccgtgacgacccattcccacgcaggtgtccctcttctcaaggcggccgcccaccgtccccacgcagcctccttcctcacccgcggccgccgcgccacagcctgctgcacgcgctcgttcaccgcccgcaatgcgcacccgactcccagctcggccgacatgctgccagctctccacatcccccggggaccgacgccgagccccaggcccccggcagcccgtggctcacaccatcttccggttccgcccagcttgcgccgtgtgaaccaatcattgctcatcattgagtcgtctcacccaatcaacacccgtgcagcgtggaggcccgcccccaggcggcggccatcttggggaggtcacccgcgaacctggaaatggagcctaggggctgaggttttgcgcgcctggttccaagggccactccccgtgtgctctcctctttcctgcgcctcagccgctgccgtccccccacccccaagggacttttgtgaggcagaaacgcatcctatactcgggggatcctgtttcctttcaaaacgcctttccaggcttgcccgttcccggctttctgggcgcggggaccagaattagaagccactggggcgggagccagggcttttctctgtcagatggttcttgcgaggaacccctaagcgatacgaaaggaaactcttctttcttcttttccctaaagacatggcgtgattcaaacgtatcgtgatttttgtcatctttcagaccactgctgtccaagagaaatataacgccatccaactgtgtaatttggaagtttctcataggcacataagcttaaaaattttaatgatatactttatttaatccaatatatccaaagtaagatttcaacatgcaatcaatagaaaaactaaatgcgatattttaattcttttgaaaatcgtatgtgtttctgaaacccggtgtagtgttgacttgcatatgtctcaattcgggccatccctatttcgagaggttagcggccacctgcggccagtgctgtctcatcaggggacacaggcagcatgattattactattattattattgagacagtctcgctctgtcacccaggctggagtgcggtggcccgatctgggctcactgcaacctccacctcccgggttcaagcgattctcctgcctcagcctccccagtagctgggactacaggtgcgagccaccgcgcccagcccacaggcagctttagatggtctagcaggagctcagcacattcagttagattctttttttgagatggggtctcgctatgttgcccagattatctgggactcgtgggcccaagcaatcctcccacctccgcctcacagaatagctgggactacaaacgggcaccacaacgccctgagtttgattcttgagtccccttctgtgggcaatatggttataaacttgatgaggagccaggccatacaaataataatacagaatgctacatagtcaggtggtgaaatagtaggtgctacgggcaaggagaaggagatcaattttgttaaggaaagcactcttggctgcaatttctgttgaaagtttctcaaacattaattcaacttaatgaagtgggatgctattatattagagaaatggctaatgtttgttcttcaggtggtcttgtcttgaggtgatggggtttattagagctttccggaaagaaggggcaatattcttactctctcctctcacagtttttccccagactcccaggaacagagatggaatttcacatcttctgctctgggaaagtcacattaggcagaacctcagatccttaaaataagggacttctttttgggaagtctctggtcatttaccctggtacacattaactgggttatctgcaaactaggactgccaacattaggagtaattgtgttcagataaaatgtctctagacttgatacatctgtactccaaccaaaatgataaaaaaatttaaaatgaccagaatggccctttgtggtgtgagcataatagatgcttgctgtagagacacaggtgggaaggagcgagccagcagtgagtgatggggaggacagaggggatcatggtgatgggatgtgtagaggaaggattgggtgagatgaaacacttcaaataatgtgctatttggaaaacattttaaaaccataaatacctcacagatctagggaatgtataatccaggtgttacgtcactatgacaacaagtagttgtagcttcatttactagattgggcctcta

SEQ ID NO: 587777 - DNA, 4001 bp, Homo sapiens
gaagggctgatcccagccatgtggtttgcttggggtatcatcaagggctgctgatacaggggtgctgccttcccttcttctgcaggtgaaaaaggcacattctctcttctcatgtctgagatgtctccatcttgagcatggaactccaagctgaagtcatcaacggaaggtatgatgtactggatctgcacaggggactgcaggccatcttctgacctcaggacatgctcagggacaatcacaaggactgtgttctccagggtcagctgcagcactgtctctggggccaagatgaggatgacctcttccaggctcaacctcacttctgtcccttgttccaggactatcatgagctcctcagtgccagaatcctgctgattctgtggaaagacagtcctcagtattctgccctccaaaaaggctgcaaatgatgctcatggggagggagatgccaggagcttcaccctttacaactttaaaatacaaactccctcccagaattggtgctcatgccaatccacctaaatatacatccactggatgtcccttgaacctgaagattgtgcagcactatccaatctttgctatgcaaggacacaggaacttacctggggaagttccagggactggtatgaattcaggtgtggagctcctgaaattgagggtttttttgcacctgcagagagaccacagtgagggaggttaaggctctcttccagcaagagtctcttgcatttcagaatgtgaccttcagaaatccaccacccagcactggccagcctcaggacaccagcccccaacagtcaagcacgactttccactcaccctgcagaaagcaccctctccatttatggtatcatgagacatgacactgacttccaggcatgggaatcttaaaaaatattagggaaagtgccttacctgtactgggaccctgctccacttggcgacgtttgggtggattcatttgtgtggtagccaaactgcaggacagaaagggacccatcaatcttccacatagtgacacaaagtccaattctcacaagccccaaacttcattagtcatccggcacacattgctgctgtggcccaaaatcacatgcacttgtgttcagctccaaatcctacctgcatccagaaagtcctaacactcatatcccaccctctccttttctagaggcttttcctatcggtgcatgtgtgtgataagacatggcgatcacaggaaacagtttgctttttcaggagctcatccacatgagaaggagggacatcaaatttggcccgaggactttaggagaagatgctgattttccgggtatctaacccctgtgtctatgcagttacagtgtgaatggagtgataaatgacatgaaatgttccattttctagtgagcacaaggaaaaaatttagatcatgcccacagtttacctgtctccacacaagaggcaacttctgtttacccagaggacagagattaacaatgggaagaaacatgagatgagccccctgacaggctgcagaaaccccccatgctggctgcatcctgtggcctccactgtgggtctcatgtctccccaatgtgttctaaatttataacattcaatgtcatggcaggccagggtgtcttctctgccctagtttggccctttagcatacattcacacacacacacacacatacagtcacacacagtcacatgtcaacctcctggcaacccaaagtagccacatactccaacatacctggtctctccttcattgtcattctgcggttctgtctgggaatctctggggcttcttaagcgccggtaaccatacatggtaaaagttctctggacttgcttgtgtcaaaaaaatctcaatctttggcctattttctgtaaatctatatagttcgtgccttgatcttttactctacctggagaaaaattatcagcctctagcacagcacagccagagcatggaagagtgtgtcctggcctgggaccggtcaaatggtgctttggtagagtgagctcttggggaaatcctccaagggtcttataagaggtggagccatgggatttgtcaaaatggatgaatgtgattggctagtggtgctgattaaacaacatgaagggccagcatgggagtggttttatcaaaactcagtcaatatgagtgtgacccagtcagaattagcctaattcaatcaaaattaattcaagatctctactctgattcaccatataattgtgacataaaataacagtattttaaactagcaatatttactttctattgtagtctgttcattaatttggtaggacagttattttctgtaaagttcatgtgtacgtcgtttcttagtaaacataaaggattgggtctaggaaactttaaatatgccacaatttgtatatactcaagtcccttgtataaaacggcgtagaatttgaatataacataatcacattaatttatataatttaaatgatctctagattacttacaatacttaatgcaatgcccagacgtcacgtcatttatgtgaactcaaaaagaatgtgatgcatggaaaatttaaagtttctttgaagaaacttgtgcaaatcttttgtgaatattttctattcaagattagttggatccatgaatatggaacctatggatgtggagggctgacagtatttttaaataaaaaaaaatacgttattttaagtgaattaagttttaaaatgaatctcctggggaaagttatccaaacagaagaagcgaatactataagacaagctggggaaaatacaaaaagaacctttacttaatttctaatatatcattgtgtattaatctgtctgttaatttatttcttgcctgtatccccgctggactaatttcagaattgtaatgcaagttttgctttcaacattacttattaattacaaatccatcattcttattggcaaagtcacctaaacttcttgcaggtggccagacaccatatgcctgaactcagaattagtcattttaagattaaaaattatttgacagtataaagaataatagatggtattgggggaaaacagtaatccagtaatcactagaactgaactagaaggaaaatctgtgagggtgcaccattactgagcgtgccatctctaacaggcccctgagctcagggcttcatcctctctctagaacttgtataaatttgtttgtggattctctttgcatttagctgataatttcatcagttttattaggtgaagtatagaccctgtttcccttaaatgttaaaaaaaaattgaatctaattagcagatgccttttgcactgaagctttcttctccagttagataaatcatttagatgaataaaaggaaaacaggaagattcctttaattttgccaatgtcttaaaagcctccaaggggaacattagtgcctttatccagagaactctctgctttggggattttgataatttctgaggagaacagcaggtaattagctgaatatcagctgcagttataaaattggattaattgcctacattctttctggctgcggggttcaggttgagatattcaagaaatagcctctattgatgattctggagtatgtatattttacagtcaagaaagagaaaggctcctcatggtgagtttctgtgtgtcacgtctagctgaaaacctatggactgcaaaccagtacaagaataaaaatatgagggacgtgccaaatacatattctacctttataatcgctttgattataaaccaaatgttttaatagataaattaataaatttgcagcataaatgtctcaggatatatcctgcagcacagaataataacttatttttgaagaaatatttaagcaatatgttttcatttggggtagaaactatttttcacaaaagtgtagctttccccttgcatgtgtaatgaaaatcacttttaaatctgcagtgctagggtaaaattaaagacgtggctcttgccgttttaatagcaacaa

SEQ ID NO: 587778 - DNA, 4001 bp, Homo sapiens
aagggctgatcccagccatgtggtttgcttggggtatcatcaagggctgctgatacaggggtgctgccttcccttcttctgcaggtgaaaaaggcacattctctcttctcatgtctgagatgtctccatcttgagcatggaactccaagctgaagtcatcaacggaaggtatgatgtactggatctgcacaggggactgcaggccatcttctgacctcaggacatgctcagggacaatcacaaggactgtgttctccagggtcagctgcagcactgtctctggggccaagatgaggatgacctcttccaggctcaacctcacttctgtcccttgttccaggactatcatgagctcctcagtgccagaatcctgctgattctgtggaaagacagtcctcagtattctgccctccaaaaaggctgcaaatgatgctcatggggagggagatgccaggagcttcaccctttacaactttaaaatacaaactccctcccagaattggtgctcatgccaatccacctaaatatacatccactggatgtcccttgaacctgaagattgtgcagcactgtccaatctttgctatgcaaggacacaggaacttacctggggaagttccagggactggtatgaattcaggtgtggagctcctgaaattgagggtttttttgcacctgcagagagaccacagtgagggaggttaaggctctcttccagcaagagtctcttgcatttcagaatgtgaccttcagaaatccaccacccagcactggccagcctcaggacaccagcccccaacagtcaagcacgactttccactcaccctgcagaaagcaccctctccatttatggtatcatgagacatgacactgacttccaggcatgggaatcttaaaaaatattagggaaagtgccttacctgtactgggaccctgctccacttggcgacgtttgggtggattcatttgtgtggtagccaaactgcaggacagaaagggacccatcaatcttccacatagtgacacaaagtccaattctcacaagccccaaacttcattagtcatccggcacacattgctgctgtggcccaaaatcacatgcacttgtgttcagctccaaatcctacctgcatccagaaagtcctaacactcatatcccaccctctccttttctagaggcttttcctatcggtgcatgtgtgtgataagacatggcgatcacaggaaacagtttgctttttcaggagctcatccacatgagaaggagggacatcaaatttggcccgaggactttaggagaagatgctgattttccgggtatctaacccctgtgtctatgcagttacagtgtgaatggagtgataaatgacatgaaatgttccattttctagtgagcacaaggaaaaaatttagatcatgcccacagtttacctgtctccacacaagaggcaacttctgtttacccagaggacagagattaacaatgggaagaaacatgagatgagccccctgacaggctgcagaaaccccccatgctggctgcatcctgtggcctccactgtgggtctcatgtctccccaatgtgttctaaatttataacattcaatgtcatggcaggccagggtgtcttctctgccctagtttggccctttagcatacattcacacacacacacacacatacagtcacacacagtcacatgtcaacctcctggcaacccaaagtagccacatactccaacatacctggtctctccttcattgtcattctgcggttctgtctgggaatctctggggcttcttaagcgccggtaaccatacatggtaaaagttctctggacttgcttgtgtcaaaaaaatctcaatctttggcctattttctgtaaatctatatagttcgtgccttgatcttttactctacctggagaaaaattatcagcctctagcacagcacagccagagcatggaagagtgtgtcctggcctgggaccggtcaaatggtgctttggtagagtgagctcttggggaaatcctccaagggtcttataagaggtggagccatgggatttgtcaaaatggatgaatgtgattggctagtggtgctgattaaacaacatgaagggccagcatgggagtggttttatcaaaactcagtcaatatgagtgtgacccagtcagaattagcctaattcaatcaaaattaattcaagatctctactctgattcaccatataattgtgacataaaataacagtattttaaactagcaatatttactttctattgtagtctgttcattaatttggtaggacagttattttctgtaaagttcatgtgtacgtcgtttcttagtaaacataaaggattgggtctaggaaactttaaatatgccacaatttgtatatactcaagtcccttgtataaaacggcgtagaatttgaatataacataatcacattaatttatataatttaaatgatctctagattacttacaatacttaatgcaatgcccagacgtcacgtcatttatgtgaactcaaaaagaatgtgatgcatggaaaatttaaagtttctctgaagaaacttgtgcaaatcttttgtgaatattttctattcaagattagttggatccatgaatatggaacctatggatgtggagggctgacagtatttttaaataaaaaaaaatacgttattttaagtgaattaagttttaaaatgaatctcctggggaaagttatccaaacagaagaagcgaatactataagacaagctggggaaaatacaaaaagaacctttacttaatttctaatatatcactgtgtattaatctgtctgttaatttatttcttgcctgtatccccgctggactaatttcagaattgtaatgcaagttttgctttcaacattacttattaattacaaatccatcattcttattggcaaagtcacctaaacttcttgcaggtggccagacaccatatgcctgaactcagaattagtcattttaagattaaaaattatttgacagtataaagaataatagatggtattgggggaaaacagtaatccagtaatcactagaactgaactagaaggaaaatctgtgagggtgcaccattactgagcgtgccatctctaacaggcccctgagctcagggcttcatcctctctctagaacttgtataaatttgtttgtggattctctttgcatttagctgataatttcatcagttttattaggtgaagtatagaccctgtttcccttaaatgttaaaaaaaaattgaatctaattagcagatgccttttgcactgaagctttcttctccagttagataaatcatttagatgaataaaaggaaaacaggaagattcctttaattttgccaatgtcttaaaagcctccaaggggaacattagtgcctttatccagagaactctctgctttggggattttgataatttctgaggagaacagcaggtaattagctgaatatcagctgcagttataaaattggattaattgcctacattctttctggctgcggggttcaggttgagatattcaagaaatagcctctattgatgattctggagtatgtatattttacagtcaagaaagagaaaggctcctcatggtgagtttctgtgtgtcacgtctagctgaaaacctatggactgcaaaccagtacaagaataaaaatatgagggacgtgccaaatatatattctacctttataatcgctttgattataaaccaaatgttttaatagataaattaataaatttgcagcataaatgtctcaggatatatcctgcagcacagaataataacttatttttgaagaaatatttaagcaatatgttttcatttggggtagaaactatttttcacaaaagtgtagctttccccttgcatgtgtaatgaaaatcacttttaaatctgcagtgctagggtaaaattaaagacgtggctcttgccgttttaatagcaacaat

SEQ ID NO: 587779 - DNA, 4001 bp, Homo sapiens
agaagggctgatcccagccatgtggtttgcttggggtatcatcaagggctgctgatacaggggtgctgccttcccttcttctgcaggtgaaaaaggcacattctctcttctcatgtctgagatgtctccatcttgagcatggaactccaagctgaagtcatcaacggaaggtatgatgtactggatctgcacaggggactgcaggccatcttctgacctcaggacatgctcagggacaatcacaaggactgtgttctccagggtcagctgcagcactgtctctggggccaagatgaggatgacctcttccaggctcaacctcacttctgtcccttgttccaggactatcatgagctcctcagtgccagaatcctgctgattctgtggaaagacagtcctcagtattctgccctccaaaaaggctgcaaatgatgctcatggggagggagatgccaggagcttcaccctttacaactttaaaatacaaactccctcccagaattggtgctcatgccaatccacctaaatatacatccactggatgtcccttgaacctgaagattgtgcagcactatccaatctttgctatgcaaggacacaggaacttacctggggaagttccagggactggtatgaattcaggtgtggagctcctgaaattgagggtttttttgcacctgcagagagaccacagtgagggaggttaaggctctcttccagcaagagtctcttgcatttcagaatgtgaccttcagaaatccaccacccagcactggccagcctcaggacaccagcccccaacagtcaagcacgactttccactcaccctgcagaaagcaccctctccatttatggtatcatgagacatgacactgacttccaggcatgggaatcttaaaaaatattagggaaagtgccttacctgtactgggaccctgctccacttggcgacgtttgggtggattcatttgtgtggtagccaaactgcaggacagaaagggacccatcaatcttccacatagtgacacaaagtccaattctcacaagccccaaacttcattagtcatccggcacacattgctgctgtggcccaaaatcacatgcacttgtgttcagctccaaatcctacctgcatccagaaagtcctaacactcatatcccaccctctccttttctagaggcttttcctatcggtgcatgtgtgtgataagacatggcgatcacaggaaacagtttgctttttcaggagctcatccacatgagaaggagggacatcaaatttggcccgaggactttaggagaagatgctgattttccgggtatctaacccctgtgtctatgcagttacagtgtgaatggagtgataaatgacatgaaatgttccattttctagtgagcacaaggaaaaaatttagatcatgcccacagtttacctgtctccacacaagaggcaacttctgtttacccagaggacagagattaacaatgggaagaaacatgagatgagccccctgacaggctgcagaaaccccccatgctggctgcatcctgtggcctccactgtgggtctcatgtctccccaatgtgttctaaatttataacattcaatgtcatggcaggccagggtgtcttctctgccctagtttggccctttagcatacattcacacacacacacacacatacagtcacacacagtcacatgtcaacctcctggcaacccaaagtagccacatactccaacatacctggtctctccttcattgtcattctgcggttctgtctgggaatctctggggcttcttaagcgccggtaaccatacatggtaaaagttctctggacttgcttgtgtcaaaaaaatctcaatctttggcctattttctgtaaatctatatagttcgtgccttgatcttttactctacctggagaaaaattatcagcctctagcacagcacagccagagcatggaagagtgtgtcctggcctgggaccggtcaaatggtgctttggtagagtgagctcttggggaaatcctccaagggtcttataagaggtggagccatgggatttgtcaaaatggatgaatgtgattggctagtggtgctgattaaacaacatgaagggccagcatgggagtggttttatcaaaactcagtcaatatgagtgtgacccagtcagaattagcctaattcaatcaaaattaattcaagatctctactctgattcaccatataattgtgacataaaataacagtattttaaactagcaatatttactttctattgtagtctgttcattaatttggtaggacagttattttctgtaaagttcatgtgtacgtcgtttcttagtaaacataaaggattgggtctaggaaactttaaatatgccacaatttgtatatactcaagtcccttgtataaaacggcgtagaatttgaatataacataatcacattaatttatataatttaaatgatctctagattacttacaatacttaatgcaatgcccagacgtcacgtcatttatgtgaactcaaaaagaatgtgatgcatggaaaatttaaagtttctttgaagaaacttgtgcaaatcttttgtgaatattttctattcaagattagttggatccatgaatatggaacctatggatgtggagggctgacagtatttttaaataaaaaaaaatacgttattttaagtgaattaagttttaaaatgaatctcctggggaaagttatccaaacagaagaagcgaatactataagacaagctggggaaaatacaaaaagaacctttacttaatttctaatatatcattgtgtattaatctgtctgttaatttatttcttgcctgtatccccgctggactaatttcagaattgtaatgcaagttttgctttcaacattacttattaattacaaatccatcattcttattggcaaagtcacctaaacttcttgcaggtggccagacaccatatgcctgaactcagaattagtcattttaagattaaaaattatttgacagtataaagaataatagatggtattgggggaaaacagtaatccagtaatcactagaactgaactagaaggaaaatctgtgagggtgcaccattactgagcgtgccatctctaacaggcccctgagctcagggcttcatcctctctctagaacttgtataaatttgtttgtggattctctttgcatttagctgataatttcatcagttttattaggtgaagtatagaccctgtttcccttaaatgttaaaaaaaaattgaatctaattagcagatgccttttgcactgaagctttcttctccagttagataaatcatttagatgaataaaaggaaaacaggaagattcctttaattttgccaatgtcttaaaagcctccaaggggaacattagtgcctttatccagagaactctctgctttggggattttgataatttctgaggagaacagcaggtaattagctgaatatcagctgcagttataaaattggattaattgcctacattctttctggctgcggggttcaggttgagatattcaagaaatagcctctattgatgattctggagtatgtatattttacagtcaagaaagagaaaggctcctcatggtgagtttctgtgtgtcacgtctagctgaaaacctatggactgcaaaccagtacaagaataaaaatatgagggacgtgccaaatacatattctacctttataatcgctttgattataaaccaaatgttttaatagataaattaataaatttgcagcataaatgtctcaggatatatcctgcagcacagaataataacttatttttgaagaaatatttaagcaatatgttttcatttggggtagaaactatttttcacaaaagtgtagctttccccttgcatgtgtaatgaaaatcacttttaaatctgcagtgctagggtaaaattaaagacgtggctcttgccgttttaatagcaaca

SEQ ID NO: 587780 - DNA, 4001 bp, Homo sapiens
gaagggctgatcccagccatgtggtttgcttggggtatcatcaagggctgctgatacaggggtgctgccttcccttcttctgcaggtgaaaaaggcacattctctcttctcatgtctgagatgtctccatcttgagcatggaactccaagctgaagtcatcaacggaaggtatgatgtactggatctgcacaggggactgcaggccatcttctgacctcaggacatgctcagggacaatcacaaggactgtgttctccagggtcagctgcagcactgtctctggggccaagatgaggatgacctcttccaggctcaacctcacttctgtcccttgttccaggactatcatgagctcctcagtgccagaatcctgctgattctgtggaaagacagtcctcagtattctgccctccaaaaaggctgcaaatgatgctcatggggagggagatgccaggagcttcaccctttacaactttaaaatacaaactccctcccagaattggtgctcatgccaatccacctaaatatacatccactggatgtcccttgaacctgaagattgtgcagcactgtccaatctttgctatgcaaggacacaggaacttacctggggaagttccagggactggtatgaattcaggtgtggagctcctgaaattgagggtttttttgcacctgcagagagaccacagtgagggaggttaaggctctcttccagcaagagtctcttgcatttcagaatgtgaccttcagaaatccaccacccagcactggccagcctcaggacaccagcccccaacagtcaagcacgactttccactcaccctgcagaaagcaccctctccatttatggtatcatgagacatgacactgacttccaggcatgggaatcttaaaaaatattagggaaagtgccttacctgtactgggaccctgctccacttggcgacgtttgggtggattcatttgtgtggtagccaaactgcaggacagaaagggacccatcaatcttccacatagtgacacaaagtccaattctcacaagccccaaacttcattagtcatccggcacacattgctgctgtggcccaaaatcacatgcacttgtgttcagctccaaatcctacctgcatccagaaagtcctaacactcatatcccaccctctccttttctagaggcttttcctatcggtgcatgtgtgtgataagacatggcgatcacaggaaacagtttgctttttcaggagctcatccacatgagaaggagggacatcaaatttggcccgaggactttaggagaagatgctgattttccgggtatctaacccctgtgtctatgcagttacagtgtgaatggagtgataaatgacatgaaatgttccattttctagtgagcacaaggaaaaaatttagatcatgcccacagtttacctgtctccacacaagaggcaacttctgtttacccagaggacagagattaacaatgggaagaaacatgagatgagccccctgacaggctgcagaaaccccccatgctggctgcatcctgtggcctccactgtgggtctcatgtctccccaatgtgttctaaatttataacattcaatgtcatggcaggccagggtgtcttctctgccctagtttggccctttagcatacattcacacacacacacacacatacagtcacacacagtcacatgtcaacctcctggcaacccaaagtagccacatactccaacatacctggtctctccttcattgtcattctgcggttctgtctgggaatctctggggcttcttaagcgccggtaaccatacatggtaaaagttctctggacttgcttgtgtcaaaaaaatctcaatctttggcctattttctgtaaatctatatagttcgtgccttgatcttttactctacctggagaaaaattatcagcctctagcacagcacagccagagcatggaagagtgtgtcctggcctgggaccggtcaaatggtgctttggtagagtgagctcttggggaaatcctccaagggtcttataagaggtggagccatgggatttgtcaaaatggatgaatgtgattggctagtggtgctgattaaacaacatgaagggccagcatgggagtggttttatcaaaactcagtcaatatgagtgtgacccagtcagaattagcctaattcaatcaaaattaattcaagatctctactctgattcaccatataattgtgacataaaataacagtattttaaactagcaatatttactttctattgtagtctgttcattaatttggtaggacagttattttctgtaaagttcatgtgtacgtcgtttcttagtaaacataaaggattgggtctaggaaactttaaatatgccacaatttgtatatactcaagtcccttgtataaaacggcgtagaatttgaatataacataatcacattaatttatataatttaaatgatctctagattacttacaatacttaatgcaatgcccagacgtcacgtcatttatgtgaactcaaaaagaatgtgatgcatggaaaatttaaagtttctctgaagaaacttgtgcaaatcttttgtgaatattttctattcaagattagttggatccatgaatatggaacctatggatgtggagggctgacagtatttttaaataaaaaaaaatacgttattttaagtgaattaagttttaaaatgaatctcctggggaaagttatccaaacagaagaagcgaatactataagacaagctggggaaaatacaaaaagaacctttacttaatttctaatatatcactgtgtattaatctgtctgttaatttatttcttgcctgtatccccgctggactaatttcagaattgtaatgcaagttttgctttcaacattacttattaattacaaatccatcattcttattggcaaagtcacctaaacttcttgcaggtggccagacaccatatgcctgaactcagaattagtcattttaagattaaaaattatttgacagtataaagaataatagatggtattgggggaaaacagtaatccagtaatcactagaactgaactagaaggaaaatctgtgagggtgcaccattactgagcgtgccatctctaacaggcccctgagctcagggcttcatcctctctctagaacttgtataaatttgtttgtggattctctttgcatttagctgataatttcatcagttttattaggtgaagtatagaccctgtttcccttaaatgttaaaaaaaaattgaatctaattagcagatgccttttgcactgaagctttcttctccagttagataaatcatttagatgaataaaaggaaaacaggaagattcctttaattttgccaatgtcttaaaagcctccaaggggaacattagtgcctttatccagagaactctctgctttggggattttgataatttctgaggagaacagcaggtaattagctgaatatcagctgcagttataaaattggattaattgcctacattctttctggctgcggggttcaggttgagatattcaagaaatagcctctattgatgattctggagtatgtatattttacagtcaagaaagagaaaggctcctcatggtgagtttctgtgtgtcacgtctagctgaaaacctatggactgcaaaccagtacaagaataaaaatatgagggacgtgccaaatatatattctacctttataatcgctttgattataaaccaaatgttttaatagataaattaataaatttgcagcataaatgtctcaggatatatcctgcagcacagaataataacttatttttgaagaaatatttaagcaatatgttttcatttggggtagaaactatttttcacaaaagtgtagctttccccttgcatgtgtaatgaaaatcacttttaaatctgcagtgctagggtaaaattaaagacgtggctcttgccgttttaatagcaacaa

SEQ ID NO: 587781 - DNA, 4001 bp, Homo sapiens
cctgtgtctataacagcccctcccatcctggtgactccttatttcctaccctgctttatatttcttcattgcatcctcgttacatcaactcctacattatcagtcccttttgcctgactctggtaccagaatgtaagctccagatggagagggcaacatgcttgtgggctgattccctgattgaatgactccactccgggtgtctggaaggcagcacatgtgtgcatctgatgatgttcactgcagcgatctctatcatcatgacaaattgaaaacaagctaaacgctaggggtgactaaagtaagccacatccatatcatcaactacttctcagccacaaagttaggctcatggggcatttttaacaacacaggaaaatgtttgtgacataaaattgagtgaaaaagtcaggatgaaaatcatatttaaaacttgtgattttattacgttgagaatgtgggtttataagtatggaaggaagtacatgaacatgccgagtgtgtatgagctgggttggatggtgggcagctatgatgggtgccctctgtctctctgtctgagatgcagaacatggcacgtgctcagggtaggctctgggccagacagcccaagcttgaatccaggctctgttgcttattcacgaaacgatttagggaaagctacttatcgttgggtacccacccccctttcttcattcctaaaataagcataagataatgccaactttataagactgatgtgtggatgaaatgagaggatggatgttgaagcgaccaacaagtgcttgcaccaaagtcaactctccagaatgaactggcagaagttctcatatccattttgcatcaatgggatccatcccccacattcttggtcctgagatcaacccacaacatctgtatggaatcgtgttgactttcaggttcatgccagagctgagagcctggaagcagtgatggaagcagaaacggctgcttctaagtgatctgagcgatcacgcattagaggagcatattctgctgatgctctcccctcatgcctcccaccccttgttcacacagagtgcagtggaccctaggctggactgaaggaggccaggtgaacctgctgtgttctgggcaagaagtggtgtgcacagggcatgcagcctggcgctgcggtcacccagcgcaggccaggcagacagctctatcatttccccctggggcaactttgggcaaatcctcttcctcaggctttgagttcctcatccacacgttgtctgagagcagatgccccaccgtggtggtgtgggcgttaaacatggggaaatgctcgacccctagcagttgctaggtaccccagcatccctgaagtcttgaccacccccttggagaagaaatgagccatcagggagctctggggggccgggcacaaggacagaagcacccttgcacttggcctgactgagctaggcatccctgggtgtctgtggctcctggaagcctggtgctgatgggagccacagaggcccagggtagtggtccccctccaagtgggaggactcagtctcagctagttctaggcaagagcttcagggcagcctgctattcctctgaggataaagtgtcaggtttcaaaaccaaaactcagggttagacaagtcaaacactgggccaggggagagaggagagaaaggacaagtggtttggagaaggggtatgtggggagccctggagctctggccttgtgctctgcgatccaccctcctggcagccagtcagctggaccatgagcccccatccatgccccttctgcccctgtactcaccactgactgggctggggggatgagggggctgagggcggtgggctcccctagccctgcctaggatagccactccagcctctgggagaggagtccgtggaccgagctgagttcccgtgaccagggacaggagcagcaacactgagaacaggagcatggccctgggctgtgctgtgggcccgggggtgacagaggccagggctgaggcagtgaggctgagagcctccagctcagatccagagcccccaagtgatgtcacaatgggctgtggagccaagaactcagactgtagccacgaagacttcttttctggctgctttgtttccgggacggctgcacagaggcacctcatctcagagcctttcttatcccaggttcccttctctctgacctgggcaccacccagcttcctgagtgttgctgataaagccatacctgagactgggtaacttataaagaaaaagaggtttaatggactcacagttccaggttgctggggaggcctcacaatcatggtggagggcaaaaggcatgtcttccatgtcggcagataagagagaatgagagccatgtgaaatgggaagccccttataaaaccatcagatcttgtgagactgattcactaccaagagagcagtatgcgggaaactgcccccaaaattcaagcatctcctaccgggtccttcccacaacgcgtgggaattatgggagctacaattcaagatgagattagggtggggacacagccaaaccaaatcattgagcccttggtgggcacactgatgctttcagccattgtcacccccaaacattttttgaggcttctctgtgaatgtgggagtaagatatgggggaagggcttccagcctggaccctcgggaatggggtggggcccggggacgcctggaggcctctgccagcaccagcaccctgtggggtacagctgcccgcttagttctctgctcaggactctgacccagggcctcaggtgtggccgcacaggtcaggttgagaggttctggcttcccctcgtgcccagcatggcgggtcccaatcctcctccgaccaccttctagatggatcccacgtggccccaagtctcctgatgggcccctgtgcattcaagatgaaatgaccagcctcggatggaggttgctggtgtgtgccctccctggatgtcagtgactcagtcacgggctttgaaccttgtgtatttttaaaacttccacacccctcagcgcgctgacccaagtggacttacccaagcagcctgggcactgccttcctggccacaggctgagcctcgtggttggaagtgacttatgggctcaatcgccaaagtgcctgcgtgtctacctgcccagtcttacctcctcggttttctcatctgcaacagagaaacacgatgctcactggcgtgcaggttactgtgaggcttaaagtgagatcacatgactgtcgaggtggcctctcatgggtgtagctcgagctactgcccagggaggagattccaggacttctctgctctttctcccaaggcagctccctggcgaaggttgctcctcactgctcaggcatcccctccgaggctgagccacagcctgttgagtggccctgggtggtgccctccccacctgctctaaaccatgcctcacccgtcttttcaacaggggatgcctggccctgatggaggccaggacttcctgactggcatgtgggacaggagcccacagcacacccaggcacctggccctggtctcaccacttagtctcactccttggccctcagggtggctaatagggagctccctggctttcctcttcccctcctttgggctcaggtccccactggacctgctactcatgcatctgctatatgccagtgctttctccttcgctcagtttctattggttctgggggtagggtgtggaggggaggaggagtctgggctccaggtctgatgagggaatggaagatgacagctaatctcacagatggagagacagggggcacgggcatatccactgcaaactgctgctcattttcaatagaagtatctgaacaaaatcatccatcacctccagaaagattgatttcctgctgaagaccacactgtagagtctccatccctcccaagaacatgacttaggtctattcttgtgaaatactcattcactgtccagcattgctttgcaa

SEQ ID NO: 587782 - DNA, 4001 bp, Homo sapiens
gggaaggcttcctgggggaagaggtgcctgagcacagggttaagggtggagaatgctgggccatggaaacagcagcagagagggttggaggggccatctgcaggcggatctgtgtcaatagagccgatctgccgggtgggagtcctggagagggccatgggagggtcagggtgggggacaggggcgcagacatacatggtcagacttgcgttaggatgtgcctcaggaaccaggacaggctcccactgggccgggtgtgtgaggagtggcacagaggcctggggcaccacacccagtgtgggctgcagcggggccccccagagcctagagctggccgggtccccagagcagcaggccgagtgcagggagcagcgcaaggatggcagcagccggctgcagggcatgggccccgctggcgttgcacaagtcggtgtcacagcacgtgatgttcttcttgcccacgtagtagtcctgtgagtcatccacgcagttcaagctgcagcctttgctgatgacggtcaggaggccaactgcgcctggggagcagcgggatccggggatggggctgccctgtgtgctcacctgcctgacctgccccaggcctcctcctgtcccaccctgcctaatgctctagagtccccctgggctggcctcaggattgcaagcagtgcgagggcctggtctcggccctggtctcagccctatccagatgtccgaggcagatggaccacccgctgagcgtcagaaatggggtgagtgagtaagtgagctcagggatggggagggacagatgggtggaggagtggaagatggaggatggggagggacagatgagtggaggagtggcagatggaggaggatggctggagggacagatgctgggtgattgttgggggtgcaggtgcgggacgggtcggggacaggtggaaggaaaacagcacacagatgcggacagatggccagaaagattaatagttcagtggcagagacctaggcctggcggctgtcgtccccccactcacggatgcgcgcggtccagcactgctcccccagctgggtgcagttctccacctgcaggcagtcctcgttgctcacctgggctttgcaggagtagcacagcagggcagtgcctgtggggtggagtgggaggggcctcagaggctgccccatagcactccccaggaatgggggctcccaggcaggtgggcctccatggcggtggcctgaggaagtcctcggcgccctcttgtcaccctcaatgtctcctccccatcttcacggccccctgctcagtgcctccgaaatgttgccctgtttagtccctcggtggctgcttttgtgaccgtgtgtttcagaagaggaagctgcggctgtgggggtgactgaacccgggaccctgggtcgggagggtcccacctcaagcagagcagctccctgggacccttggaagctgcagtgctgggactgggccggatgtagacccccgggtcctcgcaggacacccccagcacctcccccttgtgccccaaaaaccacttcttagcctgaggcttcctgtcccatgtctcccagctcctcatcagcatctctgcccatccatccgtcagtctgtctacctgccccctaggagccaggccctgccccacggtggtgaaggagagtgactccgtgctgcccctgcaagccccggtcacaggggacggcagggaacaggtcgctgcctggtcgtgccaagagcttccctggaggagcggaggctagggcaagagcctcacccccttcctctcccttcctccttccttcccctcctctccgtgtgccctgcaggtatccctctggcctccccggctcacccctgctcccttccctgctgggggccagccaaggcctcacctggctgcagggccaagcctgccatcaacagggcaagcagcacagccttcgtggtcactggtgggctgtggtggagagggcctcaggtgactttatatggcctcaaatggggagaggctggactgcccacagtcaacaccagcgggtttcctggagccagtgagggccccggggctgggcaggtccgagtctcctccctgagcgacctgcacctccctctccctttgtccttctttccacctctggaggacagagcctacccagggccatatctcagccaccccgggctgagggctgaaacgtcctcaagacccagattatgcctctcccacctcccccacctcacagtgcaaggccagacaagggagaccctttctccagactcctccaggcctcggccttccagccaaggatgagggcacctccctgggccctgtgctcctatagaagctgtgccgccctctggggcccacggcccgcagggtgatgagccttggtcacagcgtcactgacagatcattagcaggtgctgcaaaggacaggggcaggggctgttccggtataaaccaaaagtaacattctaaggccccccagccatctgagtggaaccctcctcttggcaagggctttccgaagttaacctgaaaaactggttcaggccatgacagcaaagggttggatagcctcattatccctcctcccttcagaactctggaacagccagcgttaacatcaacacaggccttcagtctgatgagaaacatttaccatctattgtctcggaagcctgctacctggaggcttcatctgatgataaagccttggtctccacaaccccgtataacccagacattcctttctattgataactcttgcaagcgattgccaaccagaagatgtttaaatccacctataacctggaagcccccagttccagctgcccacctttctggactaaaccaatgtatatcttcaatatatttgattgatgtctcatgtctccctaaaatgggtaccatcaagctgtgcactgaccaccttgggcacatgttctcagggtctcctgggggctgtgtcacaggccatggtccctcatatttggctcagaataaatgtcttcaaatattttacagagtttggctcttgttgacacaggggacagcctccctggggaggagaccctgttggacgggccttcatttatggggcattcagtgtgggctgagccctgggctaggtgctttaccctcaggaccttgagtgaccccctcagcttggaactttagctgcaaacgagtcggggaagtgcagcttttagcagcctctgcagtagcaggaggcagcggctaggcccagggctgtatggcctctgtttgccccagatcccctctccgtcctgctccatgtcctgggaggctggtccagctcccacaggcaggagatgagagagtggaagaggcaagttcaggccagctctcctgccagtcagctgggaggtggtggcagtggctatggccctctagagcaggcccagcccgctgggcggtggtggcagtggctatggccctctagagcaggcccaagctctcatgccagtcagctgggcggtgggtggtggcagcggctatggccctctagagcaggcccaggctctcatgccagctggctaagtgttggtggcagtagctatggtcctctagtacaggcctaggctctcctgccagccggctgagtgttggtggcagtagctatggtcctctagagcaggcccaggctctcctgccagccagctgggtggtggtagcagtggctaggaccctctagagcaggcccaagctctgctgccagtggctgggtggtggtggcagtggctatggccctctagagcaggcccaggctctcctgccagtggctgggtggtggtggcagtggctatggccctctagagaaggcccaggtcccgtcagccaggcttctcctgtcccccgggttctggccagcctctggtcactgtgctctccccctcatccctgcaagcccgaggggctggtggcttcctgctgctggctggctttgagggggacttgtggccgctgctgtctccttca

SEQ ID NO: 587783 - DNA, 4001 bp, Homo sapiens
cacaaatgaacagtgtcaacaaaactttctttaaagaaaacacacattaagattggcaaatcaagcttcttatgctcgcatttaaaaaaaaaaaaacaacaacaacattcaaccacggaatttggccgtaataaggttattttagctttgtagctctaatcactctcccacattcaatggtcaggataagagtgctgatccattcacagaacacacaaacagatatttagaatgtgaaattaagagtacatcactgaataagtaatgcataaaacgtgtctaggcatggaaatatcaaatggtagggctagaaggctctgaaagagcatctacctaatcccctcaccctaccaggaaactgtagcgacagaagttaaataatttgcccaagacggtggcaaaaactcacccagtcagtggcaaagcctctaagctaggtgtcctacctacagatccaagtccctttcttgataccactctactccttttagtacaaaaagcttctattaatgaaatatcttacaagacaaatcacttgtggatggatataaaaaggttgtggaaggacatccagccagccactaaaaactggttgaaaaggtgctaatttattttgcatttgcttaactggtgatgttgagcatgttgcacttttaactgctgaagaggaatttcatgactttttgaaaagaaaacctcttggtttgtaaatactctcagaaaagaaaggatcatttcttggaaaagggtagaaagtgaattccctttcctttagcaggggacatcctttccctcacatctcacaaaaatccaatcaacccctccctttcaaggtccagcataactgccagctcctctctgagaacttccaagcccggaggccagaagcttcctctgagatcctccatggtagcctacgcataagtctctcccaggcaagctctcaagcacgcttcttgaaagcagaaatcctatcctacttacctagctaccgggctttgcaaaatcctttgcacatactcaattacaacgaacgcattgaggcatttgttgccagaatcccacttacagtaattttccagatctccgtcttccctacaccaacacctggacccactcaagagttattctggagcggaaatcctggatcccgctatcgggagaaccagtgtctagaaaatgaaatcgtggtgcccattccatcctctgcctagtgggcgtttaacatcctttgacatcgaggggaatggcaaaacgaaacatttattatttaggtcaccaacaacattctaaacccacgtcctctaatcggtgttaatgtgtttaaaaaaaaaattcagaacatcattcgccagaacggaaagctgaaaacggcggataaagttaaatgcatgtaaaacagaatgacttaaacatctgtaaaagctcctgggaattgcaccgaataatcttcccttgtccgtttgctcgctcaattcaagtttgtttagtttagtctttttttctttctttctgacagaaacgtgatagtccctaaatacaagctgaccgggcaaagaaagatcggcatacgaggtcctctttcatgttgccttcttttgatagcttttctccaaagtctgaggttttcaaagccgaggtatgaactaaaacccctaaaccttaacaccacaaagttgaccctgctgggctcctaaaaaacacaaagcaagcaagcgcgaagagaaaaatcgcaccctgcacctatccagacagcacaaacccaggtggccccgggatcctgggggacagagcggcgacaaagcaacacaaaccccacgtcgaacagcggcgccgcgtgcgcaccccgcgcccgcgccccggccccggagctcaccgctgcgctccttccttccatcttccatcgccagcccggccgcgcgccgaaaccgccgccgggcgctccggggccgcagcctcagggcgcgagtgccggcggccagcgccgcgtgctctttgttgagctcccgggactgccgagaggcggcggcccgcgcgcaccctggcggaggctggcgaggctgcgagcccgcggcagccgcccgcccggcccccagtaacgtcaaagcgaaggcggcgcaggcgggccggcggtggcgggccccgggggcggagggcggagggcggagaggcggggccgacgcctcggggaggggggaggtggctgggcctccgaggcgggggcggggtctccagggcaggggcggggcctccgggggaggctggaggcgatccagaccctcgcagtgcagccctcgagcggcccggaccgtccgctgcctcccgcagccgcgcgcccgccctgggcccagcctccagcccgcgagcgaaaacctgcctgttgctttgtcttcttccttcacagttttcccaccctgagaaaagtgagaggtgctttccctggtgtttcctctcaggaagggccgtgtgactggagccgcgagttgggcgccgtctcgccggggctggaggtacgcgggcttcgggacacgcacctaggcgtccctcggggtcccggcctctctgaccgggctcccccggcaccgatccgcggccggagcgtttagtcccggggacccgtcgagccctgaaagggccatttccccctgaggcgagtccccccaggcgccccgcagcctggcctcgggactgcccccaccgacagtgcgtgcgcggggagaggtcacttaaaactgcattttcgaacattagtgccccggacccgcaccttttttcctccgtcctttgatctgtgccgcagaggcaagggctggaacggcgccctcccctggtagagggacggagagaccgcaaatctttccccctgggaggtccgttaagtagatccaagcacctggaggcggaacctgtgtggccggctacagggtggtcctgtgtatgtgttaccgccttattgttccaaagaacagtctttttcaagtgacaggtagaagacgccccaataacgagaagtgactgacttggccaagcttagagatgggagtggagtcaggttccctggtggccccacgatctcgcccaccatgtcagcatgggctgcccggtgagcatagctgagatgcaccaaggccacataagtcacctactttgccttggctgccccatctgcatctatcaaaggaagccttggacacccaccagaggagccagcatgagggagtgtatgcctttatacaaattcactccaacttcagaaaaacgtccgcagctcatgctccccctgccagagcagcagtgtgagcagctgtgtaggtttggaagcaccccagtcacttgggcattgatatggtttggctgtatccccacccaaatctcatcttgaattgtaagtcccgcagttcccaggtgtgtgggaggaaccttgtgggaggtgattgaattatgggggcgggtctttcctgggctgttctcgtcatagtgaatgagtctcacgagatctgaagattttaaaaatgggagcgcttgttgcacaagctctctcttggcctactgccatccgcttaagatgtgacatgctcctccttgctttacgccatgattgtgaggcctcccaaccatgtggaactgcaagtccaataaacctctttcatttgtaaactgcccagtctccggtgtgtctttatcagcagtgtgaaaatggacgaatacaggcatatttctcgtttgtgatctccctttacccttgcgtacataccctacagagacagtcccagtgtgcctattcccagtcaactcctgccttccttgacggttttgttggcaaagcatcaaaagtaagacccagtacaaaatgtagttgctaccctgaggcttgaccactggcctactggcctttacctgggaaattaaccaactcataaacaaacaaaaaaaagtaatcatataggaggcagggtggacatagatttacttgatatttctagttaagggacttgggcata

SEQ ID NO: 587784 - DNA, 4001 bp, Homo sapiens
aaaaaagcagtactgctaatgggcattgtttcttttggggtgatgaaagcatccttaagacagtggtaacgactaaacaactctgaatatgcccaaaccaccggattttatactttaataaagcaagtgatacagtatttcaattatctcaatggtgttatgtttttaaaaatctgaacctaaaaaataggttgtaaacttacatcacgaaatgacaaaaaccattgtagtaaaaataaatgcatttctaagcagaactgctccatcttgtcacttattctacctcatttacaagttcccttttcccactgctctaccaaggaagcactggccttatgcttcaaggtcactgaaaaagcagccagggctcctggacaaccagctggtataacaagtagctgcaaagtctcatactccctcaaccaccacaggattagaaggagttaactgtccttagcaactcttctccaagcacactttatcggcaagcacctgacatcctgcccttgaaatgaagctctaagaatagggaaaagagagagagttttttagactcaactgtgtaaaaatgtcaactcacacattcccagatgataccatgggagaagctgggaatacgaagttaggtctaccaaacccatgctggcttattttgccatagctattaatggtaatagttcagttattaaaactctaagtcaaataccaaaccacagtcaatatcaatggcagaacagcaggcattaactggaactgacccaggcaaactaacatgtatggtaaccctcaacaccttgaacagtttcccaatacacatgcctaccagttaaaataaattgcttcattatgataaaatctccatgaaaatacatttttaaatgcatgattttttcatcctacatcttcctttatagacttaacattacatggctgggtgtggtggctgaaacctgtaatccctgcacactgggaagccaaggggaggactgctttagcccaggagtttgagaccagcctggacaacacggtgagaccctcctgtctatgatgtaaacatttttttaaaaagagacttaacactaccattcagttttgtgaaatctatcccatcaggaaactgaataatcattatcgacagtataacctataataagaaaactcacagtagaaatttcttttaggcaattcatggttactttgtgttttcccatacaagtgacagaaatgtaaaatatttattccaagaactacgttaattacaatcaagtactttttataattatacaaaacacaaaacaaagcccttggagttgtgtttccatgtgtgcttttcctatcatgtagtaaaaacacatgtcaaagaaaggattttcttcttaattaaaccactactcactgctcatttcccagggaaaattcatggcatttatttaatcattctgtgcaaacaatgtaattataccacatatacagtactggcccaattttgttcaaatacaagaggcttattctaatgagaacacattttaaaaatttattacccaaaatcattccattcctcatgttactcattctccatatttgccccttttctactatgctgcccagtccagatgatttcacctaattttcctcacattcaccaaaaccatataattgcaaaatctgtgtgcatcagactttctggatcttcttcaaaaaggtttcagtaaaaggagaaaataaagcacaaaggataaatatgtccctagatggcttcattctgtccatttcacagtttaggagattatttgaacaagaaccggaattgctccttttaaatcagaaagcttgacaatatgatggcaatataaacttaccagcaaccatacagacaccaagaagagcccatcgcaacccctggggtgcgcctggaccatccttcctctccgaagccccgtccagtattcttcagctcccaagttcagtgactgccgagcctcacagccttccaagaacctggctccctgtgaggtcacactactatgacctcacattctcagccgagtgttcattgttgcggtttctgtaatgtttctgcagttctaataaaaacagcagccagaacacaagggccactgtctatcgagaacgtaagaaacagtgagcccagcctcgttcacacttgataaagccaactcagtgatccctctcggaggggataacaccccattttgttttcttgaatacacaagacattgcagctctagtctgctgagcattagatgcgttctgtagtttggattttctcttttctatggttgttttattttccctctttttcttgatcaaatcactttacagcctagtaaggttgcaaataaataaatccctaccagtcacttaaatgtgtaagagacttcccaaaaggttctccctgtgttctagaaaatgcttccctggggcctttatttctgacctccaagtaaacatggtaataattctctcatcaaaacactgcatcatcaaatgaaggaccagatcattgactctgatcaccatgccttctcacaaccttttgaatcatactaagattggcagattttccaaataaaaatagggtacccaataaaatttgaatttcacatcaaaaaacagtgtctagtgtaagtacgtcccaaatactgcacaggacatacttatacaaaaatattattcatcgtttttctgaaattcaagtttaactaggcatcttatattttatctggcaaaacttcctgaaatgtttttttctaaactttatttcaagaattccaataatggtgttccatgattgccaactggtagcttattcacaattagaatccttctggattttttcacttgtttctgcgattttattcctactgtttttctacagttttatcaagactttgttgcctataatctactgattcttctctaacgtcctctaaatacaaaaaaaacaaaacaaaaacaaaaacacaaaaaccctcctctgtgttttcatccttctctcttgacctgcatgctaccaccacaaatgtgataatgtagccactttacacaaatcctacacaagatccatattctgtagcatgtcctaaggccttttccaagctgaccccaatttcttttttcaacctgtcctctaccatttccctcctacttgaaccacacaaatacaagctgtgctcccatgccttttacgtatgttgttccctttgccacactcatcacccccagccctaccatgccaaattctgtgaactcttagtgctatcttttaaaatctcatcgctttcacctaccactgtcttgaattctggtttgaatcctcaacacaaggggcggctgaaggtactcaacagccatctgctaagagaatgcaagaacacagccatctgccatgtctacttcctccactgtcttccatgctatgctatcaataatggtatgtggcactaattttccaattcactgtagctaatcctggaaaaaaactgacatcagtagaatactattgcctgtataaaacaatatactcaatagtgtactgttttactttcaatttttcccagaactttaataaacagtatactattgcccgtttcatacaggcaatagtatactttgaatttaaatttaaaatttctttaaatttttatgtaattgtggtaataaaactaggaccaaaaagaagttaggttaaggtgtcaaagctccctgtatgaccctgtatttataaagtgtaccccaagggttgtacatagaaaataataacagccacctagtcgagttgaattttatacataacttaggcaaaggcaaattagaagaatctcaaggagtgagaagaaatgacttcagctgcaagtggaataaaaagaccagtgggaacaacatgactcctttgccattcttcaggctgatgacatagaaacacagaagactggaaccaacagacaagagggcgggtacaaacgcacagcttccagggc

SEQ ID NO: 587785 - DNA, 4001 bp, Homo sapiens
ctgctatgatacaaactgggaatttttgaacatagattaaagatttgaaacaaggaaataataatagtgttacaatctgcttgagagaaacaattataataaactcccaacaagaaagtaaatatactcatatctaaattctatcatctcttttctgcaaaagttatagatggaatcacaacggagaaggaagacgactgtgttctagtcccaattctaccactaacttggacaagtcacttaacctttggggacacaactactcattggttaaagatgagccttgagttaaaatctctgaagcccttataatgttgagatcctctacttctgtgatgcctttacactctatggggctgggtctacccctggattgggaattagtagggtggatgaaaactagaccagactagcatcatctctctgactacaaatgaccagagatgccatttaaccaattcagtcttgacaagaccctgtacctactcagattcagttcagtcatattagccagccttgttcttctgtaagcttagcagccaccgaactaatcctccaggagtcactgtactaaaagttctcaaggaggccaggaaatggctctgcatagattctggacagagcactgtgacgaagtgagcatgcaattctaggaccagcagtgccttgggaagccagctgagccacccattattgtgtctccccaaacacacagaggagaaggggattccgtgatttacttggtcaaaatgtccaacatgtccaacatggtacactcaggaggccaaccaacctgaaatcttctacataggaagggcttatttgtacttcatgaaaacaataatcagcattgcactaatgtctgcatgaggactggtaccatgcactgtgcagcataatttacatgtattactttaattatgctcacaacagtcttatgagatagatactcccattttacagagctagaaacgaaggaaggaaaaaagctaaggaatgttctacatggtacatgatagaagatatggaactggacctcaagtctggctgactcaaaggcgcatctctagttcactcgctgtaatcccaatttttagaattagtggaagatccttcacacaccaggtctggcaggacccagccccaggatattagaggcaaagccgtcttccaccgcagatgctggaggttggcagacagtcctctcacacccccaccccccacctccgaagataggaattccttcccttgtttgctgctgctcctgctctcttttttcccatcctctgaactccctgttcagagatgtcaaagagaaattgtactgggcacttatggaacacagcaaggaaggcttatcccagactattgcaataggagtcgaggcttctgcaacaggggaaagaaaatggacgccttcgaaacaaaaggcaagaaagtttttaagcgctggggtgagccagtggaaaagaatgggagaagcttagggagaggtggtcaatgagatctgtgtttgctacctggcccttatggaagttaggctcctgccctcccacagagactgggagacagtggccctaactctcttgatgactacatttcaaagggatggctgccaggtgcctgaaaaagacactcttgggttgtagaagatttacatctcaaaagggcagagaaagggggagatcagtgcctatcatccgaaagaaccctgtccaaaattgagtcaagctgaagggaacctcgaggcggtcttggccaggggtttttctttgtcagcccagtcccaggccagttcctcacgtggcgctttacctggcaaggacccgggggtcgaacttggctcggaagcgagccacctgtatcctctgcgccgcctgggccgccgcctcgggcccaggccccgcgcctccgacgccggcttggttttgaccttcgtgcttggcccaagccagcgctggtggccccgggaccaccttcctgctggcgccgcaccccatacccgcaacacgcccgccgctcgcgggacctggggactcgggaagcagccagccccgttcctccgccctttatcaaagagcagctgcgaggggcgggaccctcggaaagaaaccccactggggggtcgtggtcagggagacagcccccaggatacccgctaacgaccgagacgcctggatcatcgctggtcaccgtctgtgtgtgtaatctgacgtgatgaaagcaaagtcaaccaacaggcagaacctgcgcctaattgtctgggcttcactttctgcatctctaacctgacaaagtgaacatataaaattatacgattgtataaaggatatcgtccctctaaagaacttttcgctgagctcatattcggatgacatgaacattaaacatacatatatatatatatttaaaattctaagagcttataatatttaaagtataacttcactgccttctattgcattaaacggatgacaaaggcctgtgtctggcactcatgaccttcatcttccgggtaatccatctaagagagaaaaactgagggccacgatagatgtctagaacccagacgaacaccctaagcaaatacagtgagaaaacctgtatatacatatacagtgtatatacaaaacccgtatatacaaatatagtgagaaaacctgtatatagatataaatatatataaataaatataaatattatgtatggtaactttacattttctatatatttcattcttgtattatttatacatattatacatgtatgtgaatgtgtgtatatatattatacacacacagtattataatacttataaatatttatcattttgataaatgtatattgattatatcactatattgattagatttcattgatatttgtcaattatattcattcacacacacacacacacacacacacacacacacaaatgatgtgtgggaaatgaaatccagtcacgaccaagcaagtcaagatcacatgcctcccaagttgtagaaccggaactggaggctgcttcccgatttccaggccaatgctacttcaatttgtgtaatttcctttctaatttcatttaatttgtagtttggcttaacagggaatgtctgtgatgaataaattagtcatgaactttcccagagctatattttgatggaaaatttaaaatacggcttgcatatagctgagggaaaattagttcatcctgcaaagagagcataactaccaaataatggacttttcttcctaaagaaccctcagaattctccaactactaagaaacaaggaaagaaggtttattttaagcaggtaaacaactcgttcttatatgtctcgagcttttgaactaatttgcagaataggctatctattaggttagagcaaaagtaattgtgtctttgccattaaaagtaaaggcaaggccgggcatagtggctcacacctgtaatcccagcactttgggaggccaaggcatgtggatcacctgaggtcaggagttccagaccactgtggccaacatggtgaaaccccatctctactaaaaatacaaacattagatgggcctgggggtgcgtgcctgtagtctcagctactcaggaggctgaagcaggagaattgtttgaacctgggaggtgaaggttgcagtgagctgagatcgcgccaccactgcactccagcctgggtgacagagcaagagttcatctcaaaaggcaaaagctgcaattacttttgcaccaacctaacagtataaacagaatggaagagagaaataaagggaacaaactgaagtcagatgttaaggtactactcaaaaaaacacaaaattttttcctcagagagcctgttgtaaggattgtttgcataaggatcgcacagcaaataggaagcatctgctataaaacctaaacctgggcagcagtgaaggcgccagacacttccacgaggcaggcagtccctctgcctgtccaccttctcccagcagtgagggccttcatagt

SEQ ID NO: 587786 - DNA, 4001 bp, Homo sapiens
tgtgggaggatattagttttatgaggatttgaaaaactgcagttattcctaagggaggcaccaccggcacttgtgtgtgtgtatgcaaacgactgtgtagaagacaattccctttatgttgtacagcgctgtcacatatgtcacaatacatttagtatccgttaactgctccccctcccaaatactagaagttctctcaatccttgtgactacccaatatatatatccctacacatgttctgctgaccctgacagagaaccttgattgttggataaaaatactgggagagaagtaactgacatgaattgtacattgtgctccagggactctgctaaatgcattcacacacattcatttaattttcataaccctatataagtagatatttcatccccattttacgagtgtggcccctgaggctcagagcaaggttatgcaacttaattaaggacacacagccagttttgaaaccaaaagtgtggctcaaaaactactctactctaagttggccttttaagccataatggtgagagaggtgtgacttccctttctttaaagaggttcattcagaaagtataaatcattctaagtaggaaccacggtgtgtacctccttatgaaccaaggatgaattagttctctaggttaggaatgaggagccacaggcgcagtgccagagttaacatgaggtgtgttcaagatttgggctgggcagctcctatgaaccggtatatattagaatgtgtgtgtatgttttccagggaataagagagttgtgttatgctgtgtgaggtttatgtgtttcatttaacacacagcagttactataccccaggcaccattaaaattgctggacaagatcacatttcagcacgtatgttaggtaatgagtgagcagggtatgcaccgcgtgatgtgtggcgggctggtgtctgtgcagccatgtacacagatgatgggtattgggctgtgctggaaaggaaaggtccgctgtgaggtgtgtgtttagagtggcagtttgtgccgtggtacagatggtagtgtttgaggctgggggaagtgttatgctggatgacttgtgtgcaatgcatacgggaagtgctgcacaggaaagaccgtgtatgcagcacacatgtgcattttttgtgcgttacggatagtgccgaataccggagttccacaggaagggatctaggttgtgtcctgggcctgtgtatggtgcctgcaggcgctgtggattggggtgctttgtatgtgtagcggtgtgtgctgaaagtggtgcatacgacatgattcatgcggtgtgctgggtagggacgaaggctggagcagtgcagaggaggggcccgcgtcgtgatgttgtgtggagcgatgctgagtgcggtgggtgagggggcgatcgtgctaggtgactcgcgtgcgttccccgtgtaaccggaggcgctgtatggagaaggggcactgaggggtaggggagcaggctagcgtactgtgagacaccgggcgggcggaggggccgcgtgggcggcgggctgccagtgcgtgtgcgtggagcagccagcccacttcctcacccagagccatgccgggcccccctccccgccaccctccctcccgcctcttccctagcccttggacgcgccccccgctcggctgggccgccccacctggtaaaggcgaagtacatgaggctgacgatggtgaagctgagcagggtgatggtatgcggccggtagaagaagtcaatggtgatgtcctccacttgctgctcgttgatcatccggaaatgcattttgtagttcacatcatccttgcttagggtccggctccccacgcaggacgccatggcccgcctccccgtcctgccgcggtggcggcggccccagcccgagaaggccgggaccccgggggtgactagccacagtaggctaatagccggacggcaaagccgggtctggcgcccagcaaaggctgggagcagagggaaggacaggcgcgagagggcggggtcgcggcgccgccaccgcggcctggggcaggggacgccgccggccgtccccacgctgtcatcctagctgaggcatctctaccactcgaggaattttcagactccaagtccacaggacttcagaggaatagcgagccggagaagggtagccggggcccctggctggctcttttcagagcacgtagcccgctgtctccccgcgtaacccggcacatggtctcgcccactccgggcgcggcccacgtgggcccgggagcgcggctgcgctgtgtagggcgggctgaggagccggcgtgcggcgcggcgggacgggacgtgcggcccagcgagttggtcggtcccggggtcacccgctacgggaagcaggcctcgccacaggtaaagcaggagctgccccagcacgaggatcgcgctcctggcgagggttcaggttccggcgcacccgcgtccagaccgcgccccagggcctcaagggcctttaggttttcgcggcccagtagagggtgattggttttgttttgtgtttttccctggctgatgtagtgaaaactcaaccatgctggctaattagcgcagtgtgagaagcctcaggagggggctctgccttcctgcgcaagtttggggaactgaagtgggctaaaatggcctgggaagtattgagagaccctttattaggaagctgcccccataacctccctttctctcctgatttcatttatagcatttcgtaggtagaaatcttgaactctatttcagtgcctttttctagcgaagcactaggcactcattgagaacagtatatatgaattgttaagagacttcagtttctttaagggttttctgtaattttcctgatgaaaggaccttgttagaagacttcaggttaccaccttacagggcttttatacacatctgcacatcccctacccgcttttgcatactgtgtaagcaagtgagttaactgtacttgccattgatttatttccattccgcaaacattagagcagtacaaggctctgggaaagtggagaatagtccccggaaggatggatccagggatgagacccagctctgctctcgtgcatgaacagttaatcaattgttaagatgtgtaggcagcaatgaaaggatgtggagaagatagtgcacttgtaaataaaaatgcaaggataaacattagttgtatgcacaaagatcttttaatgacggggtgaaatttgaaagtgagtcttcctgatgtttaagtggtattgagtgtggaaaggcttcaggatgaatttgggatttcaggagtttgaagtaggatgaagtgcttagacgtcaaaaaatgttagagctgataggggccttaagaatcatcttattgtacccctagccttttaaaaaagcattatttgaagaatagttattgaccccacccccaccccccacatcatgggctagactgctgcttttgttagactgctgccagaaacagccttgtcaaggtagcacaaccgaggtcttctgactttcaatttagtgcccttatgactaccgtgcagagaatgaatgttgtaggtttgagggaaaacttggcacatttggagtcccatttcccaccaaaatctaacagaaaccacctatcccagcagggtattgtgaatacttacttcttttctaaaatcatcgcagaatgggccgagcgcagtggctcacgcctgtaatcccagcactttgggaagctgggtggatcacctgaggtaaggagttcgaggccagcctggccaagatggtgaaaccccgtctctactaaaaacacaaaaaattagccgggcatagtagcgggcgtgggtaatcccagctactcgggaggctgaggcaggagaatcacttgaacctgggaggcagaggttgcagtgagccaagatggtgccgttgtactccagcctgggcaacaagggcgaaactccgtctcaaaaaaaataataataataataataataaataattg

SEQ ID NO: 587787 - DNA, 4001 bp, Homo sapiens
gcctgtgttcattattaaactagattatttgatagtgacctgaaattctttaaaggaaaaccttgtaatattgatcttgttgtttctgcagtttaataaacaagaaggttcaaaatgatggtaggttcagcctgtttttccccaccaaggataaccacaaatacaaaacacaaagatattgggacacaaacatccttaaaatgttccttgtttgaatatcatagggcttttctaattaattggctagtataactggatgaaaatattatctatactgtaccccaacaaaaatacgttgaatgctagtttacttttatgtgtcttgtaactagttcatccgtgtgcttgcatcgcactgctcataagttttcaaatatgggacggagtgctcaactctcgaagacatcattttcattacccgtttcccaaataaaatattaaggttgaggctctggtatttcatttcaaatagtactggtctgtttttccagccatgaaaacgtttacattctaagtaaaaatcctagcgatggttaagtcttaaatacaaatccccaaactcttgcactgccttcagctttcagcttgaatgtataaccagttcccataattactacaatattactattatcttagtctcattgccaaaaacccagctgcaggctaactatgcaagaatgagacactgttgaaatgactcggaaaaaaaaaaaaaaagaaactttaccctcactgaatttagctacaaaattctgcaattaaatgaaaccaattcacacacacacacacacacacacacacacacacacacaccccttcttctaagaaagaacaggatgccgctacacaaggaacccagagagaaattcggcaaacagttgcgcctaagccaccgcggcagagtcgggggctgggggcggggaagaggagaaaacttgggaagcacaatgactccagtgaggacttcagtgagggctccagggctcccgccaagaagcccacggggctctaccaaacttgagggtttgcgttcggggacacggcgggcttggggctcgggcaccggcaggccgctcggagcccacccttggctgcccgcgaggccgcgcccgggggacggaggtcgggccgtcgcgagcctccctctcgcgtccgggcgaaccctgccgacgtccctgcgatttccctcttcctcctcctgcctctccccttttgtttttcaggcattgggtccgctccggcggaggccggcccgtcctccccgcgcctctgtccgccctgcgcgcccccagagccccggcctcctcgtcttcctcaggcccctcggcctctccgcgcgcccggccttttcgaaagccgccccccccttcctcctcacgtctcccggactccccacgtcccccagcctttctgtcttccccgaaccccttggcctccccgcgcgcccccaaaacccccgacctcctcgagctcccggcctccccacgtccctcagcctcccagtcttccccaagcctcccgaccacccagcgccccgaacccccgcctcccagcgcgccccctgacctccttaagcctctcggcctccgcgagggcccccaacctcctcacggccaccggcctcccctcctcccagaacccgggccgggggcgcgggaggggccggtctccgccgcatccgccccgggactggttgggcggccccgctctgcccctccgccctcagggccgcggcccagcccacgaccgctgcacagaaggagcccgcccagcccccgacccgcgccccgcgcccggcgccccgcactcactcggaccgcggctcggcgccgtgaagcgaaggcagacgacgacggggcggcgctgggcgacagcagccgcgcttcctcccacgcctcacgccgcgggctcacagtggtccgggaccggcggcggcggcggcggcgcgggctcgcgccctcgaggccgtgctgcgtcggcgcgggcccgcgcgcgtgcgcggcagccggctgaggcgcgcgtcctctctcggcagcgcacgcccgacccggtctcagtccggagttcccgcctctcggggggactgggcatgcgcgccgcccccgcgcatgcccagcgcgccgctaggctctgctcgcgtaatttgtcctgtagtgaccgcgccggggtttcggggtggcccgaggctgcgcgcgggcgtggcggccggacgaggaaagccctggtctcgggggtggccggggtcgccccgccgagcggacatcctggggtcccacctgcctcgctctccgccagcgggattagacggacttcgggaaagtcctccccatctccttccctgcccccaaatcccgaaggggtcccctctggagaacctccctcctgagcggccctgcggccccgcccccagagttggacgcccgctgtcgggcacccgctgcgggccccgggccttgcagtgcactctccaggcaccacaccgaccctaacgagcggttcctgggccctttttgcagacaaggaaactgaggctcagagattcttttcatggcattatagctaagttgggctgggccattatttgattttggaagatgaaaaatcatgaaagggacttagaagtccactggaggtagacaggttacctaaatgaacgccagcagggaacgagccctgcaatccctcccgagggctacagacctgagacgggctccaggaaaaggagggaaggctcgccccgacaccgacccgggcttccgcggtgtgagccagtttcagcgaggagctagttggttatgaccggaacgtgccgtaggtggggtgggggaaatagcaaaaggcgaggttggagggattgaaaaatgcagacggctgcgtggggcttgcttaggtgcctggagtttattctttaggcaacagggaacctttggagggctttaagcaggaagtgataactgatttgtgttatttaaaaaaaaaaaaaagtcactctggcaaccttgtggtcggaaatgaaaccagaagaaccctcaaggctgcaactttcatttttatggtgtcattttgatgctaaccacaagccaggaagcaggacagacaggcaccgaggccttttgaaaggtgaacaccctgaagcccagagaggtgacacacgtcattgcattaggagcttttataaaagtaaaaatgaagtaaaataaaaagcttttgcttatcaagattttaccatatttaaatgtttgggttgtattgttctttaatgagatgtattaaggttggtgtttttctgggttttgttactttttactacatatgaaattgtaaggaattgcctctccatgccagcctcaggcctttgcgcgtgctatttgctctgcctggaacttcttgctcctcacttcgttcaataccctgcttatatatcacctcattgatacagccgaccacttcatataataggaaccacccactgccctgctatcctcacacacagtccgcacttagtctgctctgttgttctccaaagcacctattgttcaccatagcccaacactgtgttcttgtttatttcttgattgtccgctctctccactagaatcttagattcattagagcacgggctttgttttgttcactaataggtcctggcacacagtaagtatttgtcaagtgaatgaacgaagctttgggtgatgtgaagtgagagcttattattaaaaggataagaaaagcatgggaattaaaagaggagagtggaggcacaaagggactgcattaaggataactttgggggaaggggctgcacttagcatagtagactaaaaatggccatcaattctttgacacttttcccaagaagaggtggaatttattcaccccttgaatgtggatgggatcttgtaacttgctttgaccaatgggatgtgtcacaagtgacattgtacaaattccaagcctaggcctcaagaggccatgctgctttcattttccccccttaagcc

SEQ ID NO: 587788 - DNA, 4001 bp, Homo sapiens
cccacctgcccagcatggggctcacaacccattgatgggcactgccagccttgacagctggagcccccccaccccttcccatttgtgctattcacagatttgtcacgttcccagcactcagcattttggaggtaatcttggtgactacacagcggtcagcaggtcagaaggtggtcaggtgggagaacttggccagggatggagaggcaagtcagacagaggtacactgaagttagcagggaaggtgtggggatgaggaggcaggtaattgactacatggcaaggacatggtcagagggcatctgacagtgggtgtcccctccgtattcttgcgcttggaaatgaagtgatgaaggctgagtggcacaaaagttagatacctgggtgagttgttgagagtctgtactaggaggtggcagtgggaactaaaagcaaagacaatcaagacctgtttaagaaaaggagagtttgtgtgtgctgcccctgtgtggccacataaatgaactacaatcttatcttgctgggaccaattctgggaaaggtgagttttcagaggttgttgaattcttcagcactttaaaaaaagaatctcccaaatctacctcacagaatcataaacccatagctttttaaatgaaaaagacattgagaaactctctggggtggccaactccgccatcaggtctccctaggttctgtccagtgtcatgtacaagcaactcaggtgacaaggtcatgcatttctgcctgttactgccttttaaaaaaacccatcagaaatgcctcaggagccctcaaattccatggaaatccctaaaagacactatccatggcgatgctctccatatggcataagttgcaataatgatctaccccagttagagaagaaaaatatttcccttctacttctgtatctcaagctgaccaagtgccatgtgggaggccctaattgtgggggtgttggggggatgcatacctggatcagaagaaggagaaaactgtaatgaaaaaggcctttgaacaaatgtcctttcagctgctggactcttccatttggatgttccactcttaccccaaactcaggtctataaccctggctcatattgctcttcaaacaagccccgttccagccctccctgtgaatgtcaacaaaagagaagtcacctttgactctccctctccctccttaccctgcagccatgcaatctccaatctctaagtcctgggagtcccacaaacttttttcctattcctcgttttctttcctgtcctattgacccatcctggttcaggttctcttttcttatcttttcactaactggagatcacaaaggtggttgagctggtgattaacttttgggatggcatttgaaaccacaagaatggataaacttgtctaaggcaagagtcagagacagcagaggacttcaagtgaagctcttaccaggagcaaatgaatgaagagccaaaggtcaagtggggtgggctgataagtaaactgaaagtgaagacacagaggcggcacgcgctgatgagtcctggaaagcttgactgccaagggcaattgagaccaggggatattggagggggtcgtgggttgaaagaggactgatttgtcatttaggatgatagccagtagagcaggtttcaatgctcacaggaaggatccagtcaagagggaagaggttgtgactttggacatgcgaatccatctttctgagcttttatttcctaatctagaaaagtagaaaaataagtattatctgttctacctgtttcccagggtattgtgaagcccaaattaagtgataggtgtacaaatgctatgaaaaattctatagctataatttttagaaatgatagcaattaaagtaagctttatggggagatagtacatacatacctgccatatagtttatcaagtgttcactctgtgccaagaactttcatctgccgtctagcttgtcttcacaaccgtctatgaagttgctagtcctattcctggtttgcagaaaggaaaaggaagcttggataaggtaaataaattattcacaggctcccaggtggtaaagagcaaaacccatcattggcagggctgcgacattatgtaactggcatctctccattgtaaatgatggaatttaaattacatcatgtaaatttactattatgtagaataaattttattttaaaagaacagtatggttataagtattctaacaaaaaaaatggataaatacaaaaactagctgggcatagtggtgtatgcctgtagtcccagctccttggtggggctgaggcaggagaatcgcttgaacctgggaggcagaggttacagtgagctataatcatgccactgcactccagcctgggtgacagagtgatagtccatttaaaaaaaaaaagggacaaagaaaaacttatgggtacaagtactgaaaaaagtacttcatcaccaagggatgtctacctctaatttaaccagacatcactatgtttacgaagtgggccacagttgaggccaaaataagttgagtatggcttgaatagaactcaaaatcatgccctcaacctaaaaaagaactttctcttttctttccttaatattggaatccctgactttcagatggtcacagcctgcccaaaatgaaggctacatttcccagtctcccttgcatgtgtgaccaggtgcgaccatgtgattaagttctccgcaatggttgaagagtagaagttatgcacgcaactccagaatcatgcccctcaagggaatgagcacatcctccaatattttccactttatcttttccacctccacctgacaatgaaacctggagcagccatccagtctatgatgttaagaatccgggtacctaatgccgtccagccaccatgcttaccctggacatagtctgaacctagtttaacttttacatgagaaagaaatttaagttgcttgggttactttattttggcctttctgttaccatagcctgaactgcatcggtgatactatgacataataagaaatatatatttggtctctgaccgtgcacacaacttctaaaacccttggaatttctggagtgttaagaatgtttttttgaggccaggcatggtggctcatgcctataatccaaacactttgagaggctgaggtgggaggattgcttgaggccaagagttcgaggccagcctggccaacgtggcaagacttcatctgtacaaaaaaatacaaaaattagctgggcatggtggtatgcacctgtagttttagctgcttgggaggctgatgcaagaggattgcttgagcccaggagactgaggatgcaatgagctatgattgcaccagtggatgaatttagcttgggcaacagagcaacaccctgtctcaaaaaaaaaaaaaaaaaaaaaaaaaaaaagccttttgtatgccaatgagatgcctggtggcttaggtatcttagatcccttagatagcttcaggatgagggctggtcatcagaaaaactgaggtatgatgagaaggctgaactttcagcgctatccctaaaacttggggaaggaaaggggctgaaggttgagttgatcacccatggccaatactgtaatcagtcatgcctacataaagaagccttcctaaaaacccaaaagaacatggttcagagctgaagttgcagaggttctcaaagggtggcactttaagggaaggcatgaagctccatgccccttcccacagacctcaccctgtgcatctcttccctttggttgctcacctgtatctttcacaatatcttttttaataaaggacaaaagaaagaaaagtgtttctctgagctttgtgagccactctagcagattaatcaaacctaaggaggggtcatgggaaccctgatgtatagccagtcagtcggaagcacaggccacaacccgggacttgctactggcatctgaagctggagcggggtggcagggtggggagttggggcagtcctgtggga

SEQ ID NO: 587789 - DNA, 4001 bp, Homo sapiens
gcccgcttgggtctcttccaagtgtactttcttttctgtcccaaactttttaataaacttccactcttgctctgaaacttgcctcagttgctttttctgccttatgccctgtattagtccattttcacattgctataaagaactgccttagactgactgggtaatttataaaggaaagaggtttaattgactcacagttccgcatggctggcgaggcctcagaaaacttacaatcacagtggaaggtgaaggtgaagcaagacacctcctttgcaaggctgcaggaaggagaatgaacacaggaggaattaccaaacacttataaaaccatcagatctcgtgagaactcactcactatcaggagaacagcatggggggaaaaccacccctgtgattcaattacctccacctggtctctcccttgacacgtgggaattatggggattacaattcaagatgagatttggggtggggacacagccaaaccatatcatgcccctcagtctaattctttcttccaaggaggcaagaattgaggttgctgcagacccatacagattcactgctgttaactcagacaccttctacccctaacaggtatggggtaggaccctctctggaatcgggctcttatggcctacagtcaaacaaggtaggtcagataatttctttatggccagttattccacagaaaggcagagagaaagagtaatattttaaggtttcaagactggctttaggaaaaaggggttctggtttctatgacctgccttggggaaaaggaattctaatttctatggctatccttgggggactgagagataggagggcagagaaaaatttctgcttttgaggccattttggggtattgttttctgagtttcaacactaacaagtttgcatgccaaaatttcatgaatactgctaaaagatgaaactcctgggtcagagacaaaggataatactaacagcaataatagtagtcacagtattgtcattgggccagtttctgagccctaattcttgcaagactatgtgatgaaggctacagtaggttgcattacaggagaggggccccaagtttaggaaactcacatctcttataattgggaataagtctgccagatctttggagagacaagaattctgtcttccagggctattcaatgcagaaacatccttgaaaagatagttggaaaaaggcagtcagtgcctctgctctctcaagacatgcaggaacatgacacatgtgaattgtctcccaatagaaaaggaatgaaagtgcatcgtgtgaaaagtattctgcatctggaggctgtaaagtgatcaaactgaagcaggaatgaagatctgaaggaaccatccaggcctactgtacctggcaagaattgagcatgaactctagttatctcagctaaactttgcagaagtcctcaatttcactgttttaatgggcacttgcccattaaaacagtggttgtcatgagcactttccacatttatttcactttatcctcacacttcatggaaacagagctattacagccattgtactcatgagtaaatggactttgaaacatgatgacctgttcactttttcaaccacaggacaagaatcaggttttctcggagctcttctgccgccacccctctcttgtttctccttaccgcggcgggccagaagaagactggccaaaataagtaaacgactaatgcaagagtggcataggtcctcaaaaaggcgctgcaaacttaagtggtgattgcactcacggtgctttaagacccagccactacttcggaagcaggaagttggcatctctggtttctcccatccgcgggcctgaggttcccggggattggttaaggtagaggctccttttcccatttgcagccggaagtaggtttccagtaacacggaagccctactacgccgcctgggagacccttccgtgctaccccggccagggacccgcccggacctgaggaggcgggaactgcgggcagaaggcccaccccgctctcccaagatttcccgcgcacaccggaagtgggtggggctcctccgagcgccccctccctccccctcgccatcccccccgcacgattggccagcgccgctgtctctcagcgttccaggggaagggactgggcgattcccagcactcgggtcgcgggcgttggcagccgggcgggtgggaggggccggagcaaaagttccgggcgcccgagccggctgctcgtgccatggagcggagtcccgacgtgtcccccgggccttcccgctccttcaaggaggagttgctctgcgccgtctgctacgaccccttccgcgacgcagtcactctgcgctgcggccacaacttctgccgcgggtgcgtgagccgctgctgggaggtgcaggtgtcgcccacctgcccagtgtgcaaagaccgcgcgtcacccgccgacctgcgcaccaaccacaccctcaacaacctggtggagaagctgctgcgcgaggaggccgagggcgcgcgctggaccagctaccgcttctcgcgtgtctgccgcctgcaccgcggacagctcagcctcttctgcctcgaggacaaggagctgctgtgctgctcctgccaggccgacccccgacaccaggggcaccgcgtgcagccggtgaaggacactgcccacgactttcgggtaagagcagcgatttgcacgaggcggccgagccgggtctggaacccggaatcccttggctctgcggctcccgcccctcctgcctgccagagcccagtgtgcccgcgtctcgctcccagcatgcaggaccccacctctccgacccaggttctcagggctggctgcttcttcaaggtcggcccaggggcccgtgctgggagaagagaatgcgaacggaaagtgacagatgaggttacatgatgttcccaagacagcgacacttgcttctgaagggcccaggccatgcaccccttgtgccagccgggtgtggcccaggtccctttaagcggcacggatgtgggtgcagcccacgagccctgtagcttggcacactcaatttagaagtggaggaggagccacagacctggccaggggtgtggagtcttaagatttcccccaaaccagtcacctacttgccaagctgatcccgcggtttgtattatctgagtgagaggtctctgaccctggctggctggcctattctggtttataaagcagcatctccatatctagagttctagtgactatacataaacccaggagcaacttacagggcaaaactaacatggagaattctttgatataggaaggaaaaatgaatagaagataagggttagcctaactcagcattttccaaaacgtttaatcttagcccataggaagcaatgcattttcccttgtgacccagaacatatgtatcagttgaaacaaaagttttctgaacatgtccatggcactctgatattttctgttacttccctttgtttttttttttttttgagacctctatcgcccaggttagagtgcagtggcgtgctcttagctcactgcaacctccgcctcctgggttcaagcgattctggtgcctcagcctcccgagtagctgagattacaggcatgtaccaacacgcctggctaatttttttttttttttaatttctagtagaggcagggtttcaccatgttggccaggctggtctggaactcctggcctcaagtgatctgccctcctctgcctcccaaactactgggattacaggcgtgagccactccgcctggcctctgttacttttaaaaattacccagaatgtgaaacattgaatttatttcatcacctgctaatgcatgagtcagagccccaattgggagaacactgggtagctggcccgaagctgcatggactggagaggaggagctgcccgagtcccctgtgcctggtttctggccccctctgtggccctgccttctttttttgcaatacctttttaaatacggaagtc

SEQ ID NO: 587790 - DNA, 4001 bp, Homo sapiens
agcattgcgccaacctcagcttctcctagagtagggttgccagataaatacaggacacccagttaaatgtgaatttcagagaaacagtgaataatgtttgagtataagtatgttccatgtagttcatgagacatatttgtagtgaaaaaaaaaaccattgagtgcttatctgaaattcaaatctgagtgtcccgtgcttttattggctaaatctggcaatctcttcctgctgggaagtctcctgcctggctccaggtcccaagtgttgctccaacagaagttgccatggcagcctggcaggccttccaaagccttctagagcagtctccactcacccctgcagcttcccctcgcccctgcacgctctaggttcccaacaagcccagctactttcattttcctggatgccgcccgctgcttccagcctcctgctgcttttagcctccagtctctgcacttgctgttctttcccctcttctcttgtgctaatttctagtcatccttcagctctcaatttggagtcacttctgccaggacgccctcctggccattgctgactggctccccccacagccctctagtgcagggttggatagtaccctgcaccttcccctggcagccctccctcaaccacccggtatcccacactgccctggtgagcagaggccatgccacactcaccttgtccccacaccttgcacctggccgcaggtgggaagccagtgagtgcctcctgaatggatgactgcagactgtcccaccaatgctggggctctccagtgtgactacttccttcctcccttctgtctttagtcactttttcatcagtgtcctcctccccctcccccagagtggttgggaaagacagggccttcagcaacagcacttggggtgaacagagagcatcccacgtagaggggcctcccagcacccaccaccacatcacaccacgtgcactgccccagtgggctcagacccagccacagcgcagcttccgagttcctcctggctaaagccacctctaggcacaactttctgctcttgtccttctgctggctccttaaatgagcggacttggattttgctcccagtttggggtatagggagatgccagtgtcatgtggtcgaggcttagggcaggtggcagggcttgcagaacatcacccatatgccgctccacgctcacccacccaaagcggtgcccacgcgcagcctgacagcaggcagaggcagctctgaacttaacccttgagtggcactcaggaggcggcttctcaagataccagaatggccagtgttaactacacacacacacacacacacacacacacacacacatacacacgagctcccctgtgccccagaacacccttgctttcctccagccagggcttgattcagaagatgacctctcaggtgcaaggagtggctgcaggagagtcagggtgggctgggggtgagactataacccctggggctgcggaagggcccgggagggagcggggagcgggggcaggagctgaaaccccgtggctccctaacctgagctttagaggcagcagcctggctgtgccctcacaccgtcacccctagcctcccccagcctcccctgtctgaatatgttgagaggacaaagagggagaaacaccctatagtgtcaaatttactccaaaaatagaacccctcttccccgcggaaggctggcgagctccgggcatgtgcacagcacccacggctccgatttcctgggtctggccgtttctccgggaactcccagctcaggtgcccaggatcccggaattgtccccaacccctgccacccggtcaagcctccaacttctgccgggcgcagcgctcagccctggctcgcgggagggactcacccagggaggcgcggactccagcgactactcctcgggcaccgccaggtgagccgggacggcggcaagtacaggtaagtcggccgggcaggtaggtgtgcaacggctccggaggctgtggctgagtaaaagggctgacaggttagattctccctcctcctctgagttgttaaccacacccctgctgctctcctccccacttccttaaagggtggggtgtgttgtctgtgtgtgccggctccagcctcttaccataaactctgaaatagacgctgccaccaattccctgagcgccgggcagacctggggggcgatctctgccattcccccggccgcaaatgggatcctcggatgttatgtgccccttgtgagcagttaactccccaattcctaacacccctccatcctctgtccactccacctgcagccttttggaggccaaaaggtgtgtgtgaggtgggtgggggcgcagggcgggcggaggaaaccaacttctcaggctggttctcccaagaccccccgcagtgggagatgttatatctacatggtactgagcacttgtgtcctaatctctccatgtcctaaagtggccccagtccctttgcaggcatgaaaaatcataaataccactagggattttggcagaaccggtccaggtccctgaacacagaagaccaggtccctgagctgtgactaagtagggtctgaggacagcacaagaatagttagagatgctggacagccccttccaggggccccgcccagaggctggtcccctctttcctcaggccggtgatatgtgagcaggcactcaagggcacttagcaacacttcttccctatccctaggaaaactccagacttgctcctgagtaggaggaggaagtgacctggacttggcataaagtgaaaaaagtggagtgtacgcagcatcatcctcatcctacaatgtcctctccagagcccctgtcccaagcttctttattctgtgtcctgtgcaggattggaatctgattcccagagctgccctgttgcacaattctagaggatgctattcacaatgtactttctgagaatggcgccccctggagttgtgctgaggaagcactcagtttccaagattgcactgactccttcccatttctgaaaagaaactggagacttagataagttaacaaagctaggaagtcaatgtttctcaaagtataattagtggactacccatagctattggctggatgtcactctgggtccgatgaagatcagactctctgcagctagggcccacctgcccagcatggggctcacaacccattgatgggcactgccagccttgacagctggagcccccccaccccttcccatttgtgctattcacagatttgtcacgttcccagcactcagcattttggaggtaatcttggtgactacacagcggtcagcaggtcagaaggtggtcaggtgggagaacttggccagggatggagaggcaagtcagacagaggtacactgaagttagcagggaaggtgtggggatgaggaggcaggtaattgactacatggcaaggacatggtcagagggcatctgacagtgggtgtcccctccgtattcttgcgcttggaaatgaagtgatgaaggctgagtggcacaaaagttagatacctgggtgagttgttgagagtctgtactaggaggtggcagtgggaactaaaagcaaagacaatcaagacctgtttaagaaaaggagagtttgtgtgtgctgcccctgtgtggccacataaatgaactacaatcttatcttgctgggaccaattctgggaaaggtgagttttcagaggttgttgaattcttcagcactttaaaaaaagaatctcccaaatctacctcacagaatcataaacccatagctttttaaatgaaaaagacattgagaaactctctggggtggccaactccgccatcaggtctccctaggttctgtccagtgtcatgtacaagcaactcaggtgacaaggtcatgcatttctgcctgttactgccttttaaaaaaacccatcagaaatgcctcaggagccctcaaattccatggaaatccctaaaagacactatccatggcgatgc

SEQ ID NO: 587791 - DNA, 4001 bp, Homo sapiens
agtgaataatgtttgagtataagtatgttccatgtagttcatgagacatatttgtagtgaaaaaaaaaaccattgagtgcttatctgaaattcaaatctgagtgtcccgtgcttttattggctaaatctggcaatctcttcctgctgggaagtctcctgcctggctccaggtcccaagtgttgctccaacagaagttgccatggcagcctggcaggccttccaaagccttctagagcagtctccactcacccctgcagcttcccctcgcccctgcacgctctaggttcccaacaagcccagctactttcattttcctggatgccgcccgctgcttccagcctcctgctgcttttagcctccagtctctgcacttgctgttctttcccctcttctcttgtgctaatttctagtcatccttcagctctcaatttggagtcacttctgccaggacgccctcctggccattgctgactggctccccccacagccctctagtgcagggttggatagtaccctgcaccttcccctggcagccctccctcaaccacccggtatcccacactgccctggtgagcagaggccatgccacactcaccttgtccccacaccttgcacctggccgcaggtgggaagccagtgagtgcctcctgaatggatgactgcagactgtcccaccaatgctggggctctccagtgtgactacttccttcctcccttctgtctttagtcactttttcatcagtgtcctcctccccctcccccagagtggttgggaaagacagggccttcagcaacagcacttggggtgaacagagagcatcccacgtagaggggcctcccagcacccaccaccacatcacaccacgtgcactgccccagtgggctcagacccagccacagcgcagcttccgagttcctcctggctaaagccacctctaggcacaactttctgctcttgtccttctgctggctccttaaatgagcggacttggattttgctcccagtttggggtatagggagatgccagtgtcatgtggtcgaggcttagggcaggtggcagggcttgcagaacatcacccatatgccgctccacgctcacccacccaaagcggtgcccacgcgcagcctgacagcaggcagaggcagctctgaacttaacccttgagtggcactcaggaggcggcttctcaagataccagaatggccagtgttaactacacacacacacacacacacacacacacacacacatacacacgagctcccctgtgccccagaacacccttgctttcctccagccagggcttgattcagaagatgacctctcaggtgcaaggagtggctgcaggagagtcagggtgggctgggggtgagactataacccctggggctgcggaagggcccgggagggagcggggagcgggggcaggagctgaaaccccgtggctccctaacctgagctttagaggcagcagcctggctgtgccctcacaccgtcacccctagcctcccccagcctcccctgtctgaatatgttgagaggacaaagagggagaaacaccctatagtgtcaaatttactccaaaaatagaacccctcttccccgcggaaggctggcgagctccgggcatgtgcacagcacccacggctccgatttcctgggtctggccgtttctccgggaactcccagctcaggtgcccaggatcccggaattgtccccaacccctgccacccggtcaagcctccaacttctgccgggcgcagcgctcagccctggctcgcgggagggactcacccagggaggcgcggactccagcgactactcctcgggcaccgccaggtgagccgggacggcggcaagtacaggtaagtcggccgggcaggtaggtgtgcaacggctccggaggctgtggctgagtaaaagggctgacaggttagattctccctcctcctctgagttgttaaccacacccctgctgctctcctccccacttccttaaagggtggggtgtgttgtctgtgtgtgccggctccagcctcttaccataaactctgaaatagacgctgccaccaattccctgagcgccgggcagacctggggggcgatctctgccattcccccggccgcaaatgggatcctcggatgttatgtgccccttgtgagcagttaactccccaattcctaacacccctccatcctctgtccactccacctgcagccttttggaggccaaaaggtgtgtgtgaggtgggtgggggcgcagggcgggcggaggaaaccaacttctcaggctggttctcccaagaccccccgcagtgggagatgttatatctacatggtactgagcacttgtgtcctaatctctccatgtcctaaagtggccccagtccctttgcaggcatgaaaaatcataaataccactagggattttggcagaaccggtccaggtccctgaacacagaagaccaggtccctgagctgtgactaagtagggtctgaggacagcacaagaatagttagagatgctggacagccccttccaggggccccgcccagaggctggtcccctctttcctcaggccggtgatatgtgagcaggcactcaagggcacttagcaacacttcttccctatccctaggaaaactccagacttgctcctgagtaggaggaggaagtgacctggacttggcataaagtgaaaaaagtggagtgtacgcagcatcatcctcatcctacaatgtcctctccagagcccctgtcccaagcttctttattctgtgtcctgtgcaggattggaatctgattcccagagctgccctgttgcacaattctagaggatgctattcacaatgtactttctgagaatggcgccccctggagttgtgctgaggaagcactcagtttccaagattgcactgactccttcccatttctgaaaagaaactggagacttagataagttaacaaagctaggaagtcaatgtttctcaaagtataattagtggactacccatagctattggctggatgtcactctgggtccgatgaagatcagactctctgcagctagggcccacctgcccagcatggggctcacaacccattgatgggcactgccagccttgacagctggagcccccccaccccttcccatttgtgctattcacagatttgtcacgttcccagcactcagcattttggaggtaatcttggtgactacacagcggtcagcaggtcagaaggtggtcaggtgggagaacttggccagggatggagaggcaagtcagacagaggtacactgaagttagcagggaaggtgtggggatgaggaggcaggtaattgactacatggcaaggacatggtcagagggcatctgacagtgggtgtcccctccgtattcttgcgcttggaaatgaagtgatgaaggctgagtggcacaaaagttagatacctgggtgagttgttgagagtctgtactaggaggtggcagtgggaactaaaagcaaagacaatcaagacctgtttaagaaaaggagagtttgtgtgtgctgcccctgtgtggccacataaatgaactacaatcttatcttgctgggaccaattctgggaaaggtgagttttcagaggttgttgaattcttcagcactttaaaaaaagaatctcccaaatctacctcacagaatcataaacccatagctttttaaatgaaaaagacattgagaaactctctggggtggccaactccgccatcaggtctccctaggttctgtccagtgtcatgtacaagcaactcaggtgacaaggtcatgcatttctgcctgttactgccttttaaaaaaacccatcagaaatgcctcaggagccctcaaattccatggaaatccctaaaagacactatccatggcgatgctctccatatggcataagttgcaataatgatctaccccagttagagaagaaaaatatttcccttctacttctgtatctcaagctga

SEQ ID NO: 587792 - DNA, 4001 bp, Homo sapiens
tgatcccagtcatattctgaggcctcaccctggccactcaccgtgctgttctcgccaatctttctgtagatgctgctgttatctcaggggtctcagctgcgagagggacagccatcttctgtagggcacctggctcagtgtccagggtccaggctccctgatggcaaggtgcccaatgcctcctgctgctctacagttcttaatgccctctcacgcccaaatctgtttcattatgacaagaccatgatggcttatctcatgtcacaggggaaaggactcagccataaatgaccctgcacacagctgcagcctctcacacagcctggcacagtcagaggctctgtcaacggccccgcacacaactgcagacgctgcaaacggccccaggcctgcaaacagcagggcgttctgcagaggccaggctcctccaggaggccatgcaggtcgctccagactccactcccaagaaagcttctgtaaacgcatctcgtcccatctgccagggttgccagcggcaggtatctctgctgcctctccagggcacagtggtccctccctcctgtggtcagcgctgacccttgctcagtccctcctcacacagagatctgggccctgaagcccctagtccagcctggtctaacctgaggcctcatccagagcccagcaacatctgggacagcaaagggctcgggagggccccagcccaggccacggctgagcacgcacagcctggtccatgtatccccctgcctcaccccctgcctctatccacacagcgtggagtccctcctatcacacgccagccccctgcaggcctcccaggggaccccgttgatcccccaacaccctcaaccccaacccccggggcacccccatctccctcctccaggatcctgtaacaggcgactgggctttgttccaaggctgtgagccctgtctggccagccggggctggggacccctcttgcgaggcctgagggcagctcagccgggcttcccagacacctgggccacctgcctgccacacctccgtctccactcacctcaatgaaggtgctgagcgtggcgttggtggggttgtgggtgatgaggaagcgcatgtgtttgtagctcacctccaccggggccgggcggttcatccgagccatggcgcctcccgacgggcccggcagggcagaagggactgcagagaaggctggggacacgacctgagaagtccccacacacccccaaaaaatgaggagaacgagatccctgtgcttgtccaagagaaacgagatttaaaaacccacccccataccccgcacaaatattgtgcaaatacttgggtgtgggggaggaagctgcccactgtttggataattaaaaaagaaaacccaactcttaaaaaagaaaaggaacaaaacagcccgccgccccccccaacccaaccaaagtaaagcgggcaactccaaactcccgtctctcagagctggatagtcataaagaggcaaaaaataaaaagaacaaccaaaaaagctcagcaaagaaaacttaaaaactcaaagtgaacccggccgccaagcagtgtccagagctggaccccacaccgggggcgccctctccacattggtggatgggcagacagcccccttcactcagaggtgggccccaagcccccaagggccagaggaagaatgaacttgaactgaaccaactccagctgccttgggccaggggtcacgggcagtggccgtggggacagcggcctctgacgtgtggggcctgtgtcacgttaccccatcggggtacggtgagtcctggagtggggcagggggctcaggcggtagagctggccccaggctgggcagcagaggccatcggcaggcgagggcaatggtgagagccagtggcacggggacccctcagcaggaggcgcggcgaccctgggcgcagcagtgcttagggctgggccccgtggcccactccatgaaccccaggtgggtccacagcacacagcatctgtggggaaagacgaaggaaatgaatagaaagggatcacagggggccccgcctcccacaaggggttcatgcctgtcatgagcccacagtcacaggcgacacctctcccagagccctcctcctgaccatgctgagagaatgacccttttgggtctatttccttatatgggagcacaaggaagcacggctcctgccaggactgacccagggcccagaggcgacagggtagccaccacacagccagcagggcatgacggaggacagaggggacagggatttcagggacacacacacccccgaggacatgatgaaccccagcacacagatgacagatccctctgtggggacagaggccgagttcctaagaagcctgagcctggcccctgcccacctgctgtgatctgcggaaactccaccccaggacagctgccctctcctcttccgattctcagccactgtgaacatctgagcccaggtgtctctgggtggcccatcctcagggaatggggcccaggcactcggtcagtgctgccagcacagggaggtgaggggcctggccccacacgcggccgtgggccaccctaatcgcctcttgctttctgcagaaagtctcctgcctgtcagcagccccctgtccaccagtgtccccccgccactgtgtctccactgctcacacaggtctcagccaggctcggggataaacaggccagctctgcccctccaggagctcagggaggcggggacagaacacgccaatgggccagccatcaggcacacatgccaaggtggtgacagcacaggtggccaggagtgggttcacaccatgacagggccctgaagaggggaggcggcagggggggccacagcaacccaaggcacctccacgcctgcctctctccctttctgggtctcatgaccccaaagctcccaggcaaaggggttccaggagcacgcagcccccttccctctctacggaagggctgggaggccttgagcaaggtgccggcctctttgttaccccatgagcacgatgaggggtgacacaagtgacccaagctgtatttgggcactgctgctgaggggtccccgcactgctggccctggctgtgacccagctgttagcagactctccagccccctagactcaacccaagcccggccctgtcactactgcctgctacccaaggaaaggcacttcagggcccctcgcccagcagagccctccattccccaacccaccccctctcacctgtgcccctgccccagccccagcacccccttcccagctgcccaccaggcaggctgggcccttggagcttcagcccaggtgcaggtagggcttgaggcctgggcccctggactcagagggtggctacctgggacagtgggctcctccctgcctgccctccacaccctgggtggcagccagtgctcatgggctcagagcagccgccacacctcaggctctgtccactgcatggttctgggaaggttaaaatgggcggtgggtgtcaggcgcagtggctcactcctgtaatcccagcattttgggaggccaaggcgggcggatcacctgaggtcaggagttcaagaccagcctgaccaacatggagaaaccccatctctactaaaaataaaaaaataaaaaatgagccaggcatggaagtgcatgcctgtaatcccagctactcgggaggctgaggcaggagaatcgcttgaaccctggaggcagaggttgcagtgagccgagatcgctccattgccctctagcctgggcaacaagagcaaaactccgtctcaaaaaaaaaaaaaaaaaccggtggtggggtgggacccccagaaggaggtaaaggtggagacaaggatactgtccctggtcccgccagtccccaccttgcccgactggagggagcacaggctctgagtgtgggtgagggaagccaccacgtgctaacagcacacaaacacctgggtccctcttggggcagcaggatgtccct

SEQ ID NO: 587793 - DNA, 4001 bp, Homo sapiens
gtgtcagctgccagcaaagaatgccaaaatcaaagatgacttctgtggtttaccagcactacgaagaaagcacaggataagaaaggagtggctatgagctatgccaggccatggcagccgggggcctctctatgaggtgacattgcaggctggggcctacagaagaaaggaactggaaccccaagggtgatgaccccaaatgagagctggtctggctgtcagtgaagagaacggagccatgcgtcaaagtgaaaagatgcatccagaagacctacccttgctgcaaagaggcagccggcctcattctgcagccaccaggcagaaggcatgcccatgggaggggaggcccttctgcatcttctggcttccttccccaccaggccactgtcagccaagttcagctgctccattcaacctcccatgagagctgaagcagcatgagacaggggacaggctctcatcactgtgcccaaccaggacggtgggaacagataacccttctagaagcctttccatcccaatgattaaaagaggaatgggttagaccacaggctacagctcactcctggagccggatgcaagcctgaaacctgacgataaaaaaacacgtattaaacccaacagaatttggatggcaacaaacaccccaacagacaacccgttcgtggggtcagttatggcccacgtccaactcaacaatgacaccacctatctggcaccacgccacagcagacctgagcccccatttaaccctcatgagcacagggcgctgttctgcgggtgctaggggagtcaggcatccactctcctcctccaccttcccatgtccagtccttgtctctgagcctcctcctccttcaccatcaactctctgactgctgcctgaagacagtcaccaggtcctcaacccttacatcctttctctctggagtgcccctcaaaggtcacttactcctgtggcttcaagagaaaggacatagtagaaagagtggagttagccagtcctgtgaatcacacactgggctgccctcgcaagctgggtatcttgtgtaaatgcctctctccccctagtaactggtttctgcctcagtgggacatgggaccagcccgcccgctgggggcctggcaatggcagtctaaggacactccctggtcctgccagtccagccttcagccatttgcccaagctgtcttctcaaacagaccttatcccatcccgctgggtgtgggctgggggaagggtgacaagtaatacaggggtaaactgcggctgagaaaggtccaaaaggggattaggtcctataagctaagtggtgagaaggaaagaccagacttcatcgtgcatgtgttgtgtgcatgggtgttctccctctacgttaataacgcctgccctgcccggggaagtgggcactgagcagagcagggggcgactcactcctctggatgcccacgcagctccctagggcgcccagcaaatggcaccctgggtgggaactggcttctggtgcgcactagacctccaactgcctgtctggttccccactgcgtccccagatcctcccgcagagctggggacaatgcgatttctcaaaacacgtaggatgagagcgcacgtccttcctttccacgtggagacaagagaatggagataaccagatccctctccagcaccggagaacgaattcacagctgcaggcgtagtgagccaaggccgccccatgctctgagctgcaggcccctttctacaggtcccgtccccttctgatcccatcaacccgaaggcccacgcgtcacccccagaaccccgcttccgtcgtgaccacggcgcacacccccgtcggcaaagggaggacgacgacccccgcttgccggacctagcggacaggaacgcaaccccgccaggctcgcccgcaagggccacacgccgcgcccaggcccccgccccgccccgccggaagctggggtccgcaggccggaagctgaggccgcgagccggccgccggcgcgcgcccgccccgcccccgcctcacgcgacccggggacacgagggagtccgcgcgggacctgggaagaccgccgcgttcttgggaggccctccgcgcccaggctgggtcgacgacccggccccgcaagccgagggccgcccgcgctcatgggggggctcacttacgagagctatggtcgccgtcgccatcttgcgtccgtcgcggcctccgcgcgcgcctcccactcttgctccttccgctgtctcgcgcgatctgggtgccggtgcacggaactctcgcgaggaaggaggtaagaacgcgcttccggggcggggaggaacggtaaacgcccccgggaggggcgacggaaggggcgtgctcttggccgggcgaggggcgtggcccgcgcacctcgggcgtctaggggcgtgcgccgcgggactcgagtcgggcgtatctctccgcgtggccgacgcgggcgtgcgtagtacccttcgccgcccgtcgcccttgcggccactgctacgcttctcttctctgccttttttggagaaaacgctgtcgcgtgcgtcgtccagaggctctcccccaggaggcaggcgaaagagcggggccctcctgggctggaggagtctcgggtgatgaaaggcccgcgtgtttcaggctgacgtcgtgagatgcgtcgtccccgcgtcgcgacatccctgggaccgggaggccccgttcaattggcagctttttctccttccagggaaccgatgaccctaggttggctgacatcagtcgctagacccgcagcccgcaggccccgttagtccctgaactggctttcatggcccaaggtgtctgtcagtactgctgggaaagctgcctgtcctggacatttgccatctgctgcacccagtcccgagaccccaactcggtcatccgaagaagccacatctgtaagctcaggcaccttcagctgcctaaggccacaaggcatcccgggcaggcctcctttcaaccctgggaacatttagaatttaatacagacacttctacttaaatagggcagaatattccccgcctccctcctgaaaccttccaaaattataggaaaggggttttataaagacaaaccctgcaagggcaaagagctgggatattgcagagcttaagaaaggtggacagcgagagctactccagcccacttggctatggaggccagtgtctgagggtcgtgggtgaaagcacagctacagaaaggaaaccccagacctctgtccctacccaccggggctggcaggcactgcagtgtctgagacgtgagctccaggagaggagctctgaggccctgctcaagcaaggccctgtctgaaagcctgggagtaagtgagactctgggtcctacccctgcctccacccctgggctgggtctgaccacccgcatgccatcaggcttctcagagaagagggctcctctctgcagcagctcctagctcaaaagaaaagactggcagggcacctaggggtagagtgttgcccagtagaatggcccagccagatccctggcctcgaagctcaccaggtcataagccccagccactaaaagcatctcactcttcaatgcagctggacagcccaggatcaccagacacctgagaaagaagaaaagggactcagaagaaacagagacgataaaggaagccgaagaaaaatgaaaactaaaatgccattctcagtcaataaaaaggaactgggggctatagagaaagaaacctcgggatgagaaagagctcttagaaataaaacatgaggggaaagtgagcaattcaataggcttttaagatgaagtcttccagaatgtataatgacagaaccagatagctggaaaacagaatagcagtaacacaggtgggtgctcttagggctagcctggcacacaaggcctccacaatggagggggtggatgggaggtggggggctggtctgccaccaccaccaggggaagccacaggcaccaccctctgggga

SEQ ID NO: 587794 - DNA, 4001 bp, Homo sapiens
ttgctgcaaagaggcagccggcctcattctgcagccaccaggcagaaggcatgcccatgggaggggaggcccttctgcatcttctggcttccttccccaccaggccactgtcagccaagttcagctgctccattcaacctcccatgagagctgaagcagcatgagacaggggacaggctctcatcactgtgcccaaccaggacggtgggaacagataacccttctagaagcctttccatcccaatgattaaaagaggaatgggttagaccacaggctacagctcactcctggagccggatgcaagcctgaaacctgacgataaaaaaacacgtattaaacccaacagaatttggatggcaacaaacaccccaacagacaacccgttcgtggggtcagttatggcccacgtccaactcaacaatgacaccacctatctggcaccacgccacagcagacctgagcccccatttaaccctcatgagcacagggcgctgttctgcgggtgctaggggagtcaggcatccactctcctcctccaccttcccatgtccagtccttgtctctgagcctcctcctccttcaccatcaactctctgactgctgcctgaagacagtcaccaggtcctcaacccttacatcctttctctctggagtgcccctcaaaggtcacttactcctgtggcttcaagagaaaggacatagtagaaagagtggagttagccagtcctgtgaatcacacactgggctgccctcgcaagctgggtatcttgtgtaaatgcctctctccccctagtaactggtttctgcctcagtgggacatgggaccagcccgcccgctgggggcctggcaatggcagtctaaggacactccctggtcctgccagtccagccttcagccatttgcccaagctgtcttctcaaacagaccttatcccatcccgctgggtgtgggctgggggaagggtgacaagtaatacaggggtaaactgcggctgagaaaggtccaaaaggggattaggtcctataagctaagtggtgagaaggaaagaccagacttcatcgtgcatgtgttgtgtgcatgggtgttctccctctacgttaataacgcctgccctgcccggggaagtgggcactgagcagagcagggggcgactcactcctctggatgcccacgcagctccctagggcgcccagcaaatggcaccctgggtgggaactggcttctggtgcgcactagacctccaactgcctgtctggttccccactgcgtccccagatcctcccgcagagctggggacaatgcgatttctcaaaacacgtaggatgagagcgcacgtccttcctttccacgtggagacaagagaatggagataaccagatccctctccagcaccggagaacgaattcacagctgcaggcgtagtgagccaaggccgccccatgctctgagctgcaggcccctttctacaggtcccgtccccttctgatcccatcaacccgaaggcccacgcgtcacccccagaaccccgcttccgtcgtgaccacggcgcacacccccgtcggcaaagggaggacgacgacccccgcttgccggacctagcggacaggaacgcaaccccgccaggctcgcccgcaagggccacacgccgcgcccaggcccccgccccgccccgccggaagctggggtccgcaggccggaagctgaggccgcgagccggccgccggcgcgcgcccgccccgcccccgcctcacgcgacccggggacacgagggagtccgcgcgggacctgggaagaccgccgcgttcttgggaggccctccgcgcccaggctgggtcgacgacccggccccgcaagccgagggccgcccgcgctcatgggggggctcacttacgagagctatggtcgccgtcgccatcttgcgtccgtcgcggcctccgcgcgcgcctcccactcttgctccttccgctgtctcgcgcgatctgggtgccggtgcacggaactctcgcgaggaaggaggtaagaacgcgcttccggggcggggaggaacggtaaacgcccccgggaggggcgacggaaggggcgtgctcttggccgggcgaggggcgtggcccgcgcacctcgggcgtctaggggcgtgcgccgcgggactcgagtcgggcgtatctctccgcgtggccgacgcgggcgtgcgtagtacccttcgccgcccgtcgcccttgcggccactgctacgcttctcttctctgccttttttggagaaaacgctgtcgcgtgcgtcgtccagaggctctcccccaggaggcaggcgaaagagcggggccctcctgggctggaggagtctcgggtgatgaaaggcccgcgtgtttcaggctgacgtcgtgagatgcgtcgtccccgcgtcgcgacatccctgggaccgggaggccccgttcaattggcagctttttctccttccagggaaccgatgaccctaggttggctgacatcagtcgctagacccgcagcccgcaggccccgttagtccctgaactggctttcatggcccaaggtgtctgtcagtactgctgggaaagctgcctgtcctggacatttgccatctgctgcacccagtcccgagaccccaactcggtcatccgaagaagccacatctgtaagctcaggcaccttcagctgcctaaggccacaaggcatcccgggcaggcctcctttcaaccctgggaacatttagaatttaatacagacacttctacttaaatagggcagaatattccccgcctccctcctgaaaccttccaaaattataggaaaggggttttataaagacaaaccctgcaagggcaaagagctgggatattgcagagcttaagaaaggtggacagcgagagctactccagcccacttggctatggaggccagtgtctgagggtcgtgggtgaaagcacagctacagaaaggaaaccccagacctctgtccctacccaccggggctggcaggcactgcagtgtctgagacgtgagctccaggagaggagctctgaggccctgctcaagcaaggccctgtctgaaagcctgggagtaagtgagactctgggtcctacccctgcctccacccctgggctgggtctgaccacccgcatgccatcaggcttctcagagaagagggctcctctctgcagcagctcctagctcaaaagaaaagactggcagggcacctaggggtagagtgttgcccagtagaatggcccagccagatccctggcctcgaagctcaccaggtcataagccccagccactaaaagcatctcactcttcaatgcagctggacagcccaggatcaccagacacctgagaaagaagaaaagggactcagaagaaacagagacgataaaggaagccgaagaaaaatgaaaactaaaatgccattctcagtcaataaaaaggaactgggggctatagagaaagaaacctcgggatgagaaagagctcttagaaataaaacatgaggggaaagtgagcaattcaataggcttttaagatgaagtcttccagaatgtataatgacagaaccagatagctggaaaacagaatagcagtaacacaggtgggtgctcttagggctagcctggcacacaaggcctccacaatggagggggtggatgggaggtggggggctggtctgccaccaccaccaggggaagccacaggcaccaccctctggggacagcttcccttggcaataatgtgcacgcaggatgcatggtgcccaggactgttcttacacacattcattcatgggatcctcacaacccagtgctatgcaatggatacagctgttaccccatttttactgatgggcaacatcacaaggcagggagcagcagtagaatggctccagagcctgtgttcttgccaccaccatgactgcatctcaaaagagaagtccaggtcaggcacagtggctcatgcctgccttcccagcacttcaggaggctgaggca

SEQ ID NO: 587795 - DNA, 4001 bp, Homo sapiens
gcctgatggagttcaatttcactctagtcgaggcattcttgttcttcaccactggcctttctgccatccattctcttttctttatggctgttgcaaattttcctcatctcttcttcatacttgataaaattctccccaaaccttgtccaagctttgaatggaacagtaatagtattacggtaaggtggtctcacctcacttaccttcaggaaaattccatatttattagagcccacatcaaagtagaaccttttattgtccactctgaaagaagtcccctctgggagttcaagcgggtcatcgtctccacctcttcgttcttctatgtctccttcgccatagtcttcaatcagctgaaccaaggcatcacgaaactcaatcattccttgtgctgggaggacaatagtctgttcttggcccaaactgtggccaaaataacctatcatgccagtcccccgcatcatggtttgtctaatccgtaggaagcgaccccgctgattttcctttaggtctaggtaatatttcctattgtccctctcgatatagtctgttttcaggacactgtgaggatgctcttcggaccccaccgagactggtggggagggtgccgagtgcttctgcctccttctggagccttgctctttgctgtggccatgctcttgccggtggcctttcaggcccaggtgggcatagtgctcgatgaagtcccctagacagtccttcagctccgctgccacagacagggagagggtcagtttactctttctgatgttgtcctgccggcctctccctatccagacttcggctatctttaggaagcggccccgggagctttgcttcacgtctaggtaaaacctctttttctggatgtccactcgtttggaggccagctcctggatttcggctgcgcccccggcctgattaggggtggctgaggccgcgtagtgggggtagtgggagtgctgggcctggggatagagtctactcttgcttaggccagagccccctacattcttgcctccgcggccgcggccgccgccgcctccccttcgcctggctctttccatcttcagctgcaagtaacaaacagacacacgggatggggtgggggaggggtgttgagaacaatcgcagacgcccctcggcctgaccgccccgccgccgcccgcgacccccacgccgggcccggctcccccggcgccgcagcgcggggctccagccactgccggccggttggcggccgccgctccggctctgcccgcgctccccgcatccctccgccgcccccggggccgctcccgcacgccgccgccgcccgtcccgcgctccgcggccccaggtctccagccggcgggcactcacatcatctctgccatcaccgccgccgccgatgcccttcacgaccaccgccgccgccaccgccagctctcggcccctctgctgcagccgccgcagccgccgccccccgcctcctcccccgccgccgccgctcgcactgccccccgccggagcagccgggcaggggcatcgcccgcggcgcccaccgcagccgcccctcctgcggccgctgcgggggccgccgcctgacttcggacaccggccccgcacccgccaggaggggagggaaggggaggcggggagagcgacggcggggggcgggcggtggaccccgcctcccccggcacagcctgctgaggggaagagggggtctccgctcttcctcagtgcactctctgactgaagcccggcgcgtggggtgcagcgggagtgcgaggggactggacaggtgggaagatgggaatgaggaccgggcggcgggaatgttctcacttctccggattccaccgggatgcaggactctagctgcccagccgcacctgcgaagagactacacttcccgaggtgctcagcggcagcgagggcctccacgcatgcgcaccgcggcgcgctgggcggggctggatgggctgtggtgggagggttgcagcgccgcgagaaaggcgagccgggccgggggcggggaaaggggtggggcaggaacgggggcggggacggcgctggaggggcgggtcgggtaggtctcccggagctgatgtgtactgtgtgcgccggggaggcgccggcttgtactcggcagcgcgggaataaagtttgctgatttggtgtctagcctggatgcctgggttgcaggccctgcttgtggtggcgctccacagtcatccggctgaagaagacctgttggactggatcttctcggggtaaagtgtcttcctattcccgttttcccagctccgtgccccggggtatctatagtgctaggcttctgagacacgtggaggcgcttaggcccgcggagcaggcccctgggctgtgtttgggagattctggaaaaacagactttctcccttttcctttcccctctggagcagctgggaaaggcgtctctcggagcttccgccattcagaaagtgtttccccgcccctgacggccccagcttgatgtttaccttgcgcgcttagttaggattgctctttctagtacggcctttattatggcagaaattgagccactacaggtctgcacagcaaagtcgagggaaataacctgctgtctatgatttagcaagtgatgatggatatttttgagttcaaatcactcagtctttaatggattttcttttctttttttcctagttgaatctcagttgttctcaggctaggtttgatatgaaaaatactactccctattgaagagggtaatataattcttaggatgctaatacaggagtctgtaagtcggagtacttcaggctttttatggttcggtacatttctttttaggggtgggatattgggataagtaggacagttcagatcttgatgtcattgaatagtggtgtctacctaaaaggaagaggctggggcacaaaattataatttaaagtgtttacttcagccaaaatgaggacagctgcccaggactcatttcccagttgccttggggagtgctccttcagccttggttacaagcaggtttttaaaggcgaaggggaagagtgggctgagacaaagttggtcaggaattgttattggtttacagagataccattgcttagtgattggctgtacactgtaactcatagggtatgagttatcgtgtccagcatatggcattttatggcttcttggttccagtctagagcccatatagcaggtgggctttaagagataattatccagctcagaccgggagtgagacgggactgttttttcattctaatgcctctctgggcctgataatttaaaggggcttgcattcttcagctaaaattttattttcttttattttttttcccccacagtggtctccctttattaatccaacaaatgtttattaaggactgctctaggcactagagataccaacaatgaacaaaacagacaaacatctctctccttttggagcttacattttagtggaaagagacaggcaaaaagtaaaattataggatgacagaaggtgaaaatagagattaaaaaggaaagggggatgaagagtgtgtgtgtgtgttgtgggtggggggctgtagggagctgcagttttacaataagtggtcagggacgtcctcgctgagaagggaatttttgagtccagagctcaaggaagtgagagaacttaccttgacgttctctggaggagaagaaagtacaaaggccctgggggaacctgcctctttatgttcagagagcaacttaagaggcctagtgagctggagcagagcggagaggaggtcagaggtcaggccagaaagggaaaggggccagaatgtgtaggactttatgggctatattgaaaattggggctttcattctgagggagatgggaagctgttggagagttgttagggaaacgtgatctgaattatgtttctaaaaaattggagtaagatatcataaaatttgccatcttagtcttttttgtatctggccaattccactca

SEQ ID NO: 587796 - DNA, 4001 bp, Homo sapiens
ccaacccttctgaaagagtgttaaagaagaagcataaagtataacaccttgagtccatgatatattttggggaagaaacctcttgcaatctttaaattagcatgaaaagctacaccaccaagatttccatagcaaagccattggatgaagcctcccactcaatgtgacataaaagtaattcctgaaactttggaaagtcaataaaaatatatggaacattaagtagaggtaaagaagggattgtaactaaacttagaataacgaattaaaactctcccatggctttgatatggcaactataaaatgtagggttaccacaaagtttgaaattatagaatactatagtattcttaagaaatattatgacattatatttttaaggtttaattaggtaataagatttgatcctttgatggtatattcagttattcaacggacaatatacgtctacttgtacttttataagtaaatatttatatataccggaggtcaatttctgtttctgtggtaactgccctacaggtaagcttagcagcttttaatgaagtagaattgaaatacttttgggggaaagtcacacttctatttaagtatatgtatcttttttcgggattatgtcatagtgcaatgtaaatcttagttatggtatttagaatgtcagaatgtcacattttgtgctgatttgcatacttcaatagtctggagcagttgaagcagctaaactatttagctctgggaaggttggaattcccgtaagaattatagtgatctatgtgtaacataacatgagaatcagacttcctgaagtatcaactactagaggtattactaataacaacgggccaaaaaagaggaaaaacttcttcaaaggataatggatcagtacttttagccaatttgtgattttaaattttgcctgatggagttcaatttcactctagtcgaggcattcttgttcttcaccactggcctttctgccatccattctcttttctttatggctgttgcaaattttcctcatctcttcttcatacttgataaaattctccccaaaccttgtccaagctttgaatggaacagtaatagtattacggtaaggtggtctcacctcacttaccttcaggaaaattccatatttattagagcccacatcaaagtagaaccttttattgtccactctgaaagaagtcccctctgggagttcaagcgggtcatcgtctccacctcttcgttcttctatgtctccttcgccatagtcttcaatcagctgaaccaaggcatcacgaaactcaatcattccttgtgctgggaggacaatagtctgttcttggcccaaactgtggccaaaataacctatcatgccagtcccccgcatcatggtttgtctaatccgtaggaagcgaccccgctgattttcctttaggtctaggtaatatttcctattgtccctctcgatatagtctgttttcaggacactgtgaggatgctcttcggaccccaccgagactggtggggagggtgccgagtgcttctgcctccttctggagccttgctctttgctgtggccatgctcttgccggtggcctttcaggcccaggtgggcatagtgctcgatgaagtcccctagacagtccttcagctccgctgccacagacagggagagggtcagtttactctttctgatgttgtcctgccggcctctccctatccagacttcggctatctttaggaagcggccccgggagctttgcttcacgtctaggtaaaacctctttttctggatgtccactcgtttggaggccagctcctggatttcggctgcgcccccggcctgattaggggtggctgaggccgcgtagtgggggtagtgggagtgctgggcctggggatagagtctactcttgcttaggccagagccccctacattcttgcctccgcggccgcggccgccgccgcctccccttcgcctggctctttccatcttcagctgcaagtaacaaacagacacacgggatggggtgggggaggggtgttgagaacaatcgcagacgcccctcggcctgaccgccccgccgccgcccgcgacccccacgccgggcccggctcccccggcgccgcagcgcggggctccagccactgccggccggttggcggccgccgctccggctctgcccgcgctccccgcatccctccgccgcccccggggccgctcccgcacgccgccgccgcccgtcccgcgctccgcggccccaggtctccagccggcgggcactcacatcatctctgccatcaccgccgccgccgatgcccttcacgaccaccgccgccgccaccgccagctctcggcccctctgctgcagccgccgcagccgccgccccccgcctcctcccccgccgccgccgctcgcactgccccccgccggagcagccgggcaggggcatcgcccgcggcgcccaccgcagccgcccctcctgcggccgctgcgggggccgccgcctgacttcggacaccggccccgcacccgccaggaggggagggaaggggaggcggggagagcgacggcggggggcgggcggtggaccccgcctcccccggcacagcctgctgaggggaagagggggtctccgctcttcctcagtgcactctctgactgaagcccggcgcgtggggtgcagcgggagtgcgaggggactggacaggtgggaagatgggaatgaggaccgggcggcgggaatgttctcacttctccggattccaccgggatgcaggactctagctgcccagccgcacctgcgaagagactacacttcccgaggtgctcagcggcagcgagggcctccacgcatgcgcaccgcggcgcgctgggcggggctggatgggctgtggtgggagggttgcagcgccgcgagaaaggcgagccgggccgggggcggggaaaggggtggggcaggaacgggggcggggacggcgctggaggggcgggtcgggtaggtctcccggagctgatgtgtactgtgtgcgccggggaggcgccggcttgtactcggcagcgcgggaataaagtttgctgatttggtgtctagcctggatgcctgggttgcaggccctgcttgtggtggcgctccacagtcatccggctgaagaagacctgttggactggatcttctcggggtaaagtgtcttcctattcccgttttcccagctccgtgccccggggtatctatagtgctaggcttctgagacacgtggaggcgcttaggcccgcggagcaggcccctgggctgtgtttgggagattctggaaaaacagactttctcccttttcctttcccctctggagcagctgggaaaggcgtctctcggagcttccgccattcagaaagtgtttccccgcccctgacggccccagcttgatgtttaccttgcgcgcttagttaggattgctctttctagtacggcctttattatggcagaaattgagccactacaggtctgcacagcaaagtcgagggaaataacctgctgtctatgatttagcaagtgatgatggatatttttgagttcaaatcactcagtctttaatggattttcttttctttttttcctagttgaatctcagttgttctcaggctaggtttgatatgaaaaatactactccctattgaagagggtaatataattcttaggatgctaatacaggagtctgtaagtcggagtacttcaggctttttatggttcggtacatttctttttaggggtgggatattgggataagtaggacagttcagatcttgatgtcattgaatagtggtgtctacctaaaaggaagaggctggggcacaaaattataatttaaagtgtttacttcagccaaaatgaggacagctgcccaggactcatttcccagttgccttggggagtgctccttcagccttggttacaagcaggtttttaaaggcgaaggggaagagtgggctgagacaaagttggtcaggaattgt

SEQ ID NO: 587797 - DNA, 4001 bp, Homo sapiens
ctccaacattgggagttacaattgaacatgagatttgggtggggacacagatccaaaccatatcaaacactgttagcatctccatttttacagattaggaaactgtgacaccaagaagttaagaatttgtccaaggcaacacattttgtaagtggtggcaccagactcccagacaggaatctagccaagggcctgagaatccaccattaagctttatttttaaacatagtggaaggctctgcatgacaacactgacaacatcacttcagttctgctcattacatttagaggtgtgtgtctaatgcaagctaatctcttctttgaaacacctaggaaacaaaatttaggtcgagttgtacctcatgtagctccaagatacttcattagacaagcagccccttctccaaggctttgctgctatctaccaaaaaactgtcattacaaaaggacaaatggctggttctgagtctgaaggcacttgcagaactgtgctgtccacatagcaataagcagtgctcccaagttcaagaatcctttcagttattacagtaagacgtattttgatatctgcatgcatataaaattaatgaaatgctttatagaaatgaaaatctatggataatatgtcattttctatgtaaataccatcaaattggactttttattaccaagtcctcatttcacgattatgactgacaaatgtgtggcaatgatcctcttaaacatttatatctcaaaattccaggaattttaagctatttccctctgcccaagaatggacttgaaacactgcaagcagttttgtcttccatgaacatgacacaacccacaaaatatttattatagagcaggaaacctctttagtctgcatctttcagcatttttccttttcttcttttattttttcttaaatttttgaatttgtcgtctttttctttctttaaaaatagaccctagaaacagatccttttcttcttttgtggtgatttgcccttctaattatctaattatgacttaatttaatctaaataaatctaaatgtttgggtttattatctgaatattaaagatgagaagataggatttgaactcagacctgtttgacttccaaattctggtttgccctactatcccgtaatgcctcctagatgccgattagtctaagcggctgctccacaaggcttttaagcattcaagaactctactggaccatttgagggtctgttctggagacagacagtgcttcaagtgctgagggctcaggacttcaccctcccaggaggtacacacagtacaaagcctaacaatttgtcagcacataatcaattgaaaccacactctaaagttaaattagttccttccaaatggggcagacacgtgctgaccaattaagaggcccaaagacttgggagtagaggatgaataggaataaattgagaaagtatgcaggaaaattattgaaggaagaatgaagacgagaattctcaatgctaagttctggaagatgctggaagagaactgaatccaaaacaaatatatttatgtcaactcatcattgcttacattttctagtctaacagagcagaaccatgaaattgtttgaaaagtgaaaagcctcttctaagtatacaagcagggagagcattaggaatcgtaaattaaaaggacacaggtcctagcagagaagcaatgaagcattggggaagagggtttctggggaatttatgtgaacttacagaactgtggtctgctgtggtacctgaggaatgtggtccagcatcaagtgcatgcagcggacggtgctcttaaagcaaaggcaccggctggggcagggcaaccctggcaggcaccacccggccaggagaaagagagtggtccagcagaacagtctgggctccatcgctccattcgctgctggccacgcgaagaagcagccggagggagagcagcagctgcagctgcagcagcaaccgcagtggtggtgatggtggctgctggactgagccaagtttgggagccgtggtggaaagcagctcccagggaaaggacacccctctgaccaatccaggaggagggatatcacattacagggctgagggcacaagcagctctaggaagcactagactcccagaggcgaggacgagaagcttttcaatgcaaaagcctctttctaaaacaccgtgttttaggcagcataatgcaaacaaacttttccaaaattacttccactgcgcatttgatgaaaaacccgacctcttagcctccagctgtcctcttgaagcccaagttgattaagaatgtattgaaacaatgcagaacagcttttcttcttttttatctggtaacattaccaaaccctaaagggcaggcagagttctaattcgttcatctaggtgcacatattctttctttattccaaactatgctctttaataaaaattgtttcatttccttctatatattctgctgctgaaacccaacacatttcactcatgtaagactcaaacgggctacttctgatttcttcttttaacgtttaaatttatatgcttaaaaccatgaactcacatacctccttcaagaggatacaactgatggacaaacctaagtatgtatatgtaaagtcaaacagatgcaagctccctcaggacacactggcagcagtggtcttgctggttgcagacttttcatcagcagtttgaactggccatctttccctgaagtgagcagcacctcgttgaggacgtgtctgaaaacttaataaatatgaaaacatctactttttggtcattctgtaagcaggtatttttaaacagatttttggctttatctttaaagactaacattttcaaacaaaaatgttttaaatccataaaagtaatagaaaacaaattaaaacttgcatggtcaatcccagatgatcagactagtagaccaatcttaagaggaaaataagttcatccttgtctctgcagaaatgtttcagtccctttacattctactgtaggcgaatactgccctcttttggcaaaatgttcatatctaaatatgtgattttggggagattaaaatgtaaaaagatctaaaaaacaaaactaatctccatgaacaagaatgatttattttaaactttacatttgacattgttcacatgacttttattgtccaagtataccaataaagccaaaaaacgaaatttattcctttaaatcccaacaatcactatgctcttggcagtgcctgtgatttggaggacatagacaagacctgcaggtttgtgccttgtttgcagttcaaaatataaaatacaaaaaatataaataatataaaatatataaaatacaaaaatataaaaatatcttgcattcataaagtagacttaaaaagggtagggactcagaaatatgtaagttcaggagggagaaaaaggcaagacatgcggttctaaaagtcattgagctaagggtgtataataattaggtcgaaggaaaaaaattctgcaagtttttgtgccttgttttcagttcgaattataaaaaaaaatctagcattcataaagctttttttttttttttttttgagatggagtctcactctgttgccaggctagagtgcaatggcgcaatcttggctcactgcaacctctgccttccaggttcaagcgattctcctgcctcagcctcctgagtagctgggattacaggtgcctgtcaccacacctggttaattttttgtattttagtagagacagggtttcaccatgttgaccaggatggtctcgatctcctgaccttgtgatctacccgctctggcctcccaaagtgctgggattacaggggtgagccaccgcacgcagcccataaagcattttttttacagaaaaaaaaatacaaaaaactttccactttagaaacctaaacttatgttgaatgaaaaaaaaatctactgattaccaactgtcagtacaggactaagaactgcaaggcatggccctgctcagg

SEQ ID NO: 587798 - DNA, 4001 bp, Homo sapiens
caagcacatacgtgcactcacgaccacacaggtgcacatgcactcatgagcatgcactcatacacacacgcacacacatgcactgacatacatgcactcaccacacgtgcacacgcacacacaagcgcacgtgcaaacgcacatgagcacatacatacacacatgcacacgcatagcctcacatatacacacgtgcatatacacacactcacggacatgcactcacacatgcatacacacacacacacaaacactttgctttggccctccacaaccttactttcctcctggcctctaatctcccttttcccagcccagaccagccagtctgcaaacttcagctaaataaaccacccatccctggctctgataagtgtcttagtgggacaggagccaagagctatcctgggctcctgagggtatgaagaacctgggctctatgctcacttgaaagtgacataggttcctgtctgttggtgcactggccagtatgtgctgagcttccacttttcctggaaagaaaggaaaaggaagaggggttggtgaaggggtgggataggatggcacggagaggagagggagctcacttggcctctcaggctcagccacgcctggcccatcctgggccccctcctggccccaggaacccaaagcgggatgcaccattcactgggcccaggcaatcagatccactgattctacttggcggtcaacgcccctgactgctgctgggtatggaggccaggagcttacctcattggtgaggacacagatccctggggcctctgcctccagggaagggaaggctgcctggagcagaagaggcagtacctctggaggaacaccaggccttgggggaatgtggtgggtacaaaggcagttgattggccacagaaggcccaatcggggcccaggttcttcgagagggagagtctatgctggaatgtctaagaaaaggctaaatgcctacttggtagaaattatctgcttttgtcgggtacggggtggaaagattgggttagattttggtaaggtcgaacaggaaggcacaagtgtacaccacaacctgaacacagcaattaatcatgacagtggcagccaaacacaccagtactaagctcaacactagacatttatgtctcatttaacctgtacagctctgggaggcatgcggtactgccaggtttcacagggaagactcctgagactcatagtaagctatttcccgattgatcttgactcttctggaccctgaagtatggctgaaggcagagagtcaaaagtcacccagctctccctatccacaatctgcagagaggcttctaaatgcctggaggagtatatggtcagcataaatattccgggtataaagcagtgtttctcaacaggggatgattttgcctgtctcctccccccacccaggggacattcggcagtgtctggaggcatttttggctgtcacaacgtgggggtgctgctggcacaggatggatagtctggcccaggtgtccctagagccaaggtgtctgggggagaagccctgctgctccccatgagaggggctggcgcgcaaagagaaaatcagaggctggaagaggtgagcctggccaaggccacgcggccaggaagccggccacggaagcggcacctagccacgtgtgactcaaatcttcccgcagccacgtcaaaaaagtaagagcaaacaggcgtggccccggctgcgcccagcggagcggagacccggttggctgggcccgcgcccccggccccactctcgcggcaggacacctcccacggggctgctcccactccagaccgcaggcctagccccgcgccgccccacctgctctgatgaggccctgcgcgatggcccccgccatgcggcccgcgcccacgaagcccacgcgccgcggagacggctccgcagctgccatcttgttgcctcggacgccgctgcgctcaccgcccatccacaggccgcgccccgcccacagatctaggccccacccccgccctccaataggactcgcctccccgtccccaccctcgccgattggttactgggacggcacactccggccggctttttgtccgcactctacaagttcgcaaggcgcgggaaccccgcctctcgctgcttattggcccgaaagggctatgccgcccctcactgcccattggctgagagaaactgggggcggggccgtaaggggcggggccggcggggtactcgcgctcggagaggccggaggagcggggaggggtcccggtcgcgcgtgcgaggagcacatgttggttttccggaggggaggggtagcgaagcgggttgcggggctggtccagagcgtgcggtcactgaggccccgccgaccacagacggtggagctgcggggaagcactaggggcggagacccaggtcacggagagcaggccagggccaggggcctgagaccgacggaggggacagtcggggagggggtactcgtcacttttaatgacacaaggaaaacaaggcttgaagatctgagtgcggttttttcatcatccaatctaaagctgcatgttacatatgttattttcttttgaagcctttgacattttcttttttcttttttttgagacggagtctcgctctgtcgcccaggctggagtgcagtggcgccatctgggctcgctgcaagctccgtctcccgggttcacgccattctcctgcctcagcctcccaagtagctgggactataggcgaccgccaccacgcccggcttatttttttgtatttttagtagagatggggtttcaccttgttagccaggatggtctcaatctcctgacctcgtgatccacctgcctcggcctcccaaagtgctgggattacaggcgtgagccaccgtgccggcccaagcctttgacattttctaagctcttcagtaatgaaatcctctcattgattcaacattcactgtgcagctgcagcctctgggccctgctctgggcctgggcaagatcaccccacggcagcagatgggacaggctggaccccaccctgcagccctgcttggtggcagtgtagacagactacagtcagcacacacgcaggacagccagtgtgtcaaggctctgaagcaaatgaggtggaaagggacagaaagccaccaggaggctgcttcggccactgcagccgagaaacgtgggtggtggacactttgcaccagcacacagcgtcagcagctgtatctcctgccacctcggatcctcccagccccttcccacagactccctggattttctcccaggccccctgggccagtgatggctcaggaccaaggctgtggggaggtgagaggggccagaggcatccagtgccatgccatcatacataaggacaaagctcatcataaacaagtggactgaggcgaggtgaaggaggattgctggctgagtgcccagggccacagtgggtaaaaggaggcccaggggcccagccccgttcagcttctccgtcccatgccgggctgggcttctgagcatcagctgggagccctcagctgacgtggacacccagccagccaaggcttgtgtccagggcacctctctgctcttggctgggcttcttcccactgttcacctggtggatccaagcagccacataggcgccaccctctccaggaggcctttcctgaacccccacatgggcagagcctttatccacaaagggctggggccaggggatacactgtgaacgaggccaacccgtctcctggagctcgaggtcctggggtgtcagcgggagggttaggggttgaggcggggctcccagaggtttccagacaaacaatcccagcagggcagggtggatgctccgagaggcgctgtgaaggtgccatcagggaaggtgttttggaggctgggccacctcagctgaggcctaaaaggtagggaggccttgacccaagagggggccagtctcaggggaggcctggaggacacctcggcttgctgga

SEQ ID NO: 587799 - DNA, 4001 bp, Homo sapiens
tcttgagcaccgaggtagaggtcagcccccattcttcctgcctgcgcagcacccggggcacatacaaaggctggtcaggcttgcgtccacgataccaccggccagcccgggcacctcggggaaccgcagctgctccttggttggagatgggccgaggaccgtggtacctgctggggcaggaggcaggagcgcggcaggggccagagaggccatccgaactgggtaccctggagcaggaatgggaggaggtaatcagagtgtgtaggggcccaaaggaaaatgatttactagagccacttgtcattcaggagagacattcgggtcagcattaggcaaaaaccacagccaaaatgaccctcgaaaatcccttaggaaggcatcacagtggaggctgtcacttttgcatgagcccagagcagccagcttgccctctagtgctgtgatccaaattagagatcagtccatcttcagttacacaccaggggaggtaagctcttgcatttaagaagtatgctatcagaaaaacatgtcacttcaaacactaggatcacagtcattaaagtaagatgctcactgagacgcacatgggaacagaggggaccgaagcccagcaggtgcttttctggtctctgtgggacacaagctcactgagaggaatgctagggaggccccccgccacacacccactacttaaacagatctctctctctcttttggcccaaccatatagctgattttgccaagtgaattccacaaactgcatatctgctccactgttgatgcaaaaggcagccctggctgagcagctgcagctaggaatggcagcagccgggggtcccagccctggttccccccagccctgcccttccaaaggctgaccagctagctggccacccacacaccaccgctgcaggcacttcaaggtgggaggctacacacctgatgtcctggtgacagatgaccgtcctcctcttccagccctccccaacggagaagctgctcaagagatcaaaattctctgctgttctatggatcaggtaccggaggcgactggagagtggggggaaaagaagaaccctggggagggaggggaagaagtgctgagcaggtgtccagggcctggcccctaccaggtccactcccaggttaatcgcggattaacactgggctcccttctgcccctctgggtcccagatggactgcaaaggatctgagcatagatagaggtgatcgcagggacccacaggtcccatccccaatccctgtgccgggccccatcagtctgggggtgatgctcacaattacaaagatgcagctaaaagaggcagctggcgttataaagactaaaggccaaggtcagagccagctgccaggcaccacctgggggagggcacacaggcggctcgggaaccctgcccttcccagcaaggcggcaccctcgcccctcacatgagcctactttgacagctgcttctgcagcagaaagcggtccagttcctcctggatccggtggacgaagtcattctcggctgaggagaggaagacaccatccaagcagagaagggccagggtgacaggtgggagagcctgtaagagagacgggcagggccgggaatcagagcacagacccccggatctcccgcgaccccgcaacgccggcaccgaaagggccttagaaaccctctggtccaaggctcggtggcggggaagtgatgccagggacccccggcaagtcaggggtcagggaaggggtctcctggctcctgcccaaggctctcgtccccgcctgcggtcggatgctgagggtggctccacaccctgcgctgcgctccttcccggggctcacgggggcctgctccgcgcagcccagctgctccttcccacccgggagcccgggggtcgggacgaccacccccccagtgctgctgcactcaccgcggcctctcggcgcgtcgcagccgccctcggcgtccccaggggccagcgcgcccgagcgccctagagagacccgggccgctgcagagacgcagcgccaccgcgcggcctgggggaggtaacgcaggaacgggagagtgcgtgttcttgtcacctattgggagggggcgcacctgccaccaacacaaaccgcttctcctagagtgacacgactagctttcatattcatggcaaaaccgagacccagacaggtgaaataacttgcctcaagttgcacagatggtacattctagagtcttactttgagcaaagataggtctgattccaagatgggctcttttctttttttcttccatgttggcacagtcttgtaagatcaattaagttcaacaaacacttttgttcagctactattaggttggtgcaaagtaattgtggttttgctaataagtaaaaaaccgcaattacttttgcaccaacctaatagcactgtaagctagctaacggcggtgctagggtttcccattcattgttcccctccccagggacctaacagaggaataaagaggaaggaagtttctgagcaccagatatttcagcactgttgcccatcattgcccttccttctcccgcattgatgtaacctgtaaaaaggtctaattcacaccacagtggcactgacaaggcgtggtagccttgtgggttactgggttgggcagccactatcacggtgatttgcagctcagcagcttgtgctactctgctccatccagaaataattctagcgtccaccttaaatggggcttaaaattcttgccatcagacagcctgtgggatggatgattataatctaggagaccagggttgaaatcgttctgctccctgaaagtaattaaaatgcagtcccttggtcactctgaatccggaagcactgacctaagggcacttaagacctaggttttggtcaggggtggggcagtctgagtgggctctgacataaagcacaggcgggatgggggagggagggctgtccctcaaaaagctgactgggagaagtggcttggggatggagaaatggagaaaaaattagatgcattttgctgtctcacaattttttccaacgcatttctaaaaatgacagtggcattatattatattacaaaacctatctttccagatacccagcaagaagaataaaaaatgacctagaataaagacaaaaccaaaatgcagagagaactcagggagctgagtcatgaatttcctttctgggcatggttgtgagaggagtttcgggagatctgacaggtccccagtccctagactggagggcattcaactcctggggaaaaaggatgagcagagagcacccgtttggattctggttccaccagccctacccacactccatgctggcttaatggaagtgggagcaggccacaccatggcattgttttgtctgcccagggtccctggactaggcagcgtgaggctgagaggcaagtccacttagcaccacatgctgtctctgaaaacagaggcccagctttttcgacaaagtggctgcacctccccaaaatggaggaacaaacccaaaacccaggaagcaagccatgtccccacctctttagagctgggtcatggtattgaggtgttcaacaaattcagagagagactcagtagggacaagcaccgggggaaggctgtccaggaatctagtttctaccaaaccctctttaggcaactcagaggttaaacaggaaaaaaggtatcagtgtccaggtctccatcatgggtggatgttatctagagattcctagataaacagggaagggagtcaaagcacatctacccacacctttgagggcaaacagcagataaggtagaatggtccccatcaaaggtgagtaaatgcaacaaaagcagcacaaaggatgggcagaatttctactgaaagaaagaaaaagaaagaaagagagaaagagaaaaagaaagaaagaaagaaagaaaaagaaagaaacaaagaaaaaagaaagaaagagaaagagatagagaaagcaagaaag

SEQ ID NO: 587800 - DNA, 4001 bp, Homo sapiens
aatcgaacgttcctttgggtgaagcactgccctttccgaacacctgtgaaacaaataattcggtaatatcatggagtgaatggtttttgcccagtttttactgcagaagtgaaataacctgacacaatctttgggagctacaggcgagcagacatccaccaggattaggaccagagagaagaactctaccaactccaaaaggaaacaatgcccagttctgctccgtcaagggcccacccgggctccttccaacctggagaaatctttactaacatggggcccagggcacacaccacactgttgtaacattctttctgtaggggcaaattctcttcaccaaccccctaggcaagtatgaggtaggggaaggggttagcaagtcatgtgacagccggcaaacgccattcccctcccccaacctccacccaccccgcattgtaaaggcgttgcgcccggggttagcctttagggtgggggtgtcagctggtttcatgcctcctgttcctctgccctgcgccctggcccagtcattctcggctcgaagtgttcttctattcagtgaaatacccaggaggccttccacccaagcgaaggcgagtatcagacacgggctaccaccctagtaagaagaaggcacctgcccacgtatagttggaattcatctaaaattcacttagtgcttactgtgtgccagacgctgaggggcgtcctgcagattcaaaagcgccccaggcccggcgcggtggctcacgcctgtaatcccaatactttgggaggccgaggtgggcggatcacctgaagtcagaaattcgagaccagcctggccaacacggtgaaaccccgtctctactaaaaatacaaaaattagccgggcgggccgggcgcggtggctcacgcgtgtaatcccagcactttgggaggccgaggtgggtggatcacgaggtcaatagttcaagaccatcctggccaatctgatgaaaccccgtctctactaaaaatacaaaaattagccgggcgtggtggcgcacgcctgtagtcccagctactcgggaggctcaggcaggagaatcgcttgaacccaggaggcggaggttgcagtgagccgagatcgtgccactgcactgcagcctggcgacagagtgagactcagtctcaaaaaaaaaaaaaaaaaaattagccgggcgtggtggtgcgcgcctgtaatcccagctactcgggaggctgaggcaggagaatcacgtgaacctgcgaggcgaagtttgcagtgagctgagatcgtgccattgccattgcactccagcccgggcgacagagactctgtctaaaaaaaaaaaaaaaaaaagcgccccagatacggccccttcttccaagaagacccaaagctggcagagctgggcgggacagccgcagaaggggaagccaggtgagaacaccagcaccggccgagggctccgtcccgaaaggccttccccgctgctgcccggcttactctcgaagggtccagcgcccagaccgccctgccggaggggtccgcgcccccaggccgggccctcccctccccgcccgcactcactgcgtcttcctgcggccctggtcgcggtgcagatcccgcaggtccacctcggcgcggcccaggaacttgtcgaggccgagcagcgcgcggtgcagcacggtgagctgcagggtggcggcggccgcgggtccggaggacagcagcgatggcagctcgaaggtggcctcctcgcgccacacgggcgcgcccaggctgcgctccgacacggaggtggcgtacttctccttgcccacctggatcaccgcgtacgcgtcgctcgtgcccccggggcccttggcccgcaggccccgcgcctgcagcaccgtcacctgcacgtgggttggggaccacacggcccccaggccccggccagccgagaccattagggacatggtgacgataacactccagaagcgaggagaagatcgccgcgactggcggcctccacggcccgccccggcgaccaggccactttaaggcttccggccacacccccgccaggccacgcccctcatggccaaggccacgcccctgcccgagccgcctgctccacctgctgcgccgcgccccgccccgccccgccccgccccgccggcctcagcagcgcgggcagctccgggcacccgggcgccggaggcggggctggcgcggccaggcaggcaggggatcacgtgcgcaggggcgggcgcatcgagaatctaatctgagaggtggtaggtgacggatggggtccccagctgccaaaggtcgcacggcgggaaggagctggccgaagcactgacttggaagtcagacctcatttccagggtcacatcgccagtcgtggccttgcgcggattacctaacatcaagtctcaatttcttcacctgacaatcacctcctaggattgctgtaaaaaataataataataatgcattacagttcttggcccagtgcctggctcatggtgagttctcagtaaataaccatgaccagcacgttgggaggctgagacaggaggatctcctgagcccaggagttcgagaccagcctgggcaacatagccagatccccgtctctacaaaaaaaattaaaaataattagataggagtggtggcaagcgcctgtggtccccgctacttgggaggctgagtctggaggatctctggagcccaggaggtcgaggtgcagtgagccgagatcgtgccactgcactcccagcctgggcaacagagcaagaccctgtctcaaaaaaataaagttggtaactatgagggtgctaaggaagatgcccacccaattcactgtgctttctacttctcccgctggaaagccttgctctggaggaaggcagctgcagaggaaggtgaggaccttgtgagggccggaaaaggggaaggtatcctggggagcatgagttcaatgtgggagtgtcctattttgccctccccccaccagataaggcgaggctgagttagaaaaagggaagaaaggaggaactgaaaatgggattgccaaatcaaacatcgggacagtggcaggcccccagcccgcagttccccatttctcccttgccaggccctctttagtctctccctgcctctatccctgggctcccaggcagtccctttcttgttccaaatgcctaatagatcggctgcttcccttcatttcacaggtcctagttcaaaggctcaactgtttaacgagtcatcagattggaaaggtcacttggaaggttttaaagttttacagttaaggaaagactcagaagagaggagtgacatgtccaaggtccctctgcagagctgggactgggatcccagtgtcctgactcccaaacagctgttcagtgcatctcttgattcttccagatccacagaaccccaatcttggatggctactcgtgtccctccaatctccaggctctcctccctctggttcacactgcacattgcttcactaacctgctggctgcctcaccagcaaccgcgttaccttcggactgaacagagatttcaaggtactccattttgaccccaccctacctcattctcctctatctcccgaacaaacaaacctgtagcccagacactttttacttccaggcctttacgttgtacccttgactgtctttgccaacctcccactgcaagggttcactcatatttctccaaggtttgacttcctatgccctgctgagggcagggaccaggtagtgacttattcaacttgtctccttcacagcctccagcacaaacctgggtgcacagtaggtacccgggaagtgctactgaactcaagagtttgcaggttaagttggccaaccatgaggaccaagtgtttccttttaccacgtaggaaattagaagacagaggtatgcctcaggtttgcaactgagggcagctgcagtgtgagaaaggcctgtttagtatgttggaaatattttttttcttttttttttttct

SEQ ID NO: 587801 - DNA, 4001 bp, Homo sapiens
ccactaatgagatagccaaatgccacagtcacaagcttctatttctcaaacccactcatattacagttaatgtggcattcctctccaatcttgtttttacagcctaaatgaaattttgccagaagactttagaattctccttcttccaaatacaccacagcatttttcttttaaagtttacaaatccaatttccacacacacacacacgcacgcacgcatcagaaaaccttgctgaaaactcatgtatctagcagaaattttttctttcaggcagcaataaatatgctttttttttttttttttttttttttttgcaaactccaccttccgggctcaagtgatcctcccgcctcagcctcccaagtggctgggattacaggcgcctgccacgacgcccggctaacttttgtacttttagtagagacggggtttcaccacgttggccaagcaggtctcgaactcctgatctcaggtgatcccccacctcggcctccgaaagtgctgggattacaggtgtgagccaccgcgtccggccaacatgcttctttagttacttatagaacctgccacatcattagttcaactacaaactgctgcttacatgaccgaagttgtgcaaagggtccaaagttgtgcaagagtaaccactgaaatcagactctggtatattaatagttgcaacatctaaacaatctttatgtttattattagattcaaagtaatgccaaatcacaggtattaaaaatatctacgaagagtctgtttacttttctgtgaaatatactaggacgtcattttaagtgagaataactgaatttctttcagctcatggacatgagctcacctgaaaattagcagttgtgacaccggacttgacatatctaaaacatcagcgtcctcaacatacacatacctaagtacacacccagagcactgaacgactttacattactatataaccccagttcacacgtggcaaaagtccacagaactcgttcatgctttcctaaccccgaaagggattctccagccgtcaagtaatgagatgtgacttattctgacgtgagagttgaaggtgttaaaaaagcatattttatatatatgtatatatataaaatacatattttaaaggtttccttttctctttctcggctgcctgtcccacgccaaaaagcgccttgcccaggccttgatagatgcgtgctggtggaggaaggttggactggtcaggaaccaagacccgggccccaacaccttctgctcccctaggtttccctccttctttttcctggggccgcgaagagacctaacgcaaggggccctgggggtggggtgcagtcatgtgagtcgggccccggcggccctgcgctaggcctcccctcctgtcacacacttcctgaatcgggcgtcgcaaacggctgccacggccctcagctgcaagactggccgggtcgggggccgcagaccgggcctggccaggccgcggccgctcgcagtgcccacgtcaccagctccagcactgcggaaatggagcggcgcggccaggagggaggcgccgggtggagtccgcgtccccgccaccgccagacgccgtttgcccctcagcccgggtccggaggccgccgacacccgcccggccgcgcccggggccctcacctgtgtcgccgattatgatgtacttgaagagataggcgtacgccatggccgcggccgctcagtgccagggcacacggctcctcctcccgctgctgctcctcctccgcgccccaaccccggtgccgctcagcctcgaaacgccaggcgccgcccgccgccgccgctgctgctgtcagccgccgggagtgaggggctgtgaggaagccggacgaactgacacccgcagagccgagggagacagcgcccgaccgagcccagccgaacaataacagccgccgcggcgcctccgccccgcctccgcgccgacccggaagttctgcggccgccggcgccgccggaggaaaggggaggagccccgcacgctggcccagccctgcacgctggccgcgccccgccagccggagccccgccccgccccgccccgcgcctgccttgcccggtccgccctgtcttccagcagggcggggcccggctccggttgttccgccacgtttgagcgggcgagcccggcggccgggagacgccagggaacggggctggtgggggtacaaaggctcggttccgtcgccttcagccctgcggtgggggcacggggcaagtgaggggacggcagaggcggcgttcggtgtgaggctgcgccctgggctcctgaaaatgtgtgtgaaaatgtgggaggcacacggcgagggggtgggggtggcctggtatttctgtgtttggcatcggggcttgaaggtgaaaatggcagtatttataaattggaaaccgtaaatctgggactgcaaagtaaatcatggtatgcacgcacagtggagtactacgttgctctcacctgaggtcaggagttcgagaccagcctggccaacatggcgaaaccgcgtctctactaaaaatacattagccgggcgtggtggtgctcgcctgtaatcccagctactcggagtctaaggcaggagaatcacttgaacctgggaggtggaggttgtagtgagccgagattgaaccacggcactccagactgggcgacagagcgggactccgtctcaaaataataatagtaaataaaaaataaataaagtctctgaacctgtcctggttctgagggctgctctaaaaaaaaaaaaaaaaaaaaagcctgacttaggttaagcaaaaccgagatgatctgtttatgtgtgtgtatataacatgcaccatatgtaatatatgaattgtatataatttttatgtgtaacaaatagtgggaaaacatttacatacccatatatgcataatcaatctgaaaggaaagctaactggtattaagagaaaggagggaatgggattggggggaaaatgtacttttccctgaatttttttgtgcagtttgacattttttgcagtgttcatgagttacctattaggaaatactgttaaaggaaaaaacaaaatgactgtgcattcaaagaatagttattgaatactatgtttcatgtaccgccaggcacagcaactggaggccctgtatgttctatgttctgtttttctactttgctttttcagtcatccagcccaaaatgtcaccactctgttcaaaaagaccacaggttatggaagaggaggtggagaatagggtgtcaggaaaggttacttagagattatgatttctgagccaggaatatgaattatgtatagagtttgtcgaaagaacaacagtttggggaggggaaccaaagtttatggacaaggaacagaatgtgcaaaattcctggatctgttcagggaatttgaagttgcataaggaagctaattgactaactcatatcctcataacccataacctcatattgaaggagaatcattgctggggaaaagcgattgggatttagtggccctcgttcctgttgcctaatactcttctctttggggcctctcattatgtaattagtactgacaccatcatgctgggttgctaacatgctttggatggccttgccaaatatgaactcacaaggtttttctggaatatttggaggggattttactaaagggtcagagatggcacggaagaatttgacatgaaaatttgacatgaaaagctacctggaatcgcaaaatttggttcattcacctttagtttgaggaaggggaggtccctgcccaaggcctccagttttcagatgtcattttgtccctcccacttgagtgccttcacccaagtcttccttggtgatggagaaactcaagtcttcactctcacaagatagagggatgtggccttccttcaccagcacaactctattaggatgttatacaaatgcctggcatcctaggagtcaggagtattcctacactgttagaggag

SEQ ID NO: 587802 - DNA, 4001 bp, Homo sapiens
acatcctttgaccaagagttttacaatcagacagtcgtaggttcaaattaagctccctctttgctcagttgttttgtaacggtgaataagttacttctcaactataaactgggataatattcatcaaaaaagattatgaaaattaaatacaagggcacacctaacatagtgccactgctgatgcgaaaagtaactctgaagacaatcttgcagcaaaacattaaccagccagtataatcatgcctaacaactctggtttgacatttaaactaaaaacacaaccttatttctcaagaattagaaaatttccattctgtaccaaactgtaaaagcgtttcttagaatttgtatgtttcacaaaataattcaccagaaattcttttgtaattctgacttgtgtataaaaaaaagcactatgtctattagttatgcactgctgtcacctcaactatacaaactgttaacttatttgaagatcagatatggcgtatgtcctcatcaatgcctttccaaaaataattagttgcctccgacattaacaaaggtatttaatgacttcacgatttgagaaaccttctcctgcctgtctccaaaattctatagactcgcactgcccgctggcatttacacccaatttaagaaaatagaaatttttgcctgaaaaccaattactcttctaaccagtataatgacaacaaagattaactttcccttgcaaaaagaagccgataaacacaagcctttcccagaaactcttcgcacaaacgctgttttttttttcacgctgaagacactaacaaatcagagtgaccaagtaaatcccccagggtttccctcttacaaatttgaagaaggccgctaagtctggcagcacaacccgacagtgtcaccccacactatcaaagcggatcattcgcaaaaagcctttttcagcgacgaaaagggcatcaagcatttatcagaaacacacacctcccccagagcgtctctacaacacccgatatccttaatcactttaaagaatgatcagaaaagttcaggggaaaaccaattatgcaaatatccttggaaaaagaagcaacttccctccgtctctttttccacgcgtctgtgaaatattcagcattcccaacgtaaaaattatctttttaaaacgggagggcagcagcagtcactggccgaggggcacccgccgaccccccgccccaccccgcccagccccaccagctccgcactttcttgagccccgcacccgagttcggcggaaggttgctgctcccggggctggcaccgcgggcgccgggcccgccaccgcctcctcccagacagccatttttacccgcggagtaggcggcccggtccccagagcgggctcgttcaaacctcctcccctccctccgcagcccagggtttccccggcctcctgggggacgtgagatggacctgcagggtaacagcctttgtagatctcagaatggatcagaatcatttgttaccgaacaagcgatgatgcgggcccaagctgcatgggtccgggccgagggcgggcccggggcgaagggggctgggcgggtggcgccgccgcttgggcgccgggagggtggcagcacgcgtgggcgcggcgagggctgccttctccctcgccctcccgcccccaggagtccggctccccgacggcagagcggcggggaaagggtggggggagggagctggaggaaaagaaggggtcggccgagtctcttaccttgctctccgctgggagttgggcgggctgggtggcccggggaggggaaaagggtcgggggagggggtggggaaaggggggagcccttgcgaggtgtagcttccgagcagctcccgccgccgccacagccggcgcctcctttccgattcactcaaacaaacaagatggctgccgttacgccgcggctcttcctgccgcccaaatcctcggttcaaatcggcaggatgtttacggtcaaaatggtacctgtgcgcctgcgcagccagcccaagcccccccctccccccagaaggagcggcgcaggcgcaatgactatttccttttctttggaacccgccctctgtttgtggagtccacaactgagcaagcgcaaaggtgattctcttgcgagggtctttgagagttgcggtgttagccaatagcgtaagatagcgcacgcgcagtgctttccagtgcggtgaatatttgcgtttagctttattcttgtgcttgttttaaagaaaaaagctgtcgtggtgcaattttgtgtgcccccaccaaaaaattcattttatggctctatagggatgaaagtaacataaaaacctcaaactaattccataaaatatagaggttcatttattcagtcaacctatattatagagggtcttctgtttgctacacgttgggctctggatataatgattaatataacagagataataactgccttttggaaattttcagtattgcttgggaggaatcttaaaatttcttatcttaaaagacttacttgtaccacgaagaaatttacttttgtttttattgtagagatctttccagtgatgaaagaaattgaagaggacacacaaaaatggaaatatattccatgttcatggattggaagaatcaatattgttaaaatttccatactacccagagcaatctacagattcaatgtaatccctatcaaaatatcaatgacattcttcacagaaagaggaaaaaaatcctaaaatttatatggaaccacaataagaccaagaatagccaaagcaatcctgagcaaaagaataaagctggaggcatcacattacctgacttcaaattatactacaaagtgatagtaaacaaaacagcatggtgctggcataaaaacagacacatagactaacggaacagaatagaggacctataaataaatcaatacatatacagtcaactaatttctgacaaagctgccaagaacatacgttgggaaaaggatggtctcttccaaaaattgttctggaaaaactagataactatatgtagaagaatgaaacagatcactatcttttgccatattaaaaaaatcaaaacaaaatggcttgaagactggaatctaagatttgaaactattgaaactactagaagaaaacgttagggaaatgctccagaaccaaatatttcttagtaagaccttaaaagcataggcaagcaaagcaaaaatggacaaatgggatcatgccaagctaagaaccttctgcaaagcaaacaacaaagtgaagagacaacccatcaagtgggggaaaatacttgcaaactactcatctatcacagaattaatagccataatatataaggagctcaaacaatataataggaaaataatccaattaaaattgagcaaaagacctgaatggttatttctcaaaaaagacatacaaatggccaacagggatatgaaaaaatgcttaacatcactaatcatcagagaaatgcatatcaaaactaggatgaggtataatctcatcccagttgaaatggcttttatccaaaatacaggcaataatgaatgctgataaagatgtggagaaagagaaacactcgtacactgttggtaggaatgtatgttagtacagcactgtgaagaacagtatagagattccttaaaaacctaaatatagagccaccatatgagccagcaatcccactcctgagtaaatacccccccccaaaaaaaaaggaaatcagtacatcagagtggtatctgccctctcacatttattgcagcaagattcacaattgtcaagatatggtatcaacgtaagtgtccatcagtggatagatgggtaaagaaaatgtggtacacatacacaagataatatttttcagccataaaaaagaaaaaaagtcctttcatttgctgcaacatggatagaactggaagacattaagtgaaataaaccaggcacagaaagacattagtgtgaatgttcacactaatatgtgggag

SEQ ID NO: 587803 - DNA, 4001 bp, Homo sapiens
aactggttctgtatgttcatattgtcctgtccataataaattaattaattaattagtgctgtctgagccctttccccaggtcctagaaataaagccatttggtagccctgatgtgatgctacaacttctataacacctattagtttcagtccttccaagtaaaatggtaaggccaagctgacaactgtaatacaccagatagccacaagtacttggcactacactgtggtaaataagaacacaactttgaaagcaaatgcctgaatataaatgtggactgacactttctaatggtcttgcacagtttactttggctccatgtgtctcagtttcctcatctttaagagggggtaccataatcatgcttacacaccggactgttgggaggattaaatgaaatatgtaaagcacttagaacaaaacttgacacatagtaagcactcaatgttatctgttataattagtattatcggagagtagaaatgatgaaggtcctgtgaaggagatagagaaggggtagttcaacatacaggacaatgaccagaatctttgggttcgtctgggctttaaagagaggtatgtgcaaccatcaaacgtcgaggatgcaagaatgtaagtacaccaactctaccaagaaccagcaacggtctctccctgctgttgctgcttgtcgacttccaactacattaggtagtaattatttcacttcatgccttaaattgctcctttgagactccggctatatagatggttcctaatttaggacggtgtcacttagaattcttcgacttttaagaaagccatgagcattcagtagaaactgtacaagtaaccacacaaccgtctgtgttcatgattttgcccaactgtagattaaggtaagtgttctgagcatgtttaaggtaggctagcgcagccataaaaaggaatgaaatcatgtcctttgcagcaacatgggtgcagctggaggctattatccaaagcgaattaaagcagaaacagaaaatcaaatattgcatgttctcacttataaatgggagctaaacattgggcattcatgaacataaagatggcaacaatagacagtggagacaactagaagggagaggaaaggaggagcaagggttcaaaaactattgggtaacatgctcactacctgggtgacaggatcaatcgtatccaaacctcagcaccacgtaatataccgatgcaacaaacctgcacatgtacccccaaatctaaaataaacagctgaaaataatttttttgataacaaaagtaggctaggccaagctttaatactcagtaggttagctgtgttttaaatccattttccatttgggatattttcaaccccgtagtaagtcgagaagcatctgttcctacctagaaaatcttccataaggtaatcgattaaaaggttttaaggaaatacaagaaaaacctgaccagtgaagaggtaaaagcccctaaagaaggcgtaccgacactctccaggacgctcgcagagccttcaccccctggccctggggaaggaaattcccagtgcaggagtgagggagagacccaaaagccaagaggagcctgcgcaaagcgaccgcagtggcggccccaggggccactgcccagaaccatccctcccacacaaacgcacaaccctaaacccccaccgcccgcccttcgctccaaggcccccggggccagcaaccagggcgtccctggcacttcagaccaaagctgcaggcccgcagaaggccacttcggtcgctcctgccgccttccctccctcctccctcgttggcctgctccggcgccactccctgctttgtcccgcacgagcctacaggctgtcgcagcctcccgagcttccccctgcaggacgcaccggcgaaaatctgacagaaaccactggccctgcaaagaagtccttctggtaaccagctatcccctcgccgccggagaagctcaaggatcccgcctcggcgaagccaatcgcggacgagcccgccgcgcgtgcgcactacctagccgctgcactgccctgtcctgccctactctgattggacgaccctactgcatcactgcgcatgtatctttgcgtttggctttaaatgcttccaagtttgattcaagtttacggttcaattaaaaaaatactggtttagtgcctactttcagacacagtgtagatgccgaggctacagacctcaccatctgcgtggataagtaataaatacggtatgattcggtgtgtgcgataatagaaatgcgtgcatcgcagaagtatacgatatcctattggttattcattcatccgaaaaaacattgacttagcggtgcctgcaggataattttcaaactctttgttaggttctgggaatatagaaacgaatacgtgattattaggctctcagaaaaggggagccgcctccggacttggaaaagcattaaagcatgttaagtaggaaagttacatcattcaatgagtatttactgagcaccttctaagtgctaggcggtaacacagtcaactatccctgaaaaatggtattagaaaggctaatctgaaaggagagagaatggctaaaggttgtttattgagttttatccagcagtttgacaaaaagtaaaagctaaaaaatatcaagggtgaaatgaagatgtgaaacaatgggaactcttgggctgctggtaggagtgtaaataggtacagccatttaaaagagtaatttgaggctgagagcggtggcttgtgcctgtaatcccagtactttgggaggccgaggcgggcggatcacttgaggtcaggagttcgagaccagcctggccaacatggtgaaacccggtctgtactaaaaatacaaaaattagctggttttggtggagcgcgcctgtaatcccagctactcagcagactaaggcgggagaatcgcttgaacctgggaggtgaaggctgcaatgaaccgagatggtgccgcagcactccagcctgggcagcagagagaccctgtttcaaaaaaaaagagtaatgtgcttaaggagcttttatcctggggactttttccagtcataaagagcacctcataggttgagttgtgcttttggcagctcctggagccagcgttacaagaatttgaaatggggacctgccaaggttgggcaccttagtaaaccgcacccccctcttctttggactgggacacataaagagtaagggtaaccagaaaacaagctagcttcatagtgtctgcagcctaccttaatatcatctggggagttcagaaaatctaaaacagattggctaaaggtgacctgggacattcctcttgcagatttgcatctggtttgatccttcacttcagatcattactcacatatcaacttgtcaaagggctttatctgacagtgcattgctctcttgtctcatcttgtatctcccttaccctgctttatagagttcatcacactttccattccctaacatatacttatttgttaattgtttttctattactctcagaatataagctacatgagggcaggatctttgctttattctctgctgtacccatgtgtttagaatagtactagtcttttttgttttgttttgttttttgagacggagtctttctctgtcacccaactggagtgcagtggcatgatcttggctcactgcaacctctgcctcctgggttaaagcaattcttctgcctcagcctcccaagcagctgggactacaggcatgcgccgccaccaagcctggctaattttttgtatttttggtagagacagggtttcaccatattggccaggctggcctcgaactcctgacctcgtgatctgcccacctcggcctcccaaagtgctgggattaaaggcatgagctacagcacccagccagaactgtactagtcttacagaccgcactcaataaatatttgttgatatttatttggaggccaaggcaggaggatcacttgaggccaggagcttgagacaag

SEQ ID NO: 587804 - DNA, 4001 bp, Homo sapiens; identical to SEQ ID NO: 587503

SEQ ID NO: 587805 - DNA, 4001 bp, Homo sapiens
aagagttgtagaattcccagaatgattcacacaggaagaaatctgaaaaatttgaatgtaatagatagaaatgtaatacaagtctacaatataattaaaaatgaatcttaaataaatgaaaacatagataactaaaggttcttagaatgatcttaagttacagaaattaaagcacaactacctctctgtcctcacattaaaatcgtctttggtcccattaattgtttcaatctcattgggaaatatcacacagtacagctagtgctttgcccaatcttaaaccacatactacctcaaccttagggcagcaactgattctcttaatgaaaatgcaggttcgatcattcaagttcttgcttgcttgctctgtctctctctctcttaaaagaactaaacgacttacaatacataaaacatacaaaaatatattatacacataaattgtcttgcattttaataaatgagcatttctatgtacatacattgttataattgaaatgatttttaaaatcacagaatgttgcaagtggcttttttaatgttttatgttagctgtttgaggcatatgaaagactgtattttagtaattagctcactatacaaaataagaaaatcctaatttcaggcttagtgccatcatattggcttcaaatcttagaactatacacctcaagatatcaaatatggtgtccacagacagtgacataaactatcttctttatataaatgcaacaggatttccttcacagagaaaagctactcggagaacaaaataactcacatacattgtatttccccgccaggaaatacaatgaaatgtccaaagacttttgagatacttgcatgagttgtgaataaaaaatatatacaactttccagatattacactaacttttaatcttctacagttaaatggcccattgcacgccttactttttgaccacaaagagtaaaaactaaggcgtaaaacctttcattccacaaactgaggttacagacagtgaaatatttgcttgaaaaagccagtgtatgttataaacccctttgtcatgggcccctctgtatgttgcagtcagtttttatttctgtagttacctagaagaaaacttcatctgagaggtaaaaagttgttgtttcatttgctttatgtttattttacagaattcaaagtatatacacatggtaatttaaagctaagcttttcatttaaggggggaaaaggtaagaaaatcaaagcttcaaaatcaaagtatttaaataatggtgactctccagattttaagatgtatgccttcaggaaatttatttggacagaaaaatttccagcagattcggtcacagtgttaaatacagaaaaggctttttattgccaactggtacgtctctgaaaagtaatgctaaattatactgaaaacatgtaacaggataatcataaaatatcatagaatacattcaacattgaatacgtcagtgctaccaacacacgaaatcatcacctctatcaccaacccctcactcctgccctgtacacagttctcaggggaaaacctttagagccagtatcaggtggttaaaaagagggaaaactctgcccctttaacaaaatttaaataaaaggcatttttttaataccttagaggtgtagggtcattactgcaaactaacagcgtcgtcctcaacattaaacccaagtgatcatcttataagaaactatttccccatcccctggaagacgacaccagcaggcacttaaaaccaacgcaacacaacagggaaaaaaaagatccaaagacagcatccctaagaaagcaaagccctttggtaaagcaaaataggctgggtaggacctactgcgtcgtttactcattgcgaagaggaggagcaggagttgagcgtgcgagggccggtgccatcctcaaggctctggaaatgtctccagctccggctcgcgtggcctggagccagcccctccggaatatgcggtctctgccgcttctacccccatctcccgggtgctctgagggtcccctctagcccgcccgacggccagcgccacgtacacggccctcgcccctcctgctgtgcaagtggccctcggagaacttacagggcccgccggccgcctagtgcccggccggcgcggcccgcagcgcagacgccacccgccccgccgggagacgacctgggcgcagctcaccgtgggaggggtggggggaggggactgtattttgcgcacatctagaaaacgatcctgaagcagggaacggactttggttttccctggctccctgcgccgctctccccacctcgggctcggacactgcccggagatgcgcgcgcgcaaacacagacacacacacacactcacactcacacatttctttgctaggaccagtgttgccactgcacacccgggaaacgcctccaaggggaccaagtacctgctctctgcgagctgctcagctgttcacttcatcctccgttgacaaggaaaccaaaccgcacttcatttttttttttccagaaaaaccttccactgccatcatttgaaaattgatttacggggagggaagggggagaaataagggacaatatagatatagatatcaggatatctatcataaaattatctcggttttttaaaaaagtcaaatgtgcaaaagtcatagttaatttaaaggaggaaaaaagtattttgcttaaaaatgatcccaatcaccagctgtaagaaaagtttcatgttatcaatgggtatcaaaaacaggagggaaaaaaaacgaatttgttttcaccggcttccaaaaagggcacaaaaaatataaaattaatgtctttgctcagtggtttgcaccagtattgcaagaccacaaacttgtaaacactgccgtaaaatcccacctatacaaaaatgttatcagaaaaagagtatgcaaaaaaagagttagaaacatgctttttatttttacaaaggaaaaaaataggcaccatacttcacatcgctttttccataaaaccagttgcacattttgctggacttgggagacgctcccagcgggcacggtcgccgcggactccgagacacagcgccttgtctacagaacgatcgcatgctagaaaaacttggattcaggaaaaggctcaaaaccatgctcctccagctttcccaaatataaacaataatcaaagaagtggaaaaaaagaaaaaaaacaaaaacaaaaaaaacaaaaaaccaaaaaaaaggacaaaaaaaagaataggacaagaatgccactgagaaggtactcaccgagcgggagtaaaatgttggaataaaaatgagatttagtataaaatacagtatggcggtggaagaaggaatgaagcgcgtttttttctcgcagtctctgcctcaggcactgacacgtgactcggagccaggctgacttgcaggcagcggggaaggaccgaggctgcgaggggggaagcccacggagcccaactctggctggcgaggcggcggcggcggcgacggggagcctggcgcctgagagcggcaacaccagtggcggcagcagcggcagcggcagctcgcggcgaggctgccttcgctgtgagcccagacgagcaggtgcccctcacgctgaggctgagcacacgcacacgcacacgcaagacaggcagggcgccggcgagagggggagccgagcggggttgggcccgaggcgcgcagctgccgccgcctctgccgctgctgccgcgattgctgctgctgcctctgttgctgccgccgccgcctcgcattgggagtgtgtgctgtgggggcagctcaggggtgctgatccagcgccttgagaggaggtgcacaacttgctgctcacctcaaagttgttgcttgccacttccttgtgtatttcatctatttttcatctacaggtagttacctggggagagatcccatcgtcttctctctggaagttttactattcaagcccacattcactcattcattttgtttgtttgt

SEQ ID NO: 587806 - DNA, 4001 bp, Homo sapiens
tcattactgcaaactaacagcgtcgtcctcaacattaaacccaagtgatcatcttataagaaactatttccccatcccctggaagacgacaccagcaggcacttaaaaccaacgcaacacaacagggaaaaaaaagatccaaagacagcatccctaagaaagcaaagccctttggtaaagcaaaataggctgggtaggacctactgcgtcgtttactcattgcgaagaggaggagcaggagttgagcgtgcgagggccggtgccatcctcaaggctctggaaatgtctccagctccggctcgcgtggcctggagccagcccctccggaatatgcggtctctgccgcttctacccccatctcccgggtgctctgagggtcccctctagcccgcccgacggccagcgccacgtacacggccctcgcccctcctgctgtgcaagtggccctcggagaacttacagggcccgccggccgcctagtgcccggccggcgcggcccgcagcgcagacgccacccgccccgccgggagacgacctgggcgcagctcaccgtgggaggggtggggggaggggactgtattttgcgcacatctagaaaacgatcctgaagcagggaacggactttggttttccctggctccctgcgccgctctccccacctcgggctcggacactgcccggagatgcgcgcgcgcaaacacagacacacacacacactcacactcacacatttctttgctaggaccagtgttgccactgcacacccgggaaacgcctccaaggggaccaagtacctgctctctgcgagctgctcagctgttcacttcatcctccgttgacaaggaaaccaaaccgcacttcatttttttttttccagaaaaaccttccactgccatcatttgaaaattgatttacggggagggaagggggagaaataagggacaatatagatatagatatcaggatatctatcataaaattatctcggttttttaaaaaagtcaaatgtgcaaaagtcatagttaatttaaaggaggaaaaaagtattttgcttaaaaatgatcccaatcaccagctgtaagaaaagtttcatgttatcaatgggtatcaaaaacaggagggaaaaaaaacgaatttgttttcaccggcttccaaaaagggcacaaaaaatataaaattaatgtctttgctcagtggtttgcaccagtattgcaagaccacaaacttgtaaacactgccgtaaaatcccacctatacaaaaatgttatcagaaaaagagtatgcaaaaaaagagttagaaacatgctttttatttttacaaaggaaaaaaataggcaccatacttcacatcgctttttccataaaaccagttgcacattttgctggacttgggagacgctcccagcgggcacggtcgccgcggactccgagacacagcgccttgtctacagaacgatcgcatgctagaaaaacttggattcaggaaaaggctcaaaaccatgctcctccagctttcccaaatataaacaataatcaaagaagtggaaaaaaagaaaaaaaacaaaaacaaaaaaaacaaaaaaccaaaaaaaaggacaaaaaaaagaataggacaagaatgccactgagaaggtactcaccgagcgggagtaaaatgttggaataaaaatgagatttagtataaaatacagtatggcggtggaagaaggaatgaagcgcgtttttttctcgcagtctctgcctcaggcactgacacgtgactcggagccaggctgacttgcaggcagcggggaaggaccgaggctgcgaggggggaagcccacggagcccaactctggctggcgaggcggcggcggcggcgacggggagcctggcgcctgagagcggcaacaccagtggcggcagcagcggcagcggcagctcgcggcgaggctgccttcgctgtgagcccagacgagcaggtgcccctcacgctgaggctgagcacacgcacacgcacacgcaagacaggcagggcgccggcgagagggggagccgagcggggttgggcccgaggcgcgcagctgccgccgcctctgccgctgctgccgcgattgctgctgctgcctctgttgctgccgccgccgcctcgcattgggagtgtgtgctgtgggggcagctcaggggtgctgatccagcgccttgagaggaggtgcacaacttgctgctcacctcaaagttgttgcttgccacttccttgtgtatttcatctatttttcatctacaggtagttacctggggagagatcccatcgtcttctctctggaagttttactattcaagcccacattcactcattcattttgtttgtttgtttgtttgtttccctgattttccatttcccatccctcccaagctgcctttgcctctgctgttccctcctccctagatctgcgtttccccctcccggttctcagggaacctggctcagcgcgatgctgggggcgttgtcacgggcaaagccactgtcaatctttattgccatctgaacgcacagcctctctttcgccgtcttcaaggggaatgcttgcagtttgaaagacacaacaaaatctcttatttaggaaaccccgtcccgggtttctttctgcgggttgcggagcggtgggtgggggcatgggtgtcctttattcattcgtggacaaggcattgttttgtctgtgtgtgcgcccgtgcttctgagctggtctggaaagctccaagggtctatgctccatggcagagactcctgtttgactcttgctcaagttgttcgctgaggctggaagtcaaaggagaggggcatgggaaacaagtgagtccattgtgtgagtgctcgcctggagggagcaagcacttggcggtcgagagggggagacgtgtaccagcagtgaggcggtggcgcaccccgcgggagccaggtggctgagcagtggattctgaaggtgagggtggcagagggatttctccacccagcgtgtgggttagggcgctcatcgatcgcctgaacaaagatgccatcagccaatcgctgggtgcattgggcttctattactgcctgttgaagaatcagctttgtggacgctagaacacatctatttttcttcatttttgtacaatactcacctcaggaccatttccctgtgctgctttgaatctaggttgtgtggaattaattggcgtctctatatttgagaatgagcaattaacacaattctgcagttcaaagattcctgctcccgatctttatctcaatgtttccaatgctgacgtttcatataaaatgcctccatcagagatgatctaacctcgacattctgaaaattaagtacacatccttcacacagagcttcagtagcaaatatggtcctcaaacattgtgctcagaattcattggccaaataaagttttaatccgcaatttaaataagagatttaaaatagccattaaaatatcactaaatatttattttggtgagttgccaactgtacacccacttattatacatactttccagggaggactgttgattaggaatactgacagagagagatgaatacatcaaagtggatttgataactttggaagccttgagttctactcggaaatcacagaattttaagctggctaatacagatcaaatattgtgctctcgctgtaaaacatgttggacttattttattttattttattaagtaagatctctttacacgtgatctttttcttccacaagtcctgaattaattttatctaggatttaaaacttagtttgttaaattttccacattttctcttccatttgaaaatatatctgattctaaacatttaagaagaaaatattttaatgcatatctttttccatcattcatatcacagtggtattcaaatgtgaaaaacttcactttaaaaatgagttttgaacctttcaaccaggctgggaagagttattcaagaagaactttgaaaaacaagctatttagaat

SEQ ID NO: 587807 - DNA, 4001 bp, Homo sapiens
actcctgccctgtacacagttctcaggggaaaacctttagagccagtatcaggtggttaaaaagagggaaaactctgcccctttaacaaaatttaaataaaaggcatttttttaataccttagaggtgtagggtcattactgcaaactaacagcgtcgtcctcaacattaaacccaagtgatcatcttataagaaactatttccccatcccctggaagacgacaccagcaggcacttaaaaccaacgcaacacaacagggaaaaaaaagatccaaagacagcatccctaagaaagcaaagccctttggtaaagcaaaataggctgggtaggacctactgcgtcgtttactcattgcgaagaggaggagcaggagttgagcgtgcgagggccggtgccatcctcaaggctctggaaatgtctccagctccggctcgcgtggcctggagccagcccctccggaatatgcggtctctgccgcttctacccccatctcccgggtgctctgagggtcccctctagcccgcccgacggccagcgccacgtacacggccctcgcccctcctgctgtgcaagtggccctcggagaacttacagggcccgccggccgcctagtgcccggccggcgcggcccgcagcgcagacgccacccgccccgccgggagacgacctgggcgcagctcaccgtgggaggggtggggggaggggactgtattttgcgcacatctagaaaacgatcctgaagcagggaacggactttggttttccctggctccctgcgccgctctccccacctcgggctcggacactgcccggagatgcgcgcgcgcaaacacagacacacacacacactcacactcacacatttctttgctaggaccagtgttgccactgcacacccgggaaacgcctccaaggggaccaagtacctgctctctgcgagctgctcagctgttcacttcatcctccgttgacaaggaaaccaaaccgcacttcatttttttttttccagaaaaaccttccactgccatcatttgaaaattgatttacggggagggaagggggagaaataagggacaatatagatatagatatcaggatatctatcataaaattatctcggttttttaaaaaagtcaaatgtgcaaaagtcatagttaatttaaaggaggaaaaaagtattttgcttaaaaatgatcccaatcaccagctgtaagaaaagtttcatgttatcaatgggtatcaaaaacaggagggaaaaaaaacgaatttgttttcaccggcttccaaaaagggcacaaaaaatataaaattaatgtctttgctcagtggtttgcaccagtattgcaagaccacaaacttgtaaacactgccgtaaaatcccacctatacaaaaatgttatcagaaaaagagtatgcaaaaaaagagttagaaacatgctttttatttttacaaaggaaaaaaataggcaccatacttcacatcgctttttccataaaaccagttgcacattttgctggacttgggagacgctcccagcgggcacggtcgccgcggactccgagacacagcgccttgtctacagaacgatcgcatgctagaaaaacttggattcaggaaaaggctcaaaaccatgctcctccagctttcccaaatataaacaataatcaaagaagtggaaaaaaagaaaaaaaacaaaaacaaaaaaaacaaaaaaccaaaaaaaaggacaaaaaaaagaataggacaagaatgccactgagaaggtactcaccgagcgggagtaaaatgttggaataaaaatgagatttagtataaaatacagtatggcggtggaagaaggaatgaagcgcgtttttttctcgcagtctctgcctcaggcactgacacgtgactcggagccaggctgacttgcaggcagcggggaaggaccgaggctgcgaggggggaagcccacggagcccaactctggctggcgaggcggcggcggcggcgacggggagcctggcgcctgagagcggcaacaccagtggcggcagcagcggcagcggcagctcgcggcgaggctgccttcgctgtgagcccagacgagcaggtgcccctcacgctgaggctgagcacacgcacacgcacacgcaagacaggcagggcgccggcgagagggggagccgagcggggttgggcccgaggcgcgcagctgccgccgcctctgccgctgctgccgcgattgctgctgctgcctctgttgctgccgccgccgcctcgcattgggagtgtgtgctgtgggggcagctcaggggtgctgatccagcgccttgagaggaggtgcacaacttgctgctcacctcaaagttgttgcttgccacttccttgtgtatttcatctatttttcatctacaggtagttacctggggagagatcccatcgtcttctctctggaagttttactattcaagcccacattcactcattcattttgtttgtttgtttgtttgtttccctgattttccatttcccatccctcccaagctgcctttgcctctgctgttccctcctccctagatctgcgtttccccctcccggttctcagggaacctggctcagcgcgatgctgggggcgttgtcacgggcaaagccactgtcaatctttattgccatctgaacgcacagcctctctttcgccgtcttcaaggggaatgcttgcagtttgaaagacacaacaaaatctcttatttaggaaaccccgtcccgggtttctttctgcgggttgcggagcggtgggtgggggcatgggtgtcctttattcattcgtggacaaggcattgttttgtctgtgtgtgcgcccgtgcttctgagctggtctggaaagctccaagggtctatgctccatggcagagactcctgtttgactcttgctcaagttgttcgctgaggctggaagtcaaaggagaggggcatgggaaacaagtgagtccattgtgtgagtgctcgcctggagggagcaagcacttggcggtcgagagggggagacgtgtaccagcagtgaggcggtggcgcaccccgcgggagccaggtggctgagcagtggattctgaaggtgagggtggcagagggatttctccacccagcgtgtgggttagggcgctcatcgatcgcctgaacaaagatgccatcagccaatcgctgggtgcattgggcttctattactgcctgttgaagaatcagctttgtggacgctagaacacatctatttttcttcatttttgtacaatactcacctcaggaccatttccctgtgctgctttgaatctaggttgtgtggaattaattggcgtctctatatttgagaatgagcaattaacacaattctgcagttcaaagattcctgctcccgatctttatctcaatgtttccaatgctgacgtttcatataaaatgcctccatcagagatgatctaacctcgacattctgaaaattaagtacacatccttcacacagagcttcagtagcaaatatggtcctcaaacattgtgctcagaattcattggccaaataaagttttaatccgcaatttaaataagagatttaaaatagccattaaaatatcactaaatatttattttggtgagttgccaactgtacacccacttattatacatactttccagggaggactgttgattaggaatactgacagagagagatgaatacatcaaagtggatttgataactttggaagccttgagttctactcggaaatcacagaattttaagctggctaatacagatcaaatattgtgctctcgctgtaaaacatgttggacttattttattttattttattaagtaagatctctttacacgtgatctttttcttccacaagtcctgaattaattttatctaggatttaaaacttagtttgttaaattttccacattttctcttccatttgaaaatatatctgattctaaacatttaagaagaaaatattttaatgcat

SEQ ID NO: 587808 - DNA, 4001 bp, Homo sapiens
taaaagatatgactgaaaatggaaatgccctggattttggtgatgggaaaattccagtttttctgtttacgcattggaatgcaaaccattgtattacattctacttttgcaaatattgttagtttaagaaattcatttaaggattctatttgcttttattgctaagctttctatatactttaattttattatgttcctgctctctgatattttatattattagaatatagaaaaacttaatgcaacataaaatagttgatacaattaaatttaagtaacacattagtttttttaactgaaccattccagtacaccctactgtgtttatgcctgtataattatacatcttctgacttgtctcatgtaattcacaatttcttcctgctgcttaatcgcagacttcagtgagcacattttaaggggagacactcagtataatttttctgtgaatctcttattttccatgtgcattaaggcattgataatccacaaggaaaaaaaatgagggatatataaaagatacaggagtaaaggcacaagatggttttcaaatctatgcataatttagattcattcttgtaagaggaaatcacaagaaaattaatcagcaatatatgtgtagacttcacaccaatcatttttacctgaaaaaagtagcagttatcatatattgtttctttatcacaagaaagaactggcatcaaaaggcaatcaagcttgcagaatcaaactggcagcctagccctcagagctttctgtggtgcatgaaacttctttgaacaggagaaatgttagttttcagatcttaggtgaaaacagaccaaagaataaattatcgcactaaaaattatctttatatgatttattggctttttgataggataattgtgactgatagactttgattttcaaaatatttgataacatttaaagacatcaaaagaaataatgaaaaagtacagactttgagtacagagtaagttgccgttacctgtctatgacgataaatagagacagtgacagaccattttgggctaaatatggtattatttactttagacaatagaaaagataaagtgataaagagttaaacttactagagagaggtgattgtaaagcttttcttgagaggcatattgctttaccgtaaaatagtgttataacaatcttttgatttttagcaagatcctgatagctttcagttccataataatctttgttctggactttacgccagggtaattgtgctgctccttttcagccagaatcagttcctttagggaagactgcagatgactccttttaaccctttgaaatggtgcctgtagtgaattatgtcactagcatgctctggaccaagaagtttggcaatgaatatcctgttaaatatttagcttgtcattcacaattaactctctcccctccattctgaactgctttctactccctaagagttgtaattgaaattggatgaataacgagaagttttaggctagcttcccaaacctttcaatagacttccaggaaagaaaatctatcactcctagaaaagcaaaaaagagaactgtccagtgatcatgcctgaatgaaggatgctgagctagactgaaattgcatttgatctgtttctctgttgattttgtaaacctttccaagggtttccatggtaacaagcgaattatcccctctgccctcaacatctttcatgcatgttacaggaataaagataaaggttagggtgagaaaagctacagtatcttttctactaccaggatgtatctgaagaagtcatgattagtcttttaagaaatcaagtatgttttccctaccccagtgatatgaaaaagttgggtcagattttacttacatctctgatgtctgcgtttgctcttgtacatggtcattttgaaaaaaattagactttctaagaagtaattgatttgaccacggagacaaagagacgggttgtgctcctgctttgcagtaagactgttgctcactgacagaaggtaaccagcaatcacacagtgaaagccagggtaataccattctcataaaattacaggggagatgctacagcctgtaactactctgtttaatgtaaatcttctagggaaaattgtatttccttcacctcccccgatcctatagcagttaagttctctaatgaaatctgtactactaaactgctgtccatgaagcaatgttggattaagaatagattcatatatttagcaagaattgcaaaactgaaaatctaaatataaaaaccttgtttagtatttatataaattaaaaattaggttcatatatcttttaaccactatagaatactgaaatttgtatattattttgaaactctgctaaattcttttcttctgagaatctctgatacactttgtatgttcaattattaaagcaattctcaattttagttttgtctatttccccagtctatacttctcaggcaaaacagaaattgcacattttcacatttatatccacagaactttacatagaaggtgcacacaataggttctcaggcttgttgagtgcctactatgtagcaggcactctgctcctgcttgcaagaagcctctccagaagcttcccccacccccaacccctggggcctcagtttagtcctcagttctctactttgacagtagttggggcatatccctatctgaatatgtttcacactgtcactcaagtggacaaggtggaagctctgccttcattatagcttgtactgtccttttctgagagcaatgcctggcattcagcagaagcccaggaacactgcctctcccaaacactccaaatgagaacatggtttcaaagacacctttgggtgctgacttgggtgtctgaaattagttgttatttaaaatacagaaggacccacatgctagtgaaaaatttctatgtcataagacttccttgttatgtattaagtttcacctttttgccaagaagcagaagtggagatactcagctgttcaaagttattcttttttaagtgtgaacaaatccaggctacctactagtagcgggaaatatcatctccataactcttcatagaagcattgtttcagtgtaaaggatttttttttacttaaataattatattttgtaaccacatataccaagaataatattctataagttttcagcaatattctgttcagtgtccttgacttttgatgaactaaactctttggtaagactgtttgtcaaagacccctatggttatatcttgctttagggcatagtcagtgtctgcattactgtacattccactgctgtctttctcttcctattagaacatacatttctgaggataaaacttcattttttttccagagatgtatgtccagaggttagatcaatgcctggcacaaagtaggctcttaataaacatttgtggaataaatgagttgttgtgtgtgtgtgtgtgtgtgtgtgtgtgtgtgtgtgtctgtgtgtattggggggctggtggtatagagtctcgctctgttacctaggctggagtacagttgtgcgatctaggctcactgcaaactctgcctcccaggttcaagcgattctcctgcctcagcctcctgagtagctgggattacaggtgcctgccaccacgcccagctaatttttatatttttggtagagacagggtttcgccatgttggccaggctgatctcgaactcctgacctcaggtgatccgcccaccttggcctcccaaagtgctgggattacaggtgtgagccaccatgcccggccatgaataaattttaataaacaagtttcaatgataaagtccatacaatcacaaattctttttcaataaatttagacaagagccaattcatgtttattgactacagtaacttttttatataattaaaatacttgtcatttcacatcttttagtcccagtgttaatttgaatgcattctctcattacgtgagttctcagtatatagattttgatgaaat

SEQ ID NO: 587809 - DNA, 4001 bp, Homo sapiens
atcctgatcttgtgtttggcagcaagagccaaaaaaaaaaaaaaaaaaaactcagggacaaaagtaccgcttcattgtcttccctgtcgtccaataacaaacatataaaggattaggtacataaataatcatatcttgattaccataaaaagttcaaaatagactaaataaaattactttaaaaatatgaactatgtcaatatccactttccatcaacagaggtttctcaacgtaagcattatgtgcctaaagcatccctgacataaaactttatccaggttttgaacacaatcacaaacattaaaagacatgacaggaatgttattgagaaaatatcttcattagggccatattctgttacaacaaatataaaaagcgaacatattttcacattcctagcaatggtctgcttataaatccaataatccaaaaactaaaatcagccacctccctcagtagttccttggtttctcacagttttatctgatcagaagtggaaggaccctctttttatcgtctatcacaatgtaataacattcttgattaaacacacaattaagtctacttaagtctcttcctaaattgctaactgtccaaacttatgtataaatcatacaagcttcaccaaaacacaaaaacttaagaaactacacaataaaatagttagcaaataggtacactttaaatgtttgcagcagacttgagaacattcccatctggctgaatgtctcgtagtaacgtgactctttatcaacagtgagcacatgagtcttccttggcagccaagtctacactacttcaaggtatgaccacactttaaagagtcatgatggaaacgactagattacgaaaccataaacagtaaacacagcacatccaccaggcggtggaagaaactatagagatattccattcagaagctgctatttctactgttggttaatgtatttttgtttctaccaaggaagctgtgaaatccgcgtgcacacccatcccaaatctatccgtggggcgggcgcaggctgagtcattcctaggagtaactttataccgatcctcgcactctggggtcgggacaaagacatcatctctccgttcctcccattcggtgagcttcgttcggcctcggccaaactccactctcccgtttctcgagtccaacacagaattaagggctgatccctggcagcgatgagcacaagtcaagatgcgtcttgggaggttcggacgtccctcgccctcggccactccggcaactaggccgggtactaagcggcagcgcagagggagggatcccaaggctccggccgaggaagccgcaggcagccccgcagcacgagtccgacccacacctccggcagcctagtggagcatcgactcgaaccgcttttgtctccacaggggctgtcgcgccgggaaagcggccagtgggcaacacctgccggggcgggaggcgccggggccctcccgtgcacacacctgcgcgtgggccgggctcaggccgaccggaaccctggaccatgcgaccccggcccaccgtgccagggcccgccgcgcgaccgctgtgccagatgggggaaggggacgcgggcggcggcgacacttacccggcaacgcctcctccttcgccggcggcagcagcagagccagcgacccccggcaccatcttccgccgccgcctagtcctcggcagcggttaccaaccgcccattcggcaccgctaagccgacacaaccgccggcgtcccgggcgcccgcccgccgcggccccgaactctaggaggcagggaggggtccgggcggacaaggacgcgagcaggcccctcggctctgggtctggggccgggggacagaaggccgcggcctgtcagagccgaggggcccaggcgactgggggattctgaggcaacgccgagggctcggcagggccgcggacaccgccgcggcttggtttgttattgtcgactccgtctcttcctccgcggcgcatgccgggaaacggcctgccgggggaggggcgcgcctggaggcgcagagaggcgtctacgcaggtccggaagtcggcagcctgccgggaagggggcggccccgcctccggctctccggccggcaggttggctgtcctggcctgaccctgggagactccgctggggccgcctgttatggtgctagctgccgtcccggtgcgtactttcccaaggtgaatttgaccttctttgcgacagctaggccctgactaaggtcgacccaccaaacactggatcgtccccaggcgaaagagagcttgttcccctcagcctgtcgcggaggagcggagccaatcgagggtctggtgtccccgtcgcctctccaggggcaacctgcggactaggccaaggtctgtaacaggataacgtaccagcgcctggcccaggcgttcctgccgccacctccccgcatatccggaccgccgggactgcacgcagctggcaagcgtccccctgttaactctgcaagggtggggcggcaccatttctcagaccaggtaaggcaagaaaacatgcaagagagaagagagggaagcctaggccaatcggaatgaaaatgtaaacgccacaaccacgttttcagctttacaaatactgaatcttgtagtgggtctagtgggttaggggttagcatgagcaccctaatggttgggagacagtttcaggggactcttgcatttgtgaagatgatcagtcacaggcaatgacttgaagccacgaggcttgaatattaaaatctgatgagcagatgttacacgtagaataattacataatagttctcaaattcctgttatatccaggaatatctggtatgagtgaaaacttggaggtgccttctctaaagtcatcaggaattctgagttgtgtttgtaaaaataggaggcacaagagggcaccaaactgaacaaaatgttaggtggaaactgaaaaacgttggttagcatgaacaatttcagttttcagtcacactgaccagtatctgtaagttaggattgagatgggcttgttttatttatttacttttaaatttgtgctgctacatatcccaaacaaatgtggtctttatcatcactggcaagccattttacttattggttaagctggaattttattacaccaccccagcaagatagaggagaaaagcgaaaattaagtagtaaatggttattatgccttaagggaaggtgtgaactggcaagacaaaagagccaaatttagtagtaaagcatagtcatcagcacacagaaaataagtggtgaggaggagtttggccagaaaattggctaagaaaaatggcagtatgaccaagaatgaaaagaaaaagaaagaaaagaaaaactgcagtatgaggcctgtaaagaacgtattggtacttgcacttcctcttattagtgacattcattattacaaatataacccaatttagaatgtaaaaatcttgctggagctcggtgcagtggctcacacctggaatcccagcacttatgggaggccgaggcaggaggattgcttgagcccaggagttggagaccagcctgggcaacgtagtgaaaccccttctctacaaaaaatacaaaaattagctgggcgtggtgatgcacacctgtggtcccagttactcagaaggctgaggtgggagaatcagttgagcccaggaggtcgaggctgcagtgaaccatcatggcaccactgcactcctagcctggacaacagattgttgccctgtctgaaaaataaaaaaaaatttctgaactatgccagtgataatctggtaaattataaatgttgtctgacttttttctttggaaaatgaattaattcagtcctaaccttctctcttaatcacaggttgcaataaattaccagaaacgactggttcataccttatacacctccagtgtaaatgttaagagtttgtatattcttaacagactcttaacaaacatcagtaattctttcctagggataagtga

SEQ ID NO: 587810 - DNA, 4001 bp, Homo sapiens
gcacagtaacaaaaaaagaaaaaaagcctattttcttcaacaaaccaatatccatactaacacttcaacaaaaactacaaatggcttctggaatacttactttatccatattaaagtcccaagactccctcctatgcaaattggcttagctactctttttaagatattttagaaagcaccataagctatacatattcttgtctctcctaagcttttaaaaaaattttaacgggatttaccctgggaacataaattcatctacaagagaaattagagacgtttcaaggaataattatatctcaaattcaaaaaaactctagtaatttatcctacctcacttaaaaactatcttttaaccaagtagtttcatgagcacaaatctcatgaattccaattcaagcagactatttagaaagtttattctcatttgccacagttaaacaaaactaatgcttaaacttctctacccttgagacagtagggtaatgtaccatttatgcctctacaataacacaccttggagaccaactgtaagagaccagctctcaaaatgggcacttctgtggttccaacatgctatatttccttaagcaaattctccagaaattcaactcttaacacactaaattacacaaaagcaaaacacgaaaattaccctcaagtagtctgcaattaaaattttgcgtttttctagttatgaatgcaaaaagtatttttgtgcctttgtgttcatttgaagacaataatctgttaaaatttctatgaaaagaagagtgggtccctaaaagatcacttaagtcagtgaaatttaaagcgcattttaaataactgctatttttatccaacgattcatcccacttaatcaccattataactaaacaatacgtaacgtgcctcttctaatcaagacttaaggggatacagagagggaaacgggagggagacagaatttaaataagtaatatctcatcagatccatttgatttttaactagcgaagaaaaagtcattttccagatatggtgagggagagaattttttttaactctgcgactacttcgtaaagcccaaggtcatgatgtagcatattcacactctaaacgtgagtttcccctgcagaaaataatctacaccaacccataattattctttacgatgatccaccttttataatgtagatgtttaaaataaaaaccaaaggaatgaccaatgagagccacagtccctaggaagaactgtaaatgaagacgaatccacatggcacaggatttctcccaacatcctcaaacgggaatcatccgaaggcatcgattctacagcccaaagcctttgtccacaactcccaggggtcagagcttccttctttcgcgccaggccaaagttgctacgtgggatccgatgttgtcgccagactttcagccaaaatcagccttcaaattaacctggaccgcccaacctccgtgcctttccgttacgccgtctcaagggcaaacattccaccctaactcgccagagggtgaactgcccccagatctaactgaaaacacttgcccttctcaagcctaacgagctgggcctgcagcgcttttctgccaccactgactacgatgacatagcaaagaaaaaaatatacctatgaaatccttcgagatcttcactctcaagatccctgggaagcgcacatacaccaccacatggaagctgacgggaaaggaagagtcggtgttttagcaagaaaagagggtgccctaacggcaggagctacgctagatactggcgcggccgccggtcccgcctttccccgttcttccggcttggtcgcccagccctccccacccccggcgccccgaggggaactgcttcgcacttggcaataaacacacaccactgctgccgagtcggacacacaaggccggaggctgagggaactcttcgtcgcagcagcctccccaaaacaggtagaccctcagtgagcccagaagaagatggcgcccactgcccctccggtccggacaaacggacgtacggtttatctgcccatgcgctctgcaggcgcaacccaccaccaagcttgcgcacgcgcgctgccgctcacccgtttcccctcgctagaggaggggaggcggagccccggggttggctgagcttctgcgcatgcccagattctgcccagcccagggacctcgactttcaacgggagaaattcagagacacattcagggctcagccggtagatgtgctgagaatcttcggtagacaactgtcgaagtacggcggacaaactttaaagatttccagaagttaaggaaagagatgcaaaagcagagaaaaggcgacttgtcttttcagtgttgcattactgtgtggcgtaaaacatcttctaaaaagctcctgtggccgggcacggtggctcacgtctgtaatcccagcactttgggaggccgaagcgggcgaatcacttgaggtcagtagttcgagaccagcccgcccaaaaagcgaaacccccgtctctactaaaaatacaaaaaagtcagcctggcatggtggcgggcgcctgtaatcccagctactcgggaggctgaggcaggagaatcgcttgaacccgagagatggaggctgtagtgagccgagatcgcaccgctgcactccagccaggtcaaaagagtgaaactccatctcaaaacaaaaataaaaaagctcctgtagaccctagaataccacagaaaaggtaattttactgccttagatgttcgccaagtacaatcccaacacctgggggcttaataaatgcatgcttagtcggttttatagatataaataaccttgtgaagtgtctttataaatttgttcccatcttctggatttttgaaacaagagaacagatgagccagtactgaaatttcagtaatggaaaagcactattacaggtgtactctgtgatgcctgctacgtaatagctggtgaacaaccttgtgtttggttttatcatttgcaaataacaaagtttcccaccacgttgtatagctacttgatgtatttgtggatggattcaaagctcattaagcagaaagtacattttaaaaacattgttacagatgacagaaaaagtgagttgtggatccctttctcactgcaaaatacccattctttaatgatatgattataagaaagaagaggtagtttaataagtaaataaaaagatagttaacacaaaatcagagccatcttttactcactggacaaattatttagcccctctgtgcctcagtttcttcatctgtaaaatggggatactcctagtacctacctcttagggttgtgggaaacattcagtaaatatgtatgtctcagatatatgtaaataagtgagactattataagtatttgtgacttgtttgaaatgtcaaggtgatctatacagaagcagaggatgtcactctgaggaggtaggctcattgactagatatcatttaccttgataatccatagtttggtcctggccttgcagtctcaggaacaggaccttaaaagttaacgtttattggccgggcatggtgactcacgcatgtaatcctagcattttgggaggccgaggtgatcgaatcacctgagtgcaggagttcgagaccagcctggccaacatggtgaaaccctgtctctactaaaattacaaaaattagctgggtgtggtggcgggcacctataatcccagctactcaggaggcggaggcagaggaatcacttgaacctgggaggaggaggttgcagtgagccgagaccgtgccacagcacgccagcctgggcgacaagagcaaagctccgtctcaaaaaaaaaaaaaaaaaagttaacatttattgagaatttattatgtgccaggacgtatacattatctcaatttattcttacaactacttttggaggtaggtactattattattcgtattttacagataagggaaactgaggcatagaggattacaaaagccaggcaaaattgaacg

SEQ ID NO: 587811 - DNA, 4001 bp, Homo sapiens
ataaaatagaaaatgtcctcgggtgaaaaagcaatttttggctgactgcaattcatttaggttttcactaccatacaactgggtgacgagtaaaatctcctatttattttgcattgtttggcatagtctcgctcctctaccttctccatctaaatagttaccattttccaagtggacaatgtgcagagaagttgtatgtattaatgaattcctctgcaattttggtttcactatcagaattgaagtttgcacacaacatagtgtctcaacaatgatctcaacattctaacgctttagaatccgtttaccttctgtgttcacctatatcaggatccaatacctgtgtgaatcttttcgggtcatatttagacgtgcactttcctgcatctacacacactctcaagttcctctagaatgtttaagaactcaactgtgtgggatgttaagaagtacgccagaaataatttcttggactccagataacgtacctgcaaaaagagtcatttggtaggataccacaaatatcctactgaattctgaaacgtttgttcctgagtccgactccccttctgaccacatctactcaattttgtttccaccgaaggaacgctccgcagtcacaaaactttcatcatgattacggacgcaccacctaaaatgcatgctcagaagtcaaagtcctatgaaaataccctcgatgagcatttggtgaattgctgcgtttttaaccctcttactctgctcccctcagctgcacggcccctaaaatcacaagcgttcaccgcccaggctcggggtctttgactcagcagagaagaatgtggctgatgagttatctattaatccaaaaaacctcggctagaaagatatttcaccaagaacttttaacacggaaagggagggggcagggaatagaggtatcttttaacgagaactttcccccgagtttcttccttaaactgctccccccccgaccctgaatccatacacaatttccagccccggccctaagtcctgaccctccgagtcccgattatctgaggtcacccaggagtcagctctcggttccacttataaatcccgggcaaacaaagctgagcattatacttacaaaagtctccgaaaagtccttggagttacgcaatttggggcccgcagacgcgcgtggacacaaaaacacacgctcccgagatccaccctccccgggccacactgtggggctgcgtccggggcacgggccatgcctgaaccttcttccaccgccgcgccccgggcccgcgccccgccggccgcccgcactgggtcccgcgtcgcccccgccaccacaccgagccgcccagtacctcctcctcctgaaggttggcctcgctcggggtgttctccttctcggctttgccgccgttgttcatcttcccggtccttcctcgccgggccgggcagggctggggcgcggggctgggcgagggcgcgctagcccactggagccttccccgggcgccggggctccctcgggcgggcgccgcgggctgtggggctggagctggagccggggcagtggctgtcgggctcgggttgggctggggctcccgcggcgagtctgcgacggcggcggcgggcgactcaggaagtgcaagggagagacggggcagggcgcgggccgggagcggggcaccgagacaatcgggccccgggagggcgacctggagagggagggcgggagccaggggaggaaggaagaaggaaggaaggaaggaagcaaaggatggggcgaggacgcgcgtcccaggagtaagcgcggagagttggggctgggggctgcagccgctggaaggaggggacgggggtgcctagagaggaggaggaggaggaagaggaggaggaggagcggggcggaggagcgcgggccgcggctgggacgctgggacccgagagccgctgagtacgcgctccaggcaggctctgggaagtccgggatggaagcagctccctttctctcgccttcctccctcccctctcccctccctcctctccgcgcctctcctcctccctccgccctccctggacgtgggctgccggctgcagcccggagggacggggcgcgggacggagccccccgcgggaggaggggccggcggccggatggcgcgcgccggggaggggcagcgggccgcgggcggaagcggcgaccccagcccccgactcagcggctggtcggagggcgagggcccgggaggccgagggcagggaggtcgggtcccgccgttcccttggcccccgggggccccggcgtctgcgcgccccgggacttcggggaccctgccccgccggggcctggaccgggacctgggatgtgtgcgacttttagtttgccggcttttaccgagggatttgcacccctggccctaagcccacccttcccgagccagacccggttcttcctctgctgcttgaatgacagcatgagaactcgagggacaccggggacagcccactccgggccggctttttcaggacagggcttcaaacccatctccagcgcgggtcctgcgacgcgcccggagccttccccgcttcgcttcctgagcgtcccgcggccccccgactcctctcccaactctcaccagactgttctgggattgtttacctggcctctccctcacccttcagaaagctccttcctggaagaaaaaaaaaaatcctgccctatttatctttttaatcccacggctatttaaacgggctaaggggtatatagcaggcactcaataaatatttgttggcaaagtgaatattccttattgcaggcagagctgggggtccgtacggaggaacttcagaggctggaagcacgcttgaaaaagaaagggggcctgggctttgcaccagcttcaggattgcgtacttgtttcctcatccgtgaaatgggagcagctgaatgtgtctcctcgagttttcgaggtgattataggttgatagagctatatacagcacccagcatttattcttgcttcgtttaggtttacaatacatggaagctaacattattattaagaaaacttctatttttccagggccttagaaagcgtttccaatactcgatcatttaagcttatggttttttggttttttttttttttagaaaaatgagggtctcactttgttgctcaggctgagctcgagctcctggcctcaagtgatcctcctgcttttggcctcccaaactgatgggattacaacgtggagccaccgtgttaaactcttagatttgactgctacaaaggtataaatgtggaactccatatatcagtgggttctgccccacttcttcctcccaggaattctccatcccagcctgctgctcctgtcttgcaccggtaacagtttccaactacagtatttgcttaactgtttctccccacccccaccagacattctttatacttggtttaagtgctgctggggatagggcgggggtggctgtgggagttgcagataaggaccctccctttagggagtttaaagtggtatggtggctcacacttggaatctcagcacttaaggagatagaggaaagaggattgcttgagcccaggagttcaagacctgcctgggcaacatagtgagactctgttctccacagaggggaaaaaaagaaaagacaaaaaaataaagtggtatggagccaagatactctcagaatcctctttccgattatagaaagcaaggaaaatatttgctttaagggcattatgaggagaaaaacagtagtgatacttggatttacatattggatttatcttgggggtttggagattttgaaacaggaagatttccataaggaaaacatgtttttttaattgctgtcataatgtgatttctctctaaggggaacaaacatgtatcctggatgaaaataaaccaactcttgaaactgcaacccaagacattcagaagagataaggctacagtgaatgtggaaactttgcacgtgtttggatgta

SEQ ID NO: 587812 - DNA, 4001 bp, Homo sapiens
aaatatgcaattttaccgcataagaacttgacaatttaaaaaccaaaatcggtatcctggaaaatgaatacccttatcttttaggtttcggcagggagcacaaaaatctgtatttgctacacctccataccaccaatgaaaatggtacattttcacccttaaattaaaaacgcaggtatcaataagtttgatgataaattatcaatacaggggagaagtgcccaagtcaattttctccgtacaggtaaatgttttccctaaaaatgaaaaattttgttaaaaaccaacagccattatcaaatttcctgaaccaatatttatggttggttatggactttgctttggcttaaaaaaaaaaacaactcagattcaggttagttaataagtattcagaaatgcagattttctggggtgaccaaaaacatggaagaaatttacaacgaagcctaaatcctccaagagctttctcttaggaagcaaggcgtctttcaatcacgctcagggaatgtaactaaagcacttatcgctggcgaaacaatgtaattatgttcctcaggctaaacttataatgaaaccgtcaatactgccctcgtctaaggggttcagaccacagtaagacagacacttcttcagtctagtcagaacaacttcccaaagacgcttcagtttcccatcgcgccgcttgtaagtcggagcaagacatttctttgggatccaaacctgtggtaacaagttccctccgccttccctaccccggagggcttaggaaacccgccccctccccccgccgtggtccccagagaccgaacctccgcgaggacagggcaccttctccctggtaatacagaagtgatcgcgttcctttatcaggaagcgaattccactcgtctcccaaaagaccggtggggtgttcctttcctccacagcggggctgaccaggcagcggggtttggggcctgccgtggtagggcgcggggtggaaagaggcttgacccaacaatgctcccgcgcgggtccaggttaccttgcagcgcagcggcgtcggccgcctccaggtcgcggtagatgtggcgcaccatgccagccgtctcctcgttgctttgcgtgttgatgtcccacagcaccagcagcgcccgacgccgggcgaactccagcgcgaagaggcggcccaggccgctgccggcgccggtgatgaggcacacctggcccgccacgctcttctccttgggccgcaccagccagcgcgccgcggccagcacgaacgcccagagcactttgaaagtgaccacgaagaactccaccacgatgttcatcgcgacgcccggggccccgcacgagcccagtgcctgcgtccgcgcccaccccgagcccggcaatcgggctcccggctccggggcgcttgtcacagaggccgggacgagaaggctgcgccccgcgcccgcccccgaggtgcccgccgggttggagtgcgcggcgccgctccctgcctgcgcggggccactcccgcccgggctcggcgctgtggccccggactgtgcccgccgcggcagtcacccggctcggcgcctcctgccggcagccgcccgcccgtcccgcagcgcccggccggccggctccgctgcagtggcggtgacagccgcgagttagactactcgaactgccctcatggccaagctgctgccgcccgagcgtccccggaaccggcgcgccggctccctctcaccccgggggaggggtgcgcagcggaggcggcacgggccagcgggctgccgcgggagttgtcaactcgacccaagttgcgagagggtgggagagtggggtgcggggcggcggagcgccgggaaggggagactcgctcggcgcaggcaagcgctgcccaacgccttgcagctgcccccgagggctcgcgttccccggccctgcactctccgcgggtgtcactcgggcactgggctccgcagcgcagcccgcttgcaagtcagagcgctccgggccggctctgagcgggctccacgctccgcgctatataaccccgcgaccgggaagagcccgcgccagcctcggcatcggccctccctccgcccggcctccccgcccccgggcgcaccccgcccccggcccagcccccagcccgccagccgtccgcggagccgagccgggtagcccctctcacacggccgtggccgcaacctcagccctcctcgcacctcccttcgcagctcacgccccctcccgtggggtgtcctggcctccgcctgccgagctcggcagtcagcagagccccggccatcctcctccggccgtccggtccccactggtccctggctagccacttttcgtaagctagagcactccagaccgccccgcctgcgatcaggcgctgcggaagacagccctgtgggctggagcgacgacaaggacctcgcggagcggcgaaaggggtgtagtctgcgactaccgcggcagggagccgggagggcggccaaaagtgacttcgaattgcagctagccgtttggaacgtggcccaagaggctctcattttcctggctggaaccgtcgccgcggtgcttgcctgcggtcctggtcagccgttgccctcccgccgggcgggcgaagactggtgcatgctgggatttgtagttcgtccccatgaggctcgtcctgggaacattatggggaggaacggagcctaatcctgtcagcgcagcctggggattaggacccggagttgccaaggtgtcagcactctttgctcttgaattgattaaaaagtctaatcaaatgcatatattttcttcaaacaagttttacccgaaagtttgttgaaagaggctaaatcagggagttctttgcgtctgcaaggcggctttttagttctggattcttttccggcttattctaagacacctatgagtcgtggggcttctctcgcgaagtctttaagtggacagtacgcatgcgccaacttcctctttttccggctggaaccatggagggtgtagagtgagttgcttctggtcctcttgagaatccttctccatctccagagccagatactttttgtgtcactttttctctctctggccgtagcttgcacctttgcccacctccctgcttgattgtgaacgctgtgtgacaccagtggggacctgaggctagggttgggatgcgggcggtcttaggacggaggttttggagatcccgggaacgagatgtcgggttggaatgtgtgtggaacccgtcggttggctgacggcccagtcctcggtagagggtctttcgggggaggcgcagaacctctgaattgtgttcgtccttggctggtgcttggtacaggcctccctgccgccaggcctttgctttcaacatgtggatcctgattgaaccagagtggtggtggcttgttttttttttatttttattttttaatttttgcgcttaaagtctcggggtcagtgccttgcagtagtctttcagctagtacattttgttattcgggtgttggtgtgttttttttgtttttttttttaattagtcgtcggaggccgggcctcttggttgaaatagggaaaaacgtattgctattgtcatatttgtgattgcgttttaggcaacatggtgttaaaggttattgacatggagctaaaatatgcatcgtacactgtagcatgccagagcaagtaaagttactagtgactaaagtcagtgacagcatttctggtaaacaacactgctcagtacgggagtaatacagcgctgtgagctttttgagctattgataacatttttgtttattaacgttagagagaagaagaaggaggttcctgctgtgccagaaacccttaagaaaaagcgaaggaatttcgcagagctgaagatcaagcgcctgagaaagaagtttgcccaaaagatggtaagtaaactttttgaggcactagcacataaggaggcgccttattgggattgaggatgaggtgaatgttcttggcaagatttactt

SEQ ID NO: 587813 - DNA, 4001 bp, Homo sapiens
ttgtgactgtggcaccaccacccccaaaacactcccctttcttccgccacttctgcttccatgcctggggggtgcccacataggagggtcactgggcgggaaatacgggagggctgaggggagggaaagggaatgcctgtcctggcccgtcgctgtcttacctgcttgcggaggagcctgctacggagtgcccggccccgcacgtagtgtttctgcttcatgttgagccgtacgtaattgcccctgtcatggcgggccagccgagggaagatgtgcaggggggctgtgccctcagccttcccagccctagcttgactggaggggctgagtccgtggtacctggggttcgatgggctgctgcagggctgaggtggctgtgcctgtacaggttcccctggagggtcttcctcaactgctacagccccagccccctccgatgggggtccagcttggctgctctcctgctggacctgtgcggggctctcccagggctcctcgttccatctccgcttctcgcctccactgctgctgggctgggggctccccacacggatgctgacttcttggaaggctgaagcctctgggccctgggagccagcaccaggaccaaggacagccgactcaccagggatcagaagttgtgattcctctgagcctagatcaggcctgcaggctttgggggcccccagaaaatctgggacctcactgtgacatcgctgtaaccagccaggatctagggagcccagccgctggctcagggatgcctgcagatgctggagccggcctggccttggctggggctcagggagctgtggaggctcatcactgactttttctgcaaaggaggggacaggccctgtacctgggggctttggggtggatgccttagatgaggctcttcctagaggccacggtctgcggcccagggctggtccggcctgggaggggaacaacagaacagcaggaggaactcaggcccctgagctactgtagactctaaaacctacctgagtccccacgctcaattgtagagcaggctaattagcacaaggctggactagaaagggagtcaagggcgaaggccccgagaagctccctgaagactcgtgccctggttggcacaggggcccgtgcctgtctgtgtggaaaaaatgacaagagggcgacccggaccggaagcagctgtggacctagcgtggactcactgcctgcccactcctcacctgcagggtgcctttcagattggccttgagccgctgcccgtagtccggcaccgagccctggcggctccgccctggcgtagactgtggactcttggtcgcagcccgattcagatggggcccccagcagcggggctctggcgcctgcaggagacaacaggggcacaggccagaaaaggctgttgtggcggcagaagcgctcccagccacccctcccgcacctggagcgaggcccggcccttcttcactttgcccagtccccctcccaagttctgtgccccacggcggcctggccgcgactccgtggctcccgccactccgccaaacagggaagtgggaggaggctggggcggcggggcctgggtacctcttcggccgccgcggggagcgactcggagctgcggagcccgccgccggcctggcccgtggtacgcttcagagtgcggtattcccggtagagcgctgcgtgggcgagcgggaggcggggtcagggtggggcctgggcccctgccgacccggtgtcttctcgcccccgccgccccgccgcgcgctcaccgcgggtctcctccggcgccgcctccacgtcgtcctgtaaagggaacgcgtcagccgcgggccgcgccctcagcccctcggcccctgggcagcccgcacctggctcggtcgccgcccgcgctgccgtcggaacgcgcgctcccacgcctgcagccgctcccgcacgtcccgcagccgctccatggcgcgcgcgcccgcccggcctccgcgcttgcgatcgtccagcgaatctcccgcgcagccgtcgcgggggccgacagccaatgcggatgcgcggcgggccgggggcggggccaccgcccctgggcagccagtccgtcgggcctcggacaagcagccaatgggaggcgtcaacgtcatcgcggggcgccgcggcgccgggcggggagcggcggacggtctaggcggggctggaggcggtggctgcggttgcgggaccggtgagcgcgggcggccgggggggtgtctgagcggggcggcgcacgcccctggccctgcctggcctcaaggggcggggcaccggtcgctcggggcggcctggccgagggaggcagtggctgcatttgggagcccggggccgaggccgggagcctgggaggtgccaccgcgggccgggaaggactgggagtccccgggccggtcggagcggcgtcaggccctggtgggagacgcatccgacctggaggagcaggccccgctcgggaggcgaaagagcggagggtccagcgcctcccgcggctcgaggcccggaggagccgggcgggggcgtcttcgcgaaacgcaggcgaccgaggaccgtcgcgttccctgcggccggcgggaggggagggggcgtcgcacggaggtgcctgcctcccttggtgggcaggccgtctgctttggtgttctcccgtgacaagtgctcggttggtctgtcctgtcagagcgagtatgatcgttgagatctgtccaccggcagaactaggccgagggttggtgtctgggacttttcaggaaccggtgccttaaggacttacttgtatgtggaaaagtcgacaaaaagaagggccttggggccagagtgtcttccccggcccccttccctggcttgtcactcaggctgtgaccttgggccaggccgaggccttcattttctaatctgtcacagggagatggctgcgatttagttttgaggatgctacaggcagcagcagggctggcaccctgtgtcacaggtaccttgtggccttgggagtgtttgtgcatctctgcagcttgggtgctgctgaggcagctttctttgccttgtctgagcagtctgtagctttgcaccttctgaatcccacatacttaagacttggtctttccacagtggctctccagggaagagggagaggtttaggccagtggtaagggccaacaaaggtgagggttgctttctttcggggtctccgtgcttggtgacgctctggagaatagtagcttttgcgggggcttgtattttataggctacatcatctggactcggtgttccctgggtctcggtcttttcaacctgccttgttgcttatgaagctgcttctgtgcttccagctctttggtgttttgtggagtccaagtgtagccctggagagcatctgtgaggagaggggagggaaaggtgatttggctgcttgactccttagagtgtcccgtcaatactaatgctgatgaaggttggtggggagagtcctgggctttattcaggtttcgaagaaggttttgtgaagcagctttgtaatttgagaggcctgaagtacccatggggggccctgcaaggcaacaggcatctgtcaaaagcatacccaagcaagcgagttgttgacgatgccacactgcttgacgcttagtttctctaaagagatcctgtgcatctggagggctggggctgagttgtgagtttgtctgccagttcactgcacccagcccagcgctaggcatctaataggtgcttctctgtgccatggccactgctaactgctgactttgtttcaggcactatgctgggccttcctaccacttgtgtgtggcttggtagtggcctagggtctctcctccctgctgaagtccctctcctgcaggtggccgtctgcccggcccagcaccatgcacacgcttgtgttcttgagcacacggcaggtgctgcagtgccagccagctgcctgccaggccctgcccttgctgccacgcgaactcttccccctgctg

SEQ ID NO: 587814 - DNA, 4001 bp, Homo sapiens
ctcccttcccgcttccccctggggtaccttctcatggcgggacagggacgggtggacaaacttgcggtaaagcaggctggcgcccttggtgtagggtgagagcagccacagcacgaaggccatcttgatctcatagtagaaagggaacctgtcacagcacaaggggcagggtgagccaaggagcagggctgggggggccacccctgacccatggcttgcggaccctgcgtccataccaggagataaaaatgtctgtaacgatctctgctgccatgaagagtgcaaaaacaatccagtacatcatccaccgcacctgtggggtgagcgcccagaggtcagcatggggcctgcagcaccaactcccaacccaggccagcccagcccagagattccagggagcctgtccggctgcatagctgctttcccccacacatggctggacaggagctctgagaaactgctgctcattcctatgcccgcctccaacaagcttcacccaccagatcttccacaggcaccccgatggcctgccctctatctacaccctcttgaacagggcccattctctctccctccccactccactcaggatgtgccacacagccttgcccctggaggagggagaggccaactgagaccctccccacctcaccaagtcctattaaacacacccaaacccccacgctcacatattcacgaatgttcttggtcttcacagccttataggaagcataagctggacacagcatcccaaacaccagcctggaagagcagccatggggagtgtgaggggcaccatgccccactcccaccttgccaagtggccatttccccccactggggtgcaaggtggcagtacccgccctgtttttctcgcttggcttgtacaacccgtgcctgagtcagagccctggaggccacctccccaccctgctgtttacaaacatcccaagcctgcccaggcctgcaccggtggcccatgggtgcatgatggagtgagaggacagccactccacgaagtgggtgagaacaccagactgtcccctcccatgggcatgcaatcaggcccagggtcaccagacctgacactgctgggttgcagatagggctatgtgagccagatgttggcatactcaaaggtgaggaataggatggtgagtcatgtgactgctcagatggcaagcaggcacctggattctccgcccacaacgtgccatatcaccttgtgtttgccaaggggcagcaaggtaggcctgtggccctcggctccacgcatctgtttgcagtgtgtgtggcgtgcggcaggggtcgttctcagccaacgaggcttggtggggcgggtagcctgcggtgccccagacaccgcgtgcaagcccacaggtccgttaacccttgcatggagtgctggagggtggagctcagaaagttcctcctcccactagacgtccacagcttccaccacaggggcgggacggcaccccggggtagaggaggtctgagggcggccatactcacaccaccaggcgacagatcatccaggacaccatcttgccggcctttgggacgtggggaggaccccaggaagccgctcagaaggacgttcactcaagggctgggacggggggtgatcagggcagttgcgggaagcagaggggcgatccggctgtccctcggcggaggcagagcccgccgcccacggcctccgactgtgcagttcaggggacctggagaatggggagacccgaggcaaagcggccccggcggggaggaagccgacttgggagcgggcgcgccccgcggccggggcagttacagctcccacccgccctttctgccgcggagaacctggcgctcggcccttgctgctggtcccgcgctggagcgggtcgccgcggttccagcgcgccgggccaccagcaccggcctacagggcggagttcgcaactcacttgaaagttgcacggaaccgagtgctgcccaaccccagggctccggcttgccacgcaggcgcagtgtagccccggagggggcggggcgaggtcagggaggcgagaggccggccccttaaaggggcgatgtgccgcgggactcgcgcgtggggcccacagtggagccaccttcccaatcggaaagattagcgtgtgggaagctgtaacaaaaaagcagggggagtgcgggggtcggcacacaaagaaaatctggactccagagtttaagcgacccttcactggcttttcccggtgtctttccctctcgcctcattttcccctctgtgaaccgggtaaaggcatgagatgcggttggtggggtagagggaaggatctcctctgcaggctcagtcaggagctggaaggaagcttggctgagcgccagcaagtccgggtctcacaccagtgggtccaggagggaaaggggggaggtgtggggggagagggaacctgagggactttttgccccaccaggtttcaggggttcccttctctctgggatgcctttccagatccctgactccggggcaggctgaccgcgatgatttgaggcattctgggtagagctctcagctcccacactccttcagcagaagtttgaaattccacctattcctctgagccaagtacacaaataaccctgggcccttaatagtagtatcaaccattgccattttgtaatgcacgtttgcacgcaaggtcttagtctttgcaaacttcttttaaccatgtaggaaataggatgctcagtggtgaaaagtaactttcctggtatcacccagtggtatttattgctggctggtggctacatgcttggcttgatcagtcttctgagagatcagcagctgcaggctgagtggccctgcagagggccatggaaccggataagttcctctgggagggaggcagatgccaggaagaagggggaaggctctaaaaaagaaggcaaacgttgctgcttctactacttgccctgtgaggtttcattctttttgacatcttcagcttactgcctctgttgttccctctgaaaatagtgtccccccaccttgcagagggtgggagcaaagctgtccgggcatgtggggtggaaacacaggcagttactgctttttattggagccacagttaacccccaccagctatcataaggatggaataggtaatcatggggccagggaaaggaggcttctgggggataaataaacacacggtgattatatggtcttaattactgtcatcagttttattggtattgctgggtgtgagagccagcagtgaaaccagcccacaggagaaacttccccgaggccccatgtctccctctcctctcttaaccaaccctcacatttacctgtccccccttacacacacacattggagtaaccaaaaaggccaagggctagaggaactcctaaggaaggccccagccactgtccatctttaggcacagacatggttctctaggtgaaaagtgtcctgggtctccctgaaggaggaaagctgtgactgaataggggagcagctgaaagggacatccatgactcaggaggtcactgcacacgtgagcctcgggtcctttggtgcgtgctgcagaactgtcccttccctgctggctgccttctggggccacgcacctgacctcagcatcacaggcctctgtctacccccatttgctgggaaacattacctgggcccgcccaaagctcattcagctgggatggtctcccgtatggagactcctggtcccaatgcctgtgcttgggaaatctcagagaagagatgtcagaggtctgcgctgacagcaaggctcagcacggagggcaagaggctggcagctgaggagtgtcaccatccctggtcttggcagagtgagtagaccttgcctcttgcagcctttggtcctgagctgttgacacagtcacccaattccactgggttgctaagcagcactctggacgtggacaagccccagggcaagtgacccagcaggcacacacagaaagccaggca

SEQ ID NO: 587815 - DNA, 4001 bp, Homo sapiens
tattgacatgagtcatgctgataatatgctatatgtttgtctttctcaatacacagtaagtctctagaaaggagggagcatatcttgctctttctctttattccctatggctcctagcccaaggttttgcagttagtaaggattcaatggtatctgcagactcaaaatgagttgagtgtttccatccttacatttgctagatgaggcacatgtctcctctttctgtattcaaatgcaatataaaaagattttttcaaaaggcaaaaactgagtgaaggagccagtagcatcccaactggattgcttccttctaccctcacctgctgctgtacagactggaacctgttaacaggttagtgaggttaggatagaagttaggctgcccagcaccagcatgtgtggtcgattccaggatgccatgggaaggtgtaatactgattcttaaatatttttgcattttatttgtctttgattccacttagagcataccttctcaagatagttagaactttgaaattatatatatgtgtgtgtgggtgcatatacatacacacatatacaacagcatacatatgcaccatacaatgggtatatttgttgttgttgctctctgtttcctcaaagtagcctccacattctgccttttagaaatatcttttgcatgtgtcgcctacattaagatgtccattaattcaggactcttggacactacatcccatttcattgcagcttgctaaactcttagtgcttagatgataataggcggtgtgggaattcatgtgttatttgttcacatatgtctgaaagctcaaaagaacaggtccgtatatttttacagaaaaagctttgtgttgaccctttttattttttttttcccctccacttgtgccaaatggttaaaataacattaggagaaagggcagacctagagaattttgtaaagaatttgcaaataaataatgatatcaggatatgagccgcggcaaaagaacaggtgaattttctggtgttaaagtatttgaacagttttatagttttgcagcatttaattttgagtgtgctcattgcttgttagacattaacacatgtccatattctatgccaagtaaccttttatgagatggttctattaatagctaagaggatttacagactcaaactgtatttttttcaaatatacacacaacatccagcaggaaaattgtcactttttggagaaataatgttattacctactgatagaaactcatgcttaggaaattcacctttggaaactttgaatttggaaaaaacacccctcagctccttaatgttcttatgttcttagtttatcaattttttcccaaggaattttttgtagaaagcggtctataatttttctttcattattatatgggatgtaatatttatatcggagaaagatatcctagggctaacactaatagccacaaaatctgtctagatttgttgaatgttatcacctgaaacaagcaaacaaacaaaaaagcaatacataataatttattttggtaaagggaatctgtttagattggagaaaactagatagatcaggtaattatcatctaggttctagatttcccttggggatggtttgaaaacatttttgataaaacattaagataagtgagcaatggcactaaagcttgagtatagttttatattctttctgggtaaacactttcccttgacgggaaaggatcatggattgtggaaatcaccttaccttgatatcaggaacagccctgaggtctccttcattttctgtgatttggtgaatgtctgtattatatctctgagccctgaacaggggcagaaactgtgtccatatagacggcctggagaaatgtttctggaggcactcttggttatcttgggaaagctggggcatgttttcacaataaaggccccaaatgagtcctgttgcctggttttcccaatattagcacaggatccactctgcttctctttgtttggttaatgctgggctggctctgaatctgtggggagacttctccaaaagttatactaatgaaagcaaaaggattacctgctttgtggatcagcagcttatccacagatctttcatgttctattcctggtagagctgcttattttgaatgtctaggtactgtatgttatgagtgccctctaaaggcagaaatgtattcttaattaaaatgtaatcctaaatcaaaatggaaagaaatgatccaagtgatatacagcttagcatatagtgataaattaaatagattgtttggcaaaaattcttgtgttagtggtgtgtgatagccaatagtacttgacaatcttgggctatgcaattgacaggcagatggttggcttaatctttccaggtttcttaaaaggtcatcttaatagcagtcatctttgtagctagtaacatatgcaaaactcatacccaaacttaaactcaagaattattattctttttacatacatcatgtggagtaagttaaattgattttcttatgagatgactaggtacccaatgagtaagccaagaattggcttctaacactatacttcatatttataaactgctttataaatataagattattaaacagagtggaaaaggtagaatacctttctgtcaagaggcaactaatgcccaatagcttctgttgggtttgagggtgcacaaaggtaagggatgtgtattactggggtctatgaactggaaaagtttccttttgtaaaattgctttacagattcaacacaatggctatcatatgtcagctcctttcttttgcaggagttgatagttgattctaaaattcatataaaattataaggggccgggtgcagtggctcacgcctgtaatcccagcactttgggaggctgaggtgggtgaatcgtgaggtcaggagttcgagaccagcctgaccaacatggtgaaaccctgtctctactaaaaaaggctgggcatggtgctcacgtctgtaatcccagcactttgggaggccgaggcgggtggatcacgaggtcaggagatcgagaccacggtgaaatcctgtctctactaaaaatacaaaaaattagccgggcgcggtggcgggtgcctgtagccccatctactccggaggctgaggcaggagaatggcgtgaacccaggaggcggagcttgcagtgagctgagatcgtgccactgcactccagcctgggcaacagagcgagactccatctcaaaaaataataataaaaataaaaatacaaaaaaattagctgggtgtggtggcatatacctgtagtcccagctactcaggaggctgaggcaggagaattacttgaacccgggaggcagaggttgcagtcagccgagatcatgtcactgcactccagcctgggtgacagagcaaaactctgtctcaaaaaaaaaaaaaaattataagggacccaaaatatccaaaacagtcttgataaagaacaaagttgaaggatcacacttcccaattttaaaacttacaacaaagctacagtaattaccattgacattcttcacagaattagaaaaaaccattttaaaattcatatggaaccaaaaaagagcttgtatagccaagatgatcctaagcaaaaagaacaaagctggaggcaccatgctaccagactgcaaactatactacaaggttacaataaccaaaacagcatggtactggtacaaaaacagacccatagatcagtggaacagaaaagagaactcagaaataagaccacacatctacaaccatctgatcatcaacaaatctgaaaaaaaaaaaaaaaaaaaaaaaaaaaagcaactgggaaaggattccctatttaataaatggtgttgggaaaactggctagccatatacagaacattgaaactggaccccttccttacaccttatacacaaattaactcaagatggattagagacttaaatataaaacccgaaactataaaaaccctagaacaaaatctaggca

SEQ ID NO: 587816 - DNA, 4001 bp, Homo sapiens
ggagggtggctggagactgatgcagaagccccttcctccccacactccggggcaatgaggagcccgcgtgcaggtgcctaattccgctagccagtgggcgagggtcctgctggcaccgagggcaccaaggctggggttttgacaccaacgaaccccagccaggtgactggggaacgtggggagttcgacaaagagcgataggcttttgccattttttttttttttttttgagacggagtcttgctctgtcgcccaggccggagggcagtggcgcgagcttttgccaagttacgagacggacaggaatcgaggagattcccctgtagcgctctccaccttccggacagaaatcctgtagaccacgttcacttctccactccgtgcatcgcccgtggcccgtgggcagcagctgctcccctgggatccccctcgcctgtccgcgagctctcgcacggccgcgtccctgctgctggggtcgctcgctggccctggctgctcgccaggattttcctttgatgctgtcaagtccgggaagctcacgatgcacctcagtgcccgcgcgccgcctctcccaaagccccttccccactcactcccccacaagcgtggagggagatggggtaggtcgcggcgcctatagaccccctcccggcgcccactctctctcttccacttctctagcagcggtagggccgcagcgcacgcaaacctttccccaaaacgcccaccccactctcagctagccgcttctctcagggctcctccgcccgagctgggtgtggggatcgccgcgcacacagagacgggaaagccaccccggtcccggagcgccgcttccctagaggcccctggcccgtccgctcccccagcgctggaggacagccgcgcacacagaccctcccctccaacgcccaccgcggtccccagctgcagcctgcacctccacttcccgcccccagtctcccgccctccgccccctgctttccagtctccgcagtccgggcgcccagacttgtttcgacttcccagggcagctccgagggtgcggaagatcaagtgcccgggtttgttccaggaaaatcccggcggcgcctgcacgttaactgccctggcgcaggcgaagggtggagggcacttctctgttcattcggttttcaagagcgtgaacagaggctccgagtgaacgcccatacctagtcggtcttctagggtccacgcgtggggcgtccacttcctcaccctgcccctcggtgcccctgccctggttgcacttctcctaaaaggaggcgctacgattccaggaggctctgtctccttacccttcccagcggcgctcaaaccaccagccccgggcgcccaaccccttccttgtcctctccctatcccgtgagaaagccgacgcttccacccgcctggtctttccgaaatacgcttcgggtggtcaatgcgatttctagggtctaaagactagactcccgcgttccccaccaagacaccgacgcgaagccgcagaggtggaatcgcggacgccctggcaggcccgggacatattgatcctggtggcgcgatgcccctcttcgcacgcggacgcactcgcagccccactcccccaaactcgcactgcgggaaggaacccccgactcgcaccggctcccgccccgcagcaacggcgacaccctgaggtccggacgagcggcgcgcccctcccagcctcggccactttccagcacgaagcctcagggcgagcccgagacgaagaaagagagttcgaggaactgggatactcacgagcccaccgtccaccctgccggccggggaggaagccccggccggctcgcctccgtccgccgtgcgcatgcgtcccgcgggtgccttctcaatattgcagcgcggagggctgccctctctacgtcggcgattgctcaccgcgcctttcgcctttctccggctctcggtctttgctctagccctcttctcccggcctcttcctccccttgctctgcctcctccccgccccctcactccttttacccggccgggcaatcccacgtctcgcctccctccagcggcggcgcactccaccgccgcgggtgctaggggtacccccgaggccccacgcggggcgcgacctccaccccggccgcagccccactgctccagccccgcattagcaagtcccaagagtgtggatgcgaagccaggcgcgcgtagagggcgtccgcgaagccctctgtgtcatcgcctcccctcggcgcgcggggccgagcgagactagagtgtgctggactgcgtgctcggacctcgtgaatgaagggagcgggaggaaggagcgggggtgggcggcaggcatggagggggcgcttggtccccagagcttcgcgtctgtggactgcgcgtctctggagggcagccccctaccttctccccggcccggggcgcctctctgagctctgtccccgccccaccccggcgcagcctaggcctccggtcttcccgccctggaaagcggccctcgccccctcccagctagccagagcgcggaggccccacccagcaaccgagcgggggataagggggggaactaacccctgactccagatcccgctgagaccctcggcagtcgccctccgcgtccccttctccagggactccggagtccggggaaaggagtagaccagggggcagcgggagggggaacccagccgcccagctctccggactcgcagcaccgcgtgtccccgtagcccgcagcgtcccttcgggagtgggacccggtggggccgcggggttagttccctggagcccggagggctaagctgaagctggaaactgacctgacacaaaaataacatcacgtcatttcctcccttgcctgccgagagggcaggggagtgggagagcgagcgctgggagcaggcggaggcgcgtttgggggaggctcggagtaggcggaggagagcgacacgctgagagtttgaaaggcagcctcggggaagagcgagggctccctcccgttttcttggaccatggaaaggaaatggcccaggaaaaagtagcttggagtgtcttcccgcggggaggggcggtgtcccgggagccgccaatgtcccgtcctaggacttgcccagccacgtcccggccttcccgaccttgccaccctccctactgctagccccagcggagcgggtcagttggggttaggaagaatcgggagaggctggtgtcctggggaggctgggtgtggggcgtagtggagaccacggtactcaccggcataggcgagctctgcccagcggtggcgtcttcttccctgggcttggctaccggatgggggggcctcagcggacgaccccccgagggtcggccgggcagtgccagcgccgccccgagcaggagcgagaggcggcccggcagctcctcgtgccccctcgagagccgggcggccggcagggcgggaagcaggggggagaagtccaggcgcctccggggagcctcgggagggggtcgccggagaaggtgagagaagaaccttgcgaggctggaaagcgggctagaaaggaggccgaacagcttcggggcggcgggcgagtctgggagctgtgcaggcgggaaggactggggtggggagagagaaacaaaaccagcatacggttactgtggtgtccggccgcttagatggggctctttactacagaattttgaagcgttactttgggggtgcaagagaaggtcggtgaaagcagaaggaaaggcctatagttagattctttcccctcccactcctgtatttcctaactccgtgctacttgaagtgtggtccgtaggccagcagcttcgccaacacctaggagcttgttagaaataaagactcttgagccccacccagccaatgcatcggaatctgcatggtaacattcccaggggactaccatgcgcgctgaatgtgacatgcggtatgcagaagggtctgtgttcacatcgcctggttcttcagaatttgg

SEQ ID NO: 587817 - DNA, 4001 bp, Homo sapiens
agactggcctgggcaacatggtgaaactctgtctctacaaaaaatataaaaattagccaggcgtgctggcacgtgcctatagggacagtgactcagatggctgagacaggaagatcacctaagcccagggaagtcagggctgcagtgagttgtgatggggccactacactccagcctgggtgacagagagagaccctgtctcaaaatatgtgcgtgtgtgtgtgtgtgtgtgtgtgtgtgtgtgtatttttttttttcttaaagcagagctctgtcaacatggccagaagatggaaggaatttctgacttgttctgtgtacctctaccttcagtggctgtgtgtgtgtatgtgtgtatgtgtagatgtgtgtgtgtctgtctctcccagcaatggaccagagctctggaaaggtgaatgtgaaagccacccgcgcacacaggcttagccctttcttctctcttagtccctgctagactgtgaacttcttgagacttaacctcagcatctaggaccacactatgactatacaatcatgcatgtttgttgattgaaagccaaaagcaaataagataattagccaacaagagaagtaagtgctggaagacataaataaataatagaagtggttagagctcttggaatcagactcagatcttggtaggaattaggctctgacagctcctatttgtctgtgtaacctcaggcaagttcctgaaacactgtatacaatgggaattacaatggaacccagcctaaatgtagcactcacctaaatgacaatgtataggatatatttagcaaatacttttattacttcacctctctagaagtctgaaatgggagtatttagtacatttgtaaaggaatgataaattgaccactctttatccatcaacgccatttacttatgtttactccaaccaggaaatgcacagccacatcataatacagccatggagataaaactttcctctcatggagtcattaaagagtttagagaaattaaatgaggccatttatgtgaaagaactttaatgatgaacagcatccaccatacaaattaattggccccttcttaaaattatgtgccagataaagaatttaaaaagatcttgtacacagttattacaattgttactaaaccaaaactctggcaaaaaggaggaaagaaaacacacagctttcttctatgatctaatatttgctatttttttaaaggccaaagaaaaaaatagccccttgaaatgatacttacaaattcttcttctgtaatagttggtggctctgaaacaagacaaaatattacattatctccctcaaatctgatttcctttgagtaaatgaaatcatgggagacagcacctagccctacgttatacacaggcaaacgtagcacatttctggccctctgttcattctctgtacatggcttgcattttaagttggaattcaaggtggaagtgggaaggaaaggcctctggaatcctgcctggtcactaattcactgtgacccaggagttacccttcttcatagacggaaccctctattattctacgtacaatatgcagaattaagcgagataacgtggtgccagcataaaccggcgaggacgtgaaattcgtcataaaatccaacaggagggcagtgaagcccttttttctcatgtctgggagcggggataccgctaggagggcaggaggtaaagtccagaggctggcgcgtggtgcggccccgacgccgcgggctgatcctctgtccctgtggggccgccacctacccgcggtgagcctcttctcgggcatgccgtccccgctgcccgcgcctggagcccgcgcgggccgtcagggccctagcgcgcgggtccagcgcgggtcagggcctgagcgacgcggcgacggcgcgcgggctccggagctacgctggctagcgtggccggcgccgcgccggggttgctatggagcttagacaatacggccgcccagggaggccgaggccggccactcaggtgcctttcggggttcccaagctgcgacgggaacacccccgccgccccctaccctcccttcctcctcctctgggcagggaccagcgcggcgaacgaaggctgggggcggacgcgcgtgtggacccccagcgcggtcacccggaaggggcgccctggagacgcctgtgtccctcgagactccactggcagcgaattcgttactgtggtgaccgctgctcaggtccgttattcctccactacagcccgccagcaacggccagggaaacgcggtgctccacgggagggagaggccgcgggcatgcggggcgccaggcggccaggacggctggtcccgggaagcggaggaagcagggaagtcaggcctccagttttcctcattcctcaggaggccggcaacacgtagctcttgatctccatcacagttgtatgaaatgcttgtgtaaaaagttaaataattcgcggcctataggaaccgcaaacttccccaacacgtgtgtgcccatcaggactgctgcattttcaagatagctaggcttaaaaattacccgaggaggcctcatgttcacctaacgtggtaccttcgtctgttaggttactcaagactcaagccagaaacctaggagcttttccctgaaacttactgcccgacccccaaacggtcttattcagtcaagcactaggtcctctttattctgccttagtgtttctgaaatctggagtctcctttgcgctcctgctgaacagttgtaaaaactttttaatggtttttcagtctttgcttccagtggagttcagcttaagcccattctccatgatgaatgcaaaatcatccatctgaacgcaaatctgacctgtttaaaaccttcggtggctttacatttgcctcctacattgtaggaatactccaaggctggcaggggccccacaggtatatgaatgcttaacaaaagaataagacaattagtgcttgtattgcaaggaaacgtaactcccatctagttgtattcattgccttttccctattacatagaaaaagacaaaaataaaccactatcttggccagacaaaattagaggaccaaatgaagtgacgggatactggcagaagataatggagaggtgggaggtggggggttgggggacaaatcacaaagggctttgtgggcccttggtaaggactccaggtttcattctgagtgaaatgcaaaccatagcagagtttgaacagagaaatgacatgactttacttctatttgaaagaatcgctctgggtgctgtctagagaatatattaatattagcatgactcgaagcgggcaagagctaatcgtagctcagaccgggtggttcagaacaagcagtacaggtttcagatagattctgcagacattttaacagtagacccaagaggatttcctgacaagttggacatgggagtaaaacagagtagttgagaatgactccagatttggtctgaacagccagaaaagtttagctgccatcaacagagttggggaaagctgtgagtggaccacattgagagggagagtttaagaagtctattagccaaaaccaagttgaaaaacatgcttcaggatatcatccaggagaacatcaccaacctagcaagacaggccaacattgaaattcaggaaatgcagagaaccccaggaagatactccataaaaagatcaaccccaagacacataatcgtcagatgctccaaggtcaaaatgttagaaaaaatgttcagggcagccagagagaaaggccaggtcacctacaaagggaagcccctcagactatcagcggacgtctcggtggaaactttacaagtcagaagaaattgggggccaatatccggcattctcaaccgaatttccaacccagaatttcatatccagccaaagtaagcttcataagtgaagaagtaataagatcctcttcagacaagcaaatgctgagggaatttgtcaccgccaaacctgccttgca

SEQ ID NO: 587818 - DNA, 4001 bp, Homo sapiens
gtggaagtcccacgaaacaggggtactgaagctacaggaggagaagaggagctcacccagagaaagcccagagaacagaatcctgaaggtcaatactttcatgagaaaagaaaaagagaagccagaaagggggaataataatgaaagataagagaactcggagacagtgaaaccaagccaagagaaagggaatgcctagagtcttcaggctatcatgagttcaaggatggggccaacacctaaaatagtgaactgttcaaacagtaagtggcgtgttgttgagtagtcttcagcagcatgggaaaagatttgctggcttcagaaatgctcacctcctgctggaactaagagtaaattcaggaaggcctggagcagcttaaagaaatttcccattaaaagcagagctctgggcctggaacagtggctcgggcctgtaatcccagcactttgggaggccgaggtgggtggattgcttgagcccaggaattcgagactggcctgggcaacatggtgaaactctgtctctacaaaaaatataaaaattagccaggcgtgctggcacgtgcctatagggacagtgactcagatggctgagacaggaagatcacctaagcccagggaagtcagggctgcagtgagttgtgatggggccactacactccagcctgggtgacagagagagaccctgtctcaaaatatgtgcgtgtgtgtgtgtgtgtgtgtgtgtgtgtgtgtatttttttttttcttaaagcagagctctgtcaacatggccagaagatggaaggaatttctgacttgttctgtgtacctctaccttcagtggctgtgtgtgtgtatgtgtgtatgtgtagatgtgtgtgtgtctgtctctcccagcaatggaccagagctctggaaaggtgaatgtgaaagccacccgcgcacacaggcttagccctttcttctctcttagtccctgctagactgtgaacttcttgagacttaacctcagcatctaggaccacactatgactatacaatcatgcatgtttgttgattgaaagccaaaagcaaataagataattagccaacaagagaagtaagtgctggaagacataaataaataatagaagtggttagagctcttggaatcagactcagatcttggtaggaattaggctctgacagctcctatttgtctgtgtaacctcaggcaagttcctgaaacactgtatacaatgggaattacaatggaacccagcctaaatgtagcactcacctaaatgacaatgtataggatatatttagcaaatacttttattacttcacctctctagaagtctgaaatgggagtatttagtacatttgtaaaggaatgataaattgaccactctttatccatcaacgccatttacttatgtttactccaaccaggaaatgcacagccacatcataatacagccatggagataaaactttcctctcatggagtcattaaagagtttagagaaattaaatgaggccatttatgtgaaagaactttaatgatgaacagcatccaccatacaaattaattggccccttcttaaaattatgtgccagataaagaatttaaaaagatcttgtacacagttattacaattgttactaaaccaaaactctggcaaaaaggaggaaagaaaacacacagctttcttctatgatctaatatttgctatttttttaaaggccaaagaaaaaaatagccccttgaaatgatacttacaaattcttcttctgtaatagttggtggctctgaaacaagacaaaatattacattatctccctcaaatctgatttcctttgagtaaatgaaatcatgggagacagcacctagccctacgttatacacaggcaaacgtagcacatttctggccctctgttcattctctgtacatggcttgcattttaagttggaattcaaggtggaagtgggaaggaaaggcctctggaatcctgcctggtcactaattcactgtgacccaggagttacccttcttcatagacggaaccctctattattctacgtacaatatgcagaattaagcgagataacgtggtgccagcataaaccggcgaggacgtgaaattcgtcataaaatccaacaggagggcagtgaagcccttttttctcatgtctgggagcggggataccgctaggagggcaggaggtaaagtccagaggctggcgcgtggtgcggccccgacgccgcgggctgatcctctgtccctgtggggccgccacctacccgcggtgagcctcttctcgggcatgccgtccccgctgcccgcgcctggagcccgcgcgggccgtcagggccctagcgcgcgggtccagcgcgggtcagggcctgagcgacgcggcgacggcgcgcgggctccggagctacgctggctagcgtggccggcgccgcgccggggttgctatggagcttagacaatacggccgcccagggaggccgaggccggccactcaggtgcctttcggggttcccaagctgcgacgggaacacccccgccgccccctaccctcccttcctcctcctctgggcagggaccagcgcggcgaacgaaggctgggggcggacgcgcgtgtggacccccagcgcggtcacccggaaggggcgccctggagacgcctgtgtccctcgagactccactggcagcgaattcgttactgtggtgaccgctgctcaggtccgttattcctccactacagcccgccagcaacggccagggaaacgcggtgctccacgggagggagaggccgcgggcatgcggggcgccaggcggccaggacggctggtcccgggaagcggaggaagcagggaagtcaggcctccagttttcctcattcctcaggaggccggcaacacgtagctcttgatctccatcacagttgtatgaaatgcttgtgtaaaaagttaaataattcgcggcctataggaaccgcaaacttccccaacacgtgtgtgcccatcaggactgctgcattttcaagatagctaggcttaaaaattacccgaggaggcctcatgttcacctaacgtggtaccttcgtctgttaggttactcaagactcaagccagaaacctaggagcttttccctgaaacttactgcccgacccccaaacggtcttattcagtcaagcactaggtcctctttattctgccttagtgtttctgaaatctggagtctcctttgcgctcctgctgaacagttgtaaaaactttttaatggtttttcagtctttgcttccagtggagttcagcttaagcccattctccatgatgaatgcaaaatcatccatctgaacgcaaatctgacctgtttaaaaccttcggtggctttacatttgcctcctacattgtaggaatactccaaggctggcaggggccccacaggtatatgaatgcttaacaaaagaataagacaattagtgcttgtattgcaaggaaacgtaactcccatctagttgtattcattgccttttccctattacatagaaaaagacaaaaataaaccactatcttggccagacaaaattagaggaccaaatgaagtgacgggatactggcagaagataatggagaggtgggaggtggggggttgggggacaaatcacaaagggctttgtgggcccttggtaaggactccaggtttcattctgagtgaaatgcaaaccatagcagagtttgaacagagaaatgacatgactttacttctatttgaaagaatcgctctgggtgctgtctagagaatatattaatattagcatgactcgaagcgggcaagagctaatcgtagctcagaccgggtggttcagaacaagcagtacaggtttcagatagattctgcagacattttaacagtagacccaagaggatttcctgacaagttggacatgggagtaaaacagagtagttgagaatgactccagatttggtctgaacagccagaaaagtttagctgccatcaa

SEQ ID NO: 587819 - DNA, 4001 bp, Homo sapiens
cccaacacttgggagaccaaggctggtggattgcttgaggccaggaactcaagaccagcctggccaacatgatgaaaccctgtctctactaaaaacacaaaaattacccaggcgtggtggcatgcacctgtaatcccagctacttgggaggctgaggcaggagaattgcttgaacccaggaggcagaggttgtagtgagccaagatagtgccactgcactccagcctgggcgacacagagagactcagtctcaaaaaaaagaaagtggaaatgttttcttgcttcaaggcacgtgacttttaactcaattgaaggaaagtatgcgtgtattgatagagatggccatcagaggaactgacaggtcttagcagttacagatgagtttcctctagaggtcagggaagagggagaagatacaaagttctttaacttacagtctgaggcaaaggtgaacttaacagggccagcaagatccttacatggtgaggtaagagggcccaaatcagccaagctgccacttctgcagagcccgtgcccttctccacctgtgtcggtggaggctatcagcctcagccccttgtctgagttatcatagcctcgctagcatctgtctcagccccaacccttccaaaagccagggtgacccattcagctactcctttgcgaggaagtgacagcagcctggctgggttgtgggtgggggagtggttgggggtctctgttgccctggaaggaattcctacagtaagcctgagagctcctggccaagtgtggctacagaaaggaacaaaatttggggggctgagggcaagagagggagaggattagggatgctgctcagtttctcttgataaatggatcctgctgcctgaaggatggggagctcccagagttgggtggagccatgaatgggccacccaggacgtgggagtgagtagtaagaaaagggggaaggaggtcaggtgcggtggctcacgcctgtaatcccaacactttgggaggccgaggtgggcgggtcacttgaggtcaggagttcgaaaccagtgtggccaatatgctgaaaccctgtctctattaaaaaaacaaaaaaattagccaggcatggtggcaggcccctgtaatcccagctacatgggaggctaaggcaggagaatcacttgaattcgggaggcggagtttgcagtgggccgagattgcgccattgcactccaacctgggtgacagagtgagactccatctcaaaaaaaaaaaaaaaaaaaaaaaaggggaaggagcaggacaacagagatgctggagagcagccttcagttggggaggggcaggagatagagtgggcatgagggcctaggcggccctttatcacaagctgttcctgtgttccccttggccagtgacccctctggatggataggattcagtgggttgtggggggtggggtgcagtgtcatctacttgatcttgggggccttccgttccgtcctggccagggtcacaaggagagagtggcatccaggcctgccgctggcacatggcgactggtgacactccccctggacaccctcatgacgagtggaagccctccacctcctgccccagatctggctgccacaggttgctgctgggccacagtccaggggccaccgcaccttgatggggaagattcctgattgctgattgcccccacccctcgtgctcccttcacacatccctcctttggaagaaatctgattctgagaactggaaattgtgcagtgctgtgagtgaccaggtgaagataggttagagaagccagggcttggagatccctctcttttccctgggcacagagcaagggcccaaggattgtagacttacctgccacctcgcctctggggctctgctggcctgtcactattccctgtcctgaagtagtgttctcgaccaggtctgcaggaagaaacaacacaagggttttaagggctgggatccaaagtccagcttatgggaaggcaggtgaaggacatgattcctgtgaccagggggccggcctgctggtcagttccctcctcctccagggctgtgcaaagcccagagataaaccctgggccagaggctttgttccccgtccagggctgtgcagagcacagagataaaccacctagaccggaggccctgttccccatctttggccaggtgagcattcttgatgcctggcccagcccctggccctcagggcactattttggtccacatcctgctcttattgtcctggcctgttcttctcagcccctggtgactcacactgctttggaatttcactcactggcctttctgacgcacatcttgagagcctggcctacagccagggaacaagttatggcttcaaccccaccagtaattaattctggctacctgagctagaggccatggaaggtggggagagggaaggccacgaagaagcaaggtaggggtggttgctggttgatgggaggaggctttgctcctacttctgctcacctgcacacaggtagaaaacaaacagcagaaaagctatcggctcacagtggccggacatccggggctggccagccgggagacatgtgaagcaggactgatctagtgtaaaatctagactggccattatgcttcttggagtggatttctggaccttagtttacctttttgtgagtcctataggtttgatagctcctgatttgggatgctaaggacctttatactgaggtgatcatgcctccatgtcactccaaattacttgagctctgttttctctccattttcaatatgttttgacgggttggccctggatagaattctggagaagggaagagagaaagaaaattgccataacaatgcactgggggccaggcgtggtggctcatgcctgtaatcccagcactttgggaggctgaagtgggtggatactttgagtccagtagttcaagaccagcctgggcaacacagcaaaaccccgtctctacaaaaaattagccaggcatggtagcccatgactgtagtcccagttatccaggaggctgaggtgggagaatcatctgagcgcaggaagttgaggctgcagctgcagtgaggcactgcacacctgggcgaaaagagtgagaccctgtctcccagaaaaaaaaaaaaaaaaaaaaaaagcaatgcactgggctgggaatcgaagacctggattcatttccagcaacccattccctggcaaccccttaccaagtgcctcatcagttaaatacgaaagagagagagagagagagagagagagagaagtccaccgtccttgcagtgttccctcccatgggtctctgatgttcgctgcagtcactggcagaggccccctggttctccactcctctggaaggcaactacttttcccatctcttacttaactgtccttgacctgcttcccccttccagcttcccaggcttgaggggtcccagccttgctcctgcgcctgctagcacctctgttgagaagggctttgtgccgcctgctgggctgactcctgtgggtgcactggtgggtaggccaggggagagcctgagtgggttctagaaacaatgcccttacatgtaactccagcccgaagagtgactccaggcagaggaacggctggccaggtcaggggcattggagtgcctgtgaagacacaccctgaggtctggtcaatcctctgccttctcatcaggcaggtctggctgggaatgttctatagggaatgccggaaaagcatgcttccagccctccatcgcaccttcctccctgttgggaaaagggcttgtggggcgcctgcataaactggccataaaaatatgggacaataagttgtggaaagccacaagaggcctctgaggaggaaagcctcctaattgccatcatgttcccatgctcagagcgagacctgctctcttatctataaacactgtgttcaaggagaaagacactcctttgaagcattggaatgtggacagacgtgcagcctcctagttaa

SEQ ID NO: 587820 - DNA, 4001 bp, Homo sapiens
atcataacttgagatctctgcatgattcccacggcaggccagggtctctcccacggacaccctgttccctccacccacctccagagaccagctgaatgccagatgccagttgacatcacctttcacctgtcctggcaggaccatagcccctgtggagcaaggagtaggaagacagaactcccgtccacccaaagtcatgaagcaggagagggtggctgctcggactgtaagctagagccaatgccctttctgccttgggagaaaaagccagctcagcctggaagcctcaaccaggctggactgtgtgaattccaaggtgtagtgttgattggggtggaagggtcttggacaaaaatgtgggtgtcaaatgaaattgcacccccacagcccccgccccgccccgctcacactcagtgaactgtttcaggcagaggcaggagctttgctggggaggttccctcaattcccagccctgctttttgcatgcagttccctctttcagcctttctccaaatcaaagtccttccccatcatttcacctctagggctgtcatggttggcgccccaatcagttccctcttatcatcagagttcctccaagtccccaccttctcctaccagtgccccccagcccatcctctgcagccccttgtcactgtcaagccgccccatccatgtcccaccctaggccgtctggggacctctgcagacctcctcctcaggccagcctgcgaggagctccagcggttcactactcacagctcagatggcagcattccccacgctgtatgaggggcagaccactagcaagctgcagccgccggcctgtgccccagttgtggctaaaaccaggcctcttcccagccagccctggccaggactgccccgggacccccactctgctattcaagacagcctccagcccctggtaccccagctgaggatctggcacgtcccttcatctttgcccatctctccaatgccagatcctggaaaacagggccactcccagaggccaggcttccccaccagcaagcaaggtgctgttgggccttctcatgcccatccctgtccccagctgttagcacccggcaggcagcagcgtctcacagcacaggaagcctcccactcccttcactgcgccctcccaccccaggccctgaggagtccattttcctctattcaggtgacttctcaaggcaggcctgggtgggagacaaaagctcctggcctctttctttctctgcctcctccattccgttacatacacagacacacagacacacacacacacacacacacacacacacacacacacacacacacacacacacacacacacacacacacaccagccctctctgcccatttgctgcagcttggaaacactggtgtgattccgaggagcagttcagcctgagcactgactccccccattgctggcttcccaaatctgcttctgctggtgggtctggcaatgtcctgccatgtgcctggctgcgtggctgtagcccaagggcttcctggcagcatggaggcaggttccattctacaatctcctgcccctgcccaaccccagcatctcttccctcaccaaatccctcttgtgacccacctccccagtgacataaacccctggaacctgtccccagaaggcaccccctctatgcctccccacaccaccctcctccaggccatcacgcggctgctgttttcctgaagccgggcagatgcctgcctgtgaacaggaggcttttctggggaaagagaaacctccatcctggctcttagcaaagcgcagcaggctccccggccagtcccaccagcgttgctctccctgtggctgtgaaggccccttcccagtgccagcccaacgcagaccgcctggctcagtccatcctccaacctgcaccttccctttgcttcacaggcagctttacccttcaacactttgcaggctactaaccgcgctttcatggcacccctctcctggaacactacagcctctgcggagcccaccccatgggccttgtgacatgagctccgccccccatcccctgccatgtgcaggctggggcacgtggtgttcctaccctgcagctggggcaaagttcagaaccagccatgagcaaaagcagaggcatttcaagatgcagagccccagcagggtgaaggagctgaatctggaaagcctagagtctctcagcctccctgtccaggccttaagggacaccatcaggtccccacaaggatacaggaagcttctgggactttgcacaagcagttcttcagtccgaacactctatttctactcctttcaccagataaatgtgtactcatctttcaagtctcagcctagatatcacttcctccagcaagccttccatgaatactttcttacacttgacaaagtgtaactttcctgttcttcccctgtgctcccctaataataccaatcacaccaatctatcattgggttcttctctgtccttgattgtactgagaactccctgggaccggcaggggagctttcgtaagagccaggatgcagatttctctttcctcagacaaggttcctgctcacaggccaggaagcaacactataatgcttgttcaggccgggtgtggtggcttatgcctgtaatctcaacactttgggaggccgagctgagagaatagcttgaggttaggagttggagaccagcctgggcaatataataagaccctgtctctattaaaaaaaatttttaaaaaagataatgcctattcgaaaaggtattttgaacctggcgcggtggctcatgcctgtaatcccagcactttgggaggccaaggcaggtggatcacctgaggtcaggagtttgagaccagcctggccaacaaggtgagtccccttctctactaaaaatacaaaaattagctgggcgtggtggcatgtgcctgtaatcccagctactcgggaggctgaggcaggagactcgcttaaacctgggaggcagaggttgcagtgagccgagatcacgccattgcactccagtgcagtgggtgaagagtgagactctgtctcaaaaagaaaggtatttttttttatgttggtctagtgcttgcagtctagtgcttcaacaaacaatttgggagttgcttaataaatgctcgatggatgaatcaatgtttgggaagggagagcacagtacacagtagctactcacatgctgtctgaagaggtcttctgggggccatcggggccttttctccaggcttgcatcgctctgtgttccctccaggctcctggttgtgaggaacaggagtggatggggcggggcaggggagacagaggggagaaagggaatgagcacaccgcgaattactccaaggtcgctcagcccagatagagggccctactcaggacaagagagcggcccctgatgtccgggtccagcgcggggtgagaccccagcctgggggccaagaccaaggccacccagggagtcaagggactagatgagaggccgaaactggggtcctggtgcatcatgtgcctcaggcatttgtggatactgagctggtttggcgatttggaaaagagcggtcagtcatgcatcggaggcctggattctgcctgcacaaagctgcttgacactggacaatatccttccctctctgggcctcactttctcatggacaagggccaggtcaggtgacctccaagactcattctggccctgatatcctctgtgcgtgcccagcatggaaggtctatattttcttggtcattcttttcattgaaacatctcctgacccaaattgagactcagaaaaagaccagctgatggccagcatggctgagaatggaaggaggaggtattttttggagagagagtgaggattaaacacatggtaagagacagaaagagaatctaattctgcaacgtccccaccttcagtttctttaaatggtcagtcacagtcttgggaccagtttagccaaagaaaagtctaga

SEQ ID NO: 587821 - DNA, 4001 bp, Homo sapiens
atgctagattgcatatctatatgtgtaattatatctgtctttaagatacagactggcccaattcaagtgttagaactcttagtctaatcaggcctgtcttaaaggaggatcctgtcctggagagagtgtgccaagagtaatataatttttgccctaggatgttgctgatgttgtatcattgctgatgtatggtgatacagcccactcattgctgatatatggtgatacagcccattcagtgagcctctcagcttcccctctccctccggctctctcttcttccctgactccagactctccctcacaattgcctcatccccactcaatcaacctccataaactatgacctcctcaccacccagccctgggcatcacaacccccaactcactcctcttccatgacaatcgcaaagtcactggcatgtgttccttccatccctgtcccatgatccctgtgcccctccaaaaacagcctcctgcccaccgctctcccagctctttgtacttggtgcaagccaaaacccaaggtgtgctgaaattagctacaaacctcgtgctctcccagtcccacccccacacccctacacacactctttgcagagctcagaaagggcccctttccctcccacagctgataggaggcttgttcatctgtggctgccctagtctggttgtcaaggaaacaacagaatctccctgggagcctggcttgtctcctagcaaccagtatcccacatcatcttacaaaatgggaatgggaggaaaatcctgaaaatgaaggtaaaatcaagggagatggattgaatggagaattggaaggagaagaacaaagagagagtggactcctaattcggggaggctcccacgggggtcgctggcattgcaagaagccccgtgcagatccaacagaaagcaaggcccaaagggaccctgaatggtcagattaaagaaatgcaagcctaaacacagataagccccctcaaacctaaaatgtggacacatcaccaaacaccgccaaagatctccccagtagtttcacagaactcagttacatagactgcaatggagttgagttcaaagaaccagctccggaaccgccagcaaaacaccccaattccactgttgttttgtgtttgttttcttaacagaatcactcccaccactctggaccgtttttccttttttctgacacgctactctgcacacacacaaaatagaaatttaaaaatttttaaacatcgagaagggggaggggcacgacaggccgaagcaatcaagtcatcttcctttccctagaaacaccggaaaggattaggctccagccccgctgtacccagcagccgaagccagagcccagggactagcggggcccggggaacgtagcgaggggcgcggcagggcagggagggcggagcggcgcgtctgcaagggctgctggccaccccgccataaccgcaagcagccatctacttacaccactacatgtgacggggtggcttctagcgtgaggaacacatctcttcctgctgagcacgctcattttagtgaaatgtcaggggtccctccgcgcctgcaagttgggacgacgccggcgccgccgcgctgctgctgggctccagcctcccggccagctcgcggccactcagaaactccggcagggcagcccaggccggacgtgggcccaggagcggacgcgcgcgctgcactgcagccgctgccccttccggatcagcatcgccccgcgcgccaggcgcccaatgtcacggcggcgcgcggagccgggctgcggaggcagcgggcggcgcgcaggggcgccgggagaggggcgaggccgccgccgctacgcgcccgggcccgcggcgaaggcgctgccgcgaagacgcctggcgctgcagtcccaggtaccgctcgcgacctccttttttcattcacaaaaaaaggatagggaaaaaaaaaagaaaagaaaaaaacgggagggtaaaaaaaggaggagaaaaaaatcgcacccaagacgacagccgtgacgggccccgcccactgccgcgcgcagttggtggaaagcgttcggggggcggggagggggcgggcgggggaagaaggggattggacgccccgcagatcccgcctcgcagcaccgctcccgcccaccgcccgcgctcttccgcccctcccgcagcgacgccgcggggagggtctcggctcgcgggtctgggtggcgccggtccctccacctggcgaggcgcaaaggctctccggacgcccacggggttttcccctttccttcgggaggcgggggagaacctctgagaggcatcctagtgcaccctggaagggatgctagttggaggagaacgtgtggttgtaagcccaggcccccaccacttgcccacggggaggcgacggcaggggcagtcgggggggcggggggcgggggccgggtagggacgaataaccggcgtttccatacaagccctctgctgctttgggaattttcgtggcacttgagagccttcctccctccatggcccttaatgagttgtggggtgggtacctgtaccacgttacctgtctcccacctaggccttcttcagcgggtccccacctccatcccatccccctcctgttgcctcctggagttcagtaatagctgctaatctctgaaagaaacaccatgaagtgagtagcctcgaaaatcgtccctaagccttctttgggttttctgcctcaatttacccctctgtaaaatagagagattctaaggtataacatctataacctgaggggtccctagaagacactttccatattcaaggctggttttatcaggataatcttttttttttttttttttttttgagtctccctctgttgcccaggctggagtgcagtggtgcaatcttggttcactgcaacctccgcctcttgggttcaagcagttctgcctcagcctcccgagtagctgggactacaagtgcacgccactattcccagctaatttatgtatttttggtagagacggggtttcaccaccttggccaggctggtctcgaactcctgacctcgggtgatctgcctgccttggcctcccaaagtactaggattacaggcgtgagccaccatgcccagccaggatgatcttgactgctagtgttaagtagtcagctcagtctggtttgattcatctcctcagttacctctggacaatttttaaagcccagaccagcctgccacccacctgaaccgcctccaccactcctccatcttgtgctctgaaaatgcaaatccactctaatattagtttatgcaaaatatgattaggaagagaaatttactgccaaaagaaagccgggttaaaaatgaattttgtgttgtctgaagcatgcttctcatctgtgaatgcatatacttggaagctgtccctcaaggtgtttgtgatcaacgtgcctacctacctggtcaatgtacaggaagtgctcggttgttggaggatgcttctcccacccctttctcaatctactcagagctagccaagaggttaacaatgactgacagtgctacttacttctcatttctggttagaactcaccctccataaaccagaaagtacttatttgaatacatatttaggagagaaagtaaaccatgctcacacatgttcttcctccacatgtttggcattgaagagacttaccccatcttctgtgtgccaaagagcccctgcgccagagaaaatcataacttgagatctctgcatgattcccacggcaggccagggtctctcccacggacaccctgttccctccacccacctccagagaccagctgaatgccagatgccagttgacatcacctttcacctgtcctggcaggaccatagcccctgtggagcaaggagtaggaagacagaactcccgtccacccaaagtcatgaagcaggagagggtggctgctcggactgtaagctagagccaatgccctttctgccttgggagaaaaagcca

SEQ ID NO: 587822 - DNA, 4001 bp, Homo sapiens
ccttctgcatacagccaggctgtattccttgtggtcctcccccgggagcccctgcagcccctgcgggagggacggcagctgggttggccaccctgggccgtgccaggcttctccccttcccagcttggcagccttggccacttactcaccctgttcatcagacgggctgaggcccagggcttgggaggcaccaatggcaggactccagctgtagcactggccctggcaccaggtaagcgcttgctggaagcctgctctcatcacgcctggggcaaatacaagtcacccagacctgtccacagggcctcaggcccaggtgtggcctctaagtggatgaacgaccgacccctgacccactgaactctgagctttagggccagtttgggggccagcctgatgggggtggaacaggcctcactctagcccggcagcaggcatcggggaagactttccagatggcaggacagcctgagtggtgcgcgtgtgacacagggcctgcctccgccccactgccacctcccacgggcccctccccagtaccctgactgtggggtcatttctggacgctgtgagagacacggcagcctggaaacagcttctccccaactttccaaggtggcagcccagggagggccaggacagggagcccaggcacagcccccagcctgaaaagcgtcacctccggagccctctgggacatcttgtttgtacagcctcccaaacattccacccaaaacaacatgtgccgtcccaggccacctgcaggcatggccgccctgacagagcaagttcatagggggcaggcacaggctgcctctttccctccagtgcccaggaggtgctgcagcctctggcacgcctcggggtgggcaagaagggcgtccttgagggctacggtcagcatcaccagcccagtgacctgaagccaaaccctggctgatagcaccgcctcctcctctaggagacctaaccccaaacaccaaagccgagtagaaccagcccagggacaacacagtctgacgtcccagaggggaggagggccgcgcgctatcaaaggctcacccggggcgaggagcaggagcagcccgcggctgaaagcccgtggcgggcgtgggcgcccagggcctggcaggaggactggggcagcctcgagctggtccgcagggaacaagcaggctctgggctgcagagcaaggcccacagacgtcccctccttcccaggcacagactcagcaggtctccacagccctgcccacccctcccacttgcccagtcagcaccccgggttagggacttcagaagggaaggaggtttgggaagtgagaagaggccagccgggaagacctctctcggtttcccatacccaggaggcttcgctgcccgctgctaccagtgcacccaatgggcatgcagttcctgagcggatgcagagggaggaccgaactagggaaggaggctgtacaggtgccggaaaggaacacgatggcgggtgtggggagggcgctcacagagcccagccccacatccgcccagaagggggacacgaggagggcgtccccccaacccgcttcagcggtgaggatgatccagactttggctgtccgcatttcccggctcacatgagtggcctggaagcacctccaccgagctcagaggaggagggacgcaggctctggcctcagtttccctgcctgcgtccgggccgaatgagacgtaggaggggggcgcccggaacgcgcctcgagggggggcaggaaaaggccgggattccgggcccctcctcccgccgccgcgccagttctgcgcacctgcagccgcgggctctcctcgccggcgcccgcgccgtccggcctctcctccaggatcatcgccgcacccgctgcgctgggggtccctcggggtcagccagcccgccgctcgcgcagcgctccgcagccgggctagggccgcccgcaccacctgggccgcgggctcctgagtgcccgcgccggtccccgactgtccctcctgagtgggggcggcccgcggcgcggctgggcggggcacgggtctggcgtgcgaagctggccattgcccaataggcggcaatgccgcttcgacggacagctatatcagccaaccagagttccaggaaggcgggctctggacggccagctccgcccgcccgcgggacggtaacccctggcaaccgcggccggaacgcccgcggctggctggcaggttgtactgcgcatgcgccgcggcggccgctgagcgtgcgggagaagttcgggaaacggagaaaaaaactatacggaacgtcccaagctgagagtcagggcggacctggactcggcgcgcctagctcctcggctccctttgcggggactccaggagtctgcccgctcgcgccgtttcgtcctgtcaccccggcaacgggaccctctaagaggcttgttccaaaaatgttcacaatggggtttttaaaaacggttttgttagggacaagtgcttgtgtgagtcctccgacaatgcctgctttcttctctctgcccgcggagcggaggctccaggcctggccccagtccgaggcgcctctgtcggtgtcgtcctgcttccaaaaccggcctccagaacccgcctccttccagaacctccgtccagaacccgcctccctccagaacctccgtacagaacccacatccttctagcacctgcctctggaacccacgtgctttcagaactacctgtttgtagaacttgtttccagaacgaacctgctttccgaatctctttacttccagagcttgtttcctggactgacctattttcagaacctactttcaaaaccagcttgcctccaggaccacctgcttggagaactggcctgcagccccaggactggacgacctgagactgcacagctccctgcggggctcacccggctgtgtgtgtccttccgggccttccatacttccctaggtgtctggtgactccggagcccgctcggatttcgtgtgggtctcgcctcagctcagaacacaccctttgaagagcaggaaggccagggcacaggcggtaaccacggctcctggtcatcaagttcctctgaagcccaggtcttgtccacgttcactgccccaccacaggcccagcggagccttggagctgagccctgggatcattctggtgcctgtgctcccggctccgcaacaagcacacaggagcctgtcatccccagatctaaatcctgaaggctaagctccgtggtctgccgcagccatctgcagcaggcccctcccagcaacagccttctcataaggcccctgccagccacgcgaaacctcctggctagggcctgtcttccactcctggccttttgagacagggcctcactctgttccccaggccggagtgcagtggtacgatcacagctcactgcagcctccacctcctgggctcatgtgatcctcccacctcagcctcctgaatagctgggactacaggcttgcaccaccacacccggctaatttttgtatattttgtagagacagggtttcgccacattgcccaggcccaggctggtctcaaacttctgggctcaagcaattcatctgcctcaacctcccaaaagtgctggattacagggatgagccaccatacccggcttttttttttctttctcctggccttttggggcccttgaagtgtctgctccctgggagcccttcagcttgtcgtccacttggtgggttcccacccgtccttctcacttctgcctgaatcacacaggctacatgagaccttcacccacccccttcgccagcagctctgtggttcaagtttcctcaaggttaggggctcctggccatcttacctgtgggcctgagcatgggccgatgcttccaaagttcacactgggtgcacttgtgtggggacttccatgtgagtcatctccttgcaggctgccaaggtcctgtacagcagagacccaaaccctcttagcagtcttcagagtcagc

SEQ ID NO: 587823 - DNA, 4001 bp, Homo sapiens
ttttggccgcactgatttttatcaattatagtaaaaggcattaagttcacatatttaaatatcaaactgcaagtcatcaaaagcttggcattgttagtatacaaaaaaaaagttaagcacagtaagaagtatgctcaaaaagcttctaaaaataatgctttattcttctattagttagagtaaactgcttaagtctcttaatttcttcatatctgaaggctgttaataaataacattcccaaataagtattcaacgccagaaattagctttcatgaagacattcttaatttcagttatttcaggaacatatttgctcttttagccactcaatattttgtgagaaatagtatctttctctaagatttgtgaatatttgatgtttgctactataaattatttaaagtggtatttttcattaaaatatgaaaatatatacctattgacaatgaaacctgtttctttattagtacatgaaagactactaaattcaacaacctgcttttaaaatgtacctgaatagaggtgagtgtattagttccttcacagaggaactctacactttcaattgtatatttctgtggagaatatgggaaacgtatacttgacaaaacgcaaaagaatcatctgaataactcatttcaagtaaaaagaaaaaagccaagctggaaaaacataaaaaggttacacatcttctgaataacctctttcacaaagtaactgagaaatcaaataaccataaaacattcaaaagcaaaccttgtagaaacaaatctctttgctacgctaaccagaaaagtagtctcagagctaaagataaccctgtctggacagttccctggtgctgaagttccagagccggtaaacgcatgcctgggtgctgctttcactcctaccaccctcagaaaaacccggcctgccaagaccgtgagcaagaatagtagaacttcacaaggtagggagcatcccaaactgcagtgatggtaggaactggagtctcttcaggattaaacagatttactagttgcaaacaggaagagcagcagagtgcagggtgttagcactcgccgagggggaggggctggaagatggcggcggacgcacacccacccgaccgcgacagagcttaggcccctagcccgcgccgccgcccgctgctcgcagccactgtgggcagccctgctctgtcccgcgttgctggtagagccgccccgcggaggcgtgggaccagggtggcgtccgcatcccctgccagcgcgccttcgcccgggtccgtccagggagcacctgtgcacggccatattggattctgtgccccagtcactgcctcagcgcggcgggaaaggagagggtacgcacagagcctgggttcagccccagtcccgctggggccccggagccaagatgaccagcgaggaaatccggaaaggcgccaaggaaaatcacaccgcctaaggctcgccaccctcacctcagccggccttggcgccctccctccccgacacacacccctgctctcagacacccctaaaacagcccgggcggccggcgctggccgcagccctcgtggcctgggcgccgccagcgggagggagggcggcgaactggggcgcgcaggcggccgcagggcagtgggcgagggggcggagggcagggagagaggcgggaatatggagccaggtccttacttgagcacggactgctccttctcctcttctttcttctgcctatccatgacggccaggatgattttcctctcctcctccgtgaggtggctgaggtcaggcatctcgggctgcagaggcggctgagaggccgccgggatgggagccaggcggccccggggcccgacaggagccgacatgtttggtggagccgaaccaccctagggaagcggggaggcaactccactggcagcggcggcaccggcgcggcggctggggcagcctccagcgctgggacaaatacatacaaatcaatggccttcaatccaaggcgacagcccccctcccccaagaaaagcagggggaggggagggcgagcgcgtggggaaggagggctgaggagtgcgcttcgggaaatgtttcttcttcccgggggcgaagggctgtgaagtgagcggttcaagggaaaggggaactggaggccgggacgcggagtgcgcggagaggcgggggagggtggtggagtaaggtggcggggacagctaagggtggggtgactggagggagcaggcgggagggcgacaggcggaccggggcgcgagtgtgtccggccgcggtcagggccgggagcgcgcgcgccgcctcggaggggaaggggtgcctgcgaacaagcccccggggaactcgcttcgagcgcccggaggcggagtactgccggcccgaggggcacccaggcgggagccgagagggtcgtgaggaagcgaggacggtttcccggagaagcaactcatccgtcccgccggctgacgcatcacagggctcccgcgcgccacagagggagaactcctccaggcacacccgggagcgggccgcggggccggaaacccccgcggagaccccaaccccacccaccccacccccggctagagtggagaagcgaaagcggagaagatatgacgggggctagcggcggagagtcccggggccagggcccttcggctgccaacgcccggatccaggcgagctccgacgtgcagcggggtctggcgccggcccctcctcatcacgcgcccggcccagggtcgctcagccgccgccaccgccgccgccccttgggtcgatggagtcggcgcggaaggcccgcgcgccctgcgccgccgccgctcagtgccgccgccagcacctcctccgcccctccgcctcccgggctcatcccgcgggggcggcgtcacctcctcgctgcccaggcccgggcaccgcgggcgccccgcgggcggcagccgcccctcccgagcgcgatctccaggctgggtccggggccgggcggggagggaggagagactgagcgtgaagggagagggcgcccgagttttcggggacggaagtgtggagaataggagcgtgtgagggggcgcccgaggtgtcgggggcgggggaagagtatgagcaggggtgggggcaggggtgccaggtgtagcaggtagggaggtagaggcggcgagtgggggcgcccgagggaccggggcggggcggggagcgtaagggtggcaaggcgcccgagagtcagggctggagctgaaggtgggtgacagggagggggcgcccaggtgtcaggacctgaggagaaagagtgcgcgtagcgggagggccccgaagtgtcggggcgggatcctggaaggagggagaacgtgaggagggaggaagggtccctggggtgtcagggatgggggccaggaaaggggcagagagctggaggcccacaagtggggatagcgggggagggaggttggagcgagtggggaacgcaggtggtgtcgagggcggggacagggcgaggggagcggggcgtgaggaagttgtgggaaaccgcgctggacgctgagaatgtgcggaaggatcctgaggggaggacgcgagacagcgcgaggagagacgaggagagttagggttggccgggagggtgcgaagatgaagcgaccactggaggctgtgagggtgaaaggagcaagaatcgtctagagacgggctgggccggtgctggggccaaaggcttctgtctgtcaggccctttttggcgctcactctagaaagaagaggcggagacgcgaagagatcgggttagagtcagattttcgaagcacggagatgggttcaatgaaaggacgaggaaagacgagaaaccagcggccggagaacggaggtggccgccgccgtcctttgctctgctcggggctgggcgccgcccggagagccctcccggagggggcggggcggggccgggtgaacagagctgggcgggctcgccagctcttccaggcgccctgggcaagcaatgtggg

SEQ ID NO: 587824 - DNA, 4001 bp, Homo sapiens
gatgcacacaattccctcaaaaaatagttattttcagatttttaaattaatactttaaaaccaattccttactatgctgttaatagcataatttctatacctaaaccctaatattaatacatttacacacaaattcttggcattaaaaaaaaagatggaactaaaacaaggaaaaggtttataaaggatgagtacaaatcctaaaactctggtagcttcaggtcatggaaatttttagaaagcaatacttgctttttaatttaaatataacataaaatatatatttttatgataaattatagacactaaagtgatgtatcactttaaaaaaggaaaacagcatcttaaaatacagatatccaatttagaatatcctaacatttcatatactgtttgatgtttttaatttgtctcaagataaaatataaacaaaatccaattagtttattgaacagaactggattgaggaaagaaagtgaaattttataagaaatagatatgttatcccattttcaaagtaaaggttataaatatatttatcatcagtaaacattttaaatgccaacaaattttaaaagcctttttttcatttgctaaattaaaatacatattgtataaccggtatttttttaatctccaaaataggatgcctcacattgttcagagatactaagaagaagagacaagtaaaaccactcaatattttatgcactattagttccccatcggtttccagaaggtttcagtgcattgccatgttcacagaatttctttctcagtcttctccacatatatttagttaaatggggtcttttttttactaagcatgtaacatgagaaattctcaaaagccaaacaacttaaatgaggaaagaactggatgataaaactgcattccaaaaacattctttaatagaatatcttttagtgtaagccagagaaaccatctgagagatatgttcataatttaacagccttcaccatagaaaaatgatcaggttgaaaaagcaataggaatttataacaaagaatcctgccaaattagctgacctaatgcaaagcattattcgcggttccacaatatatcttgtttaaaagtgattattgagctacccagcatagagaaatgtcttaaacctagaaaacatcttccacatgttttacaggagctaattcacattttcaaacaaatcacatatgattatatagccccatccttatatatgcaatgtaatcactgccatgatcacaaagaaaacatctatcgggcatttttaagtcattttatgtatctagaaaacaaaataatgaaacagcctgatatctgtattacgtttcagaggtcaagctagttaaatttaagatgctttttctggttgaagtaagcttattttccttcttaaaatcaaattaagaatgctatataaaattttatatttacagtaaacagataacacctttataacactagcacttcaatacaaaacaatttttactggcatataagattattctgaaaataacaatattaaaagaaaatatagtttggctctactcaccttgcattgttcagtgtttgtccaaaaagctcattttgtaagatatttggtggggatgaaaaaaccccatgaaaatgagataaaacagaattgcagacctggcgcaatgtctcaaattgcattttctttctttttttttccccttctcttatttttccctaccacctgtctttaaaatcatctatttgctgacaccatcaaataaaaacacgccaatcaagttccatatttctcctgagctctgtaaaaactgtgcttaaatgaacagaggttgatagttaattgtacagtcattattcttctaattcagtcgtagaagattcagtacccgtgcagctttcggctttctcctgactgtagcaagaattctaaacagcagtaagctttttgggcattcccagctgaagtgtgaagctgagctgctttcatgtactctactcatatttctctaagcctattaaaaacatgcaatgaatagatgctgtcgtcaggagttttagcacatctggctgccagcaataaaatatcagaagtaataaaaatggggacaaggtatcttctcaatgctactactgggtaagagtaagagaaattatgcatttccccaacccttttctcttttcctgaaaaacaactccagcaacagcatatatctcttcaatgtgcaagatgctgcaaaggaccagaacactctaaaaataagtggtatattcttcttttgatgtcatgaagcaataaaaatatgatcaacaatagagcatttatcatctgcatttaaaatgccatatttctaagagaagtacatttggaaaacatgtacttaggtgttttaatttcttattttaaaatttctccatttatttatttttaaagaaaagtggataatgttgaatctggtcctttctaaaggctatatacatagtgactacatggttattcacataattttagaaaaacattatagcttttcaattaaaattcacctaaacaccacacattaaattaaaacttccctccaaatccaggtgggggaaaaaccctacagtcaaggccagagacactttatcaattattactaatttatttcaataatggtggtcatagcattttgtagaagaaaatgtttcctgaaggctcctatggtcttggaaagccaccccatcatcatctattctcagtgaataattctgtttctgataaacatttaggttattctatacccaagtacatccatctttccataacagatctctaaaactagtgtgtaaaccaaattttaaatattaactcacttgcagagatgcttagtattttcattgacttttaatagctcttaacctttgacatttctttaataaatccagccctttttgcccttttgaccttaactctttgcccttttatccctttccatacactatcagtaaatagacatttaaatacattaagtttttaaaagctatgaattcttttttggcataatcatgtcacaaaagaacaacacaaattaaacatgtaataatataaatttttaaacaaccattttttaaaataagatgttcaattatgggtttcttctcaactaagagtgcccccattttatttcagtttattattttattttattatttcactattatttattatttcagattttcataggtatacaccaatctatttgtcaaacacacatacatacctaaaaatcataaagtatttttagtttataaagcacttctaaatttattttttaatatccagaaaacactgtatgtgctaatgccaccatcattttatggatgaaaagaaactgatgctttatttatttatttttaaattaattaattatttatttttttggagacagagtctcactcattgtcacccaggctgaagtgtagtggtgctcactgcaacgtctgcctcccaggttcaagcaattctgcctcagcctcctgagtagctgggattacaggagtgtgccaccacgcccagctaattttgtatttttagtggagacagggtttcaccatactggccaggctggtctcaaactcctgaccgcaagtgatccacccagcttggcctcccaaagtgctgggattacaggcgtgagccactgcgcctggcctgaagctgtattgaattaaacatcacacaatttataaaagatagaaaaaatattttgattttcctgttgcttttgtctttgctttggactccattttctatgttccttccctgtgattctatttttttacatatgtgcatacatgtgcacatgcacacacacacacaaatgcacacctattgtaaaatggccaatttcaatagatgaataggaaaactacctgccagtggcctaatcaagggtattttagttagagcaaatatctcaaatgttttaactcgcaagtaactttaaatgggcttcttccattt

SEQ ID NO: 587825 - DNA, 4001 bp, Homo sapiens
gctgaatgaataggttgtgttgctgaatgcctgggttcaaacgctggctctattacctaccatcttggtgaccctgggcaaatttcggaactctctccctgcctcagtcttctcatttgtgaaatgaggataacaaaagtactgcttcataaggttgttgtgggcctaaaagaatacacgtcaagtgtagaacagtgccggactaataataagtactaaaagttttagctacaattatgatcattcatttactcaatttaatttacttctcgacttgtttacatttcctagaattttaaatatttaattataggaagcaagtgaaacgtaaacgtacaaacaaaaacagaaaaggactagtatggaaattaaatcatgtttatatagggaagtcccctgctgttaaatctatattgatttatatccaactgatattgcaacaataacctagaagaaacttggatagctctagctaataaattagtttgaagacaactttccagacatattaccaatcctccatcttctacttttccccctcccctatcaggaaaaaaagcagaaaaaaaatatttcaatctgtttttagaacgggcaatttcttttaaatcagggctcactacagatgtcctaataagaggtcattgattttctcgggataaaagcaaaaccaaccctgttatttacaaaaatagagttaacatcatgataacgaacctactccggatatacatctaaaaatgaacacagtttgcaactagtgtatcagtaaattaataaatatttcaaatgttgggacactacttactatttaccagtcaattatcattttgattgacaaattgtattttcagtgttagttgttaaatcttataggaaagttcatgaagaaaatacatgttatgttattcaaaactttacgaactccaaatcaactggtgaaaagtttaaaacagcgagtcctcctcctcgtgtttttcattagcttaattacaatggcattgctgaaacaccagagattgtgccttgagcacaaactcaccttcggtactagcaaccctctaactgtctgtccactgtgtaaccccttcacctcatccgatcttgggttttcataggctgacattcctgtttcaaagttttgctgctgcatttccctccagttttcaagtatttctgtcctccaggccgaatgctaatacccggactgcgaagggtaaaccaaaacagagtggggtgcaccgaagaggcgccgccttgcctcccaccagtttacattctctttcaacttccaagcacttgtaatacaactccactaggagagccttttcccaagtcggcgcctgtggagctctccaaataaccaagaaacaacttctctgctcagctgacgtgctctagggctgtcgcccccggcacagtcccggagagcagaggggctgggacactgctacgtggagttctctctgccccggccaaccctccagccaccgactttctaaacagatagagacaccaactacgggggaaggggtgtctcacctccttcttcctcctccagggagttcatgcagggaaagtagccggccagtgcctcgaaggaggcagacaggctactccggctctgggagcgctgcatggagcgccccgcagcgctggcaccccccaagccctgccggcccatcttggacgaggacccgcttttcccgcggtacaagatacgcggcgtcttggcggctggggcgcagcgtccgcagcggttccgggaccagtgggccagaagccaggttggtgccacgggaccctgaggctctggcccctgcctccctgacccagcccggaggagacgtggctttcctggccgccgggacctccaatttattggagaggggtccagaggaggagatggaggcggtggcgggcggagcggctgctcgcagtgaacgtccgaggtctcgcccgggagggagctgagaatcctggaggctggagctgctggagtctcgctgccctccccgcgcagggagatgccgctgatgctgcggtccccgccaatcagcggccggagggggaggtggcggcgcggctgcacctcggtgggctggtggctccggggcgcgcgcctcaggtcccgggcagctgctccgagtagctcctgctgtttcctcttccctccgcgtggttaaggccagggagtggtgactaattagatgcagtgagttaggcatctcagataagtaaaccggtaaatttctggtagtcactttccctttcctcaggttcacagttttttttaacgctcctcaaacacaggcaaaaaatattgaaattttcttcaagtcatgacacaaaggctcctcaatttttaccaagttccacgaaaacctacaattaaagctttctcttttactctctttgttaaaaatgataaaaagtgaactaaagaaaccaagaaccgataaacaccagcactgaaaagcacaatgatgtctatcaaattgttttaattttaggaatttttattgccttctttctctaaattaaataatctacccagtatggctaagaatgacaacattgtacggcttaacatctaagcaaaaggtataacatcctgttaacacaaatttggaaacaacacaaacatactagggcaaagtagtttataagcaacattacatgatgcattctgcaaactgcacatctctatcccggaacctaaagcaactttaatttcgttttcccaggaatcagatgactgccttactttttgtaatctgagacaagtcatcccacctctgtttcccaatctagggaagtgggaaggtagggtactattcagtcctaaccctgtcaaacatgatcactgggcgtgtgtaataggggatttcaacgtaaaatgtaaattatgcaatctaaaatggttcatttattcaataaatagttcctagatagtatatatgtacaagttacttgcttgatatgctgaaagattcaaatactcattcaattaatattaattgagctcctagtatatgccaggtaccatggtagatgtttatatgatgcaacagtgatcaaagcagctaaaaaaaatccctgctctcatgaagcttacattttagttgcaggggagagacacgacaaatcagtaaattatatagtgctaaaaaggagatgaatgcaaataaaaagttaagaggtatgggacactgcaattcaaaaagagttgtcagggtgggttctcactgacagtatgacatttgaacagaggtgtgaagaacctgaggaagtggctagtcagatattccaggaagagagtgagtttgaggcagagagaacctctagtgcaaaggccctgaggtatgatgtcctggtgtgaccacagaacagcagacaggccagggcaattggagtgagtgggaaggagtgaaggacagagagacaagagtcagagaaagacataggtcatacagagccttctaggtatgataaggactttgtttgtccattgcacatcacaatttagaaggtatgaaaaatgcatacaagtaataatccttttaaatacacttaaaattaggaaactttcagtataaataagagttccatggtaagaaaaagtaacaactttagctgtttagacttaggctcatccagatttattgcttttgttttcctgatagacttgtcctttctcattaatgtccctacaactctgttagtccaattttcttttcgttatttatcttcctcaaatatcagcatttcaaaacaacattgataaaaccagacaactctatgagtactttttcaaaccatatcacttttattcagagactagaaaattttattaaatgagattttcattataagaatcatagaattttagaaactgcaaggactttattaaaagtcacctaattttttttaaactgtgggtcacaaatgagtcatgaaaataacttattaagttttgattagaattaaaaaaatacaat

SEQ ID NO: 587826 - DNA, 4001 bp, Homo sapiens
ctctctaaccaaccaccacccttaaaagttgactacagacacatatacacacttgtccagcacttgctccacagaatataaggcctggagtaaacagacaccacaccttgtatatcactgaatctggattatgatagacaagaagtggaaacaagctctagaagtgtcccaaatctcctgtgccatttaggccatcgaagcctgacagtgagagacaatgaagaaaagccacaggcaggtgaaaatccagtaactttggcagggcggaagctgaggaatttatctgatgctggatactcacagcttctggccaatcaggcatcggggatgacgtattttcacattagatataggaggaggagaagagaatgttgtaatcatggatgttaactcactaagaactgaatgctgggcctagttaaatccctgtaggaagtaaaatacacaagactagtgacccattgactaatacacagtcacaggtctatggcacgcggttgtaatgttcttctgaaaacagaaactaatgctaaccttcccttaaaacctgtacaaaccaataagtgaaagccatttacaatttctggccatttaacagtcttttggttcaatttattgtggcaaaaatagcacacatttcctctacttaatcttccctgtgagagaaactgagactgggagaaactgaactgctagtattgagtttgatataaaacgttcctgacaacacataataaaccaaaaccaaaataaaaacaataagaagcaaaacatccttgattctaaagcagtgcggtccaataaacatataatgtgaacaccaccacatacaatttaaaattttctcgtggccacataaagtaaaaagaaacacataaaatgaattttaatcttatatttaacccaagatatcaaaaatgttatttcagcatataatcaataaacaaataataaaatattataagttctttttttaataaatactaagcattcgaactctggtattttacacttaggtcacacttcaattcggacgggcacatttcaagtgctcaatagccacctgtggctaagagctacctactggacagtgcagccctacagcccaatttcaaaaataaggaaaaaacaaagcaaacaaaacccacacccactatatataaacacacatcaatttcagtaaacccagcgtttagagttaggcagtgattgctgatttttggagtacggagccagaacgcctaggagtaagagggaaggagagaaagggtaatggagagatgtgtggaggaatgcaactgctgcatctccagagaagcctgtgctccctacggtgccagagcttgaagggtgggtgctccctatctcccaagcttgaagggctccctagaggtgacgaggtgaggccggccccaagcggtcactgccatttgggctctagagcccgcttgtcagggggcttgaggggatgcaggagttgagggctcttccagggaaccccagtgactgcctacctgtcgagcagcggagtgtggatgtgcaggtgcttcacggccacctggacgcgccagtctgcgtggcgggcggacgacacagtgccagaggcgccgcggctcaggtagcgcaggtcggcgagtttgtggtagggaatggtgggcagggcgctgcagatggcctccccgttcatggtcccgggcgctcaggccggttccgggtgtgccccctgctgcggcggctcccaaggctcccacgccgcgctcaggcgcccagatacgcccctgcacgagcgaggccggcaagaccctttttgccccgcaacactaggtcacgagggcgcccattccccggatggcccacgccagccgctgcttctccgaaccagagctgacttcttttctagagactggtgccaacgccgtagcgccgcgaaagagcttcctctctcgcagccccggccctccccccggcgcgcgcagcgaccagctccggccgcccgagctcctccctccccaaacttcgcaggttacgtcagcggcggacggcaaggcggggagaggggcagcccgctcgcggccctcccgcctggctctcgcctcggcctgcggccgggatcctccgcccgggtcgcgcagcggaggccgagggctgggacgggcggctgggaagtgggaaagggagctccttttgtcttctcttcccatcccccaggtttgggaaagttttccttttgggaaagcccctctcttcagcctgctggcgggtgtcggattggttagcgaccaccggcccccgcctcccccaacaggattctcctttgggccacaggtcttccggaagttgccaaaccccggtagcggcagcgtccggctgggggctttattagggggcaccggggtctgctttccgactcccttccgactccgcgcctgcgcaggaagcgatttggggagtgttgtgaattccgagggctccacacttaagaggttgtacactcacctgtctacctggactccaatttccatatttccagccacttgaggactgagaggtggatgataaaccctgtcatagtggagcaagttcaggtgtttaaccgctgttatgggggatctgccttttctccctcttctttcttacttccataagtatgtatgtgcagagattgaaaaataaccttgagagagtccatccatctaactccaggtaagactgcaaatatttctttcttataaatctgggaggaatgcagtcagtgtttcatgccaaccaaaaaagactgcaaacgtttttccatccttctgccttgaatacctttctacttagatgactattttgtaagacgtgagtgcaaatgttatatacaataccaactccatactagatgtttaattaattctagggattcagtaataaggaatgactcgaacagatttctgcctacagacagctaatgcttcttgtatttttgcattacctgaaatgaaagtagcaatgttagattttacagtagtgggaggttgtaaacaatagtatgttaaacatttttgatcatttataataaaatgttcagcactaaacatatggtctgatactctgtgctttattgcttaataagcttttttttttcttttcgagagggagtcgtgctctgtcacccaggctggagtgtagtggcgcgatctctgctctgctcattgcaacctctgcctccctggttcaagcaattcttctgcctcagcctcccaagtagcttggattacaggcgcccgccaccacacccagctaatttttgtatttttagtagagacggggtttcaccgtgttggccaagctggtctcgaactcctgacctcgtgatccgcccaccttgtcctcccaaagtgctgggattacaggcgtgagccaccgcgcccggccaataagcttttttcttaaaaagtactcagaagacttttctatccattcattctgttaacgcgcgtcagtgtgaagagaccaccaaacaggctttgggtgagcaataaagcttttaatcatgtgggtgtaggccgacttagttcgaaaaaggagtcagcaaagggagataggggtgaggcagtctttataggatttgggtaggtagtggaaaattacagttaaagggggtttttctcttgcgggcaggggtgggggtcacaaggtgctcagtggggagctcctgagactcattgtccaggagaaggagtgtcacaaggtccattgatcagttagggaagggcaggaacaaatcgcaatcgtggaatgtcatcagttaaggtaggaactggctattttcacttttgtggttcttcagtggcttcaggccatctggatgtatacgtgcaggtcacagggtatatgatggcttagcttgggctcagaggcctgacatgtttatccagtcaattaattaaaaacctgagtcctagaaaaagagaacaaaaaataaacagggaagaaatgatcaaaataataatttaaaa

SEQ ID NO: 587827 - DNA, 4001 bp, Homo sapiens
cttccaacttcacgtcaacttctggctcctcaaacagtaggttggcagttaggcagggaagttgttttcccatttctcactgagcagattgtgaatatttccatatggattttctattattaacattaccctgattctttgttttaaaataaaaattctgaatgtacgcacacaaaaaaactctaaatgttccatatatctaatttatgcttacctttggctgtggcatgaaccacagcagcctgagagataacctggtaagtttcaaaacccaaatacgacaaagctgagagtaaaaggcctcttttgaaagttcctgggtttcccattacctatggaaacaattatgttaagagttacaaactttgaaaatttgaaggtactgctaccccaagcaaaaattacatgaattttctcccacccccaaagcaatcgatcataatactggaagcttaaaaattacttcatcaaaatctttagtaaaactatctcaaagcgtatcttattgagaaaaagatatcccctggagtcgccgctcatctaaaaatcacactcctgctggaaaggaagagctacaacttatttgctacaacttatttgcaaatgcatggatattgcaaattgtatgaagtaaaatatgagacaccaacacataataaaaatgaatcttacagacaagattatcatatatagtaattactacatataaaaatgtacatggctaacttttaaatttttttgtagagacagggtctcactgtgttgcccaggctggtttcaaacccctggactcaagcaatccttccgcctcggcttcccaaagtgctgggattacaggctgagccaaggggccaggcctaaaatgggacttcaaactcatcattgttccaatttgaaaacttacggctaactagtttcatacttagaactcctcccatctctctgcctatattatctataacctccccatttggttataaacttccaaggaaggggaatatgccaaattttaaccacccctccccaccatcagtcccataataattctgaaagattttaactgagcagttaaaaatttgagtttaaaataatgaaacccctagttcatgtgaaatatatcatatgcattaatgccattccaattccctgacaagaataaacagaggcccacgagcagtctaatagaaataccagaactgagactacaacatgccgacaaccttcattgacgttatgcagatacaacgggcaactgagaaataaacatttttaaacaaaaacctaaacagtatgaaatctctgcttctgagtcgtagaactttttaaatcacacaccacacttttcaaagtctgaaaggggcagcctcaagcgctgttgtatctgtcatcgcctacagggagaataatttcacagcggtcaaggttctttcccgtcctgttttacatttcgcacaagaagggcgggtagcaggcagcttctggggcgcgtgggggcaaaccccactccttctctgacagccccagttaaggatagtggaggtttgcaaaatggaagggacctgtccgggcgttccaggcacagtggccccgagttctttcctcggttcaccacattccttaggcagcgcggggccgccaccacttaagttaagggggagccggaacccactgagtaggaagtgaggagcgggagccaggaccacgggggtacctcgaagccgcggaatcgacaggggccgcaatgcccgcggctgcccgaagtccccgcagggagacgagaccccggggcggctccacgtcggaaaggcagaaggcgccacagtcgagcagccagcgccatgacctgcaacttgcgggctgaccctgcactacttcaggcagctacggaggcgggcggggctaaaggagattcaatccttccggaaagaaccgcgcccgcccgcctcctgcacagcacctcttccgcctcctgcccagcacctcttccgcccccatggtttccggtgcacgggcttagggggtgggaaataccccgattgggtgggacttaatggactttccgcgcctgcgtccaggactgaggccgtgagagcgctctcttcaggcgctctgacttgtttctgctccatctctctagggggtctttcatggtttgggcacaaggattcgtcgccagaatagaactgaaagctcggaaatagacccgagaatacaagtatgccagaaaaaaaattgtcattttaattatctgctgccttcaaaagtagattgaatcttggtactagtgggtcttttttggaagtaaataattggaagaattatgttgcccaacatgaagaagggaaagtctcagtctcttcgactgagcgactcaagggggtagattcaagagagagtccagagcaaagaaacaaaaaatgcaaagcgttttgggaagaggaactagcgggaggaggcctctggaaaggatactgatgcccttgaatgctagggcatgtgtagtaaaaaacagaaacaaaaacaaaccctggtctcccctaaaattcttcaataagatgttttacttactcgagcaaagtattttattttactcgagtaaaataaaatttcttgctcgagtggaattcttttgtgggaaaatgaagaaattttggatcctacttgaggcctgatcagggtgggtggaaacacagactgcaaagggagtacctactatatgggtttaacgaaaaatcttatgggtaataagggaggcgagtcatggttttaaaaaattaggttgcatttctatggtacttttaatactgtatagggaattaatacatagtcgtattgatcttccgaactaccttgtgaagtaagtggtatcccaggtttacaaatgaaaaaactgtaactcaaagagatgtattaacctaaccaaggatatgttagaagacaggaatccatgtctttctactctgagtccagtgctccttctactatatgattgctacctccactagtcccattaaatcagctgtatttctttaggattatgtctttaaagtctatctttaaaaatatatagatctccttcccaacttctgaaacctagctgttttttcccaaagacagaatcacttttattttatgcatttctactggcagctaccccctcaacattgctaaatgtttatgccactggataccatgataacagtgaaattaagtttctgatatctctgctagagtgaatttgtaattaagtttttagctttgaaaaaaaaattagatcctaagaaaagttgcaggaactcccatatattcttcagctagattcagccattgttacctttttctcacatttgctttatctttctttacatatcttacctataatacacatattatattcctagtattttctgttgtaaggccttttgagagtagattacagatatcatgactcttcagtcttagaaacaagacattcccttacttagtcccagtttaattatcaaattcaggaaactgaaattgacagaatactattatttaatatacaaattttgtttaattcccaatactgtcctttatactaatgatttttttttctaaattcaagatcaaatcttgataatgtcttgcatttgttatgtttctactttctttaaatctttaaatcgtcagccttggtctttcacgacattagtattttttaaatgtatagtcccatcggtttaaagcagggtttctcagccttggcacaattgaacttttgggctgaagaactccttcagcccgtcaggccatcagatgattgcagccttggccaatatctgactgcaacatcaagagagatgatgagccagaagcacccagctaagccacttctaaattcctaaaccacagaagctatgacagataataaatgattgttcctgttttaagccactaaatttgatgtaatctgttacacagcaactgataactaatataacagccaagtaaagcataga

SEQ ID NO: 587828 - DNA, 4001 bp, Homo sapiens
ccagccaacgggaatctttcccagatgctagggtgcaagggccttcctcaacccccatcctctgccccctctcccacaaaaccgcctatcacacacggcttggttcattttcaggaaatgagatccgaccagcaaaaggaggaaggcggggtggggggatgtggggtatacatgctacccaaaccctgcctcaaaacaaagcctcttgacataattaatccaagatctggcaggagtctactctaaagaatgatttttttccccctgtaactagctcgcttgccatactgagagataaggccagctgcttcccatctctctctcccagaaactctccaagcatcggaacaacgcggtcaagactaggaccccaggaggactggagcgggtggggtggggggcgattagtatccaaggttttgaagtgtcccgctcagaaacacctacctttcaggtagctcgctgaggaatcagactccagcctaacccagtatcacctgaacctccaaaaagcctcaggtgaaatgaactaacttagaagcatcacccaggcctggggagaaatggggcgaggggttgtcgcgtctggaggtgtggccttcacttgggctcaggagcagacaccctaatctggccttgtggccagaaacacggctcccgccaggccagcctcgcaccccagggacagccgggcgcggagctctctgcgagggtttatcaactcaggaaaacggcttttttttagatggagtttcgctcttgttgcccaggctggagtgtaatggcacgatctaggctcactgcaatctccgcctcctgggttcaagcgattctcctgcctcagcctcccaagtagctgggcttacaggcatgcgccaccactcccggctaattttgtatttttagtagagacggagtttctccatgttggttaggctggtctcgaactcccgacttcaggtgatccgcccgcctcggcctcccaaagtgctgggattacaggcgtgagccaccgcgcctggccgaaagcgactctttaatccagtcttccgcaagcacccaagccacgccagcagcccgtgggaaaccaacaaagccagaggaagctacccccgcgcccagtcccgcacgctgcacggtatacatatttacaatagcctgcaaagtttcaggccgggaacttgagctccctctaggagatcccagcccgagtgcggatttaattctcctccaacaaccacaacaaagaacagagtttgagcgcacaaaggcaggggaagggggtagaagagccgggccgccacacaaaggccgggaacccctcggctcccacgcccccggcccgccgccagtccggaggccccttccaggctctggagtgaaacctggatagtttcaaattccgcgctgtgcagagcagagtggggcgccaagacgccttctcgactgtcccatttcaggagaaacttggttcccgagggaggaccagcgcgctgctgtccgacctcgcaccccgcgccgcggctcccaccagccccacgtaggctcggccctcgccccggggactcaccgttacaccactggaatgggtgcatcaatgaagtcgcggttggcttcctcgggcgaacggacgcaggcggggtgccaggagggcggggtgggagcactagcggcgtgaggggccgcaggcggggtcggggcagcgcgctgcagccgccctgctggagaagccgaactccctccggagtggggggctttgacgaggctggtgttcagcccaacaaagagggacgaggaggaaacaaacaaagtcccgcggagcacagccgcacggagcgcacgcgccaagggccccgggctgggggaatgtggggcgccgcggggcgggggtgcccgggctgcagaagccctcggccgggggaggagggaaaaacctttgccggaggctcggatcgggttcagcggcgcagaggtgagctggctggggttccgaaactgacacccggcggtgcacaccccctcccttttacttcccccaccagtccccaggaaaactccgccccttgttcgtcaccctccctccgaccaatcggagcctttctcctgcccccggctattatttgcaggcccagcctcccttccctggaagccgggaggatcttcgcacggtgggcgcctcccacttagtcttcccaggcctggggaaacttcggtctgcagagaatggagcggcgacgagcgatgccccggagtgggggcctgccttttgcccagggacaccaaggcaaaggaacaattactgccacattgttttccgcctacagatctgttatttatttacttatgtatttggaggcagagtctgcctctatcgccaaggctggagtgcagcggcgcgatctcagctcactgcaacctctgcctctcgggttcaggtgattctcctgcctcagcctcctgagtagctgggattacaggcgcttaccaccatgcccagataatttttgtatttttaatagcgacggggtttcgccatgttggacaggctgttctcgaactcctggcctcaagtgatcctcctgcttcagccttccaaagtgctgggattataggcgtgagccaccgctcccggccctctttttcttttttgagttagagtcttgctctgtcactcagctggagtgcagcggtgcaataatagcttactgcagcctccaacttctgggcccaagcagtcctgccaccttagcctcccaagaaactgggaccacaggtgcctgccaccaagcccagctactttttaattgttttgtatagatgagtggcctcactatgttgctcaggctggtctcgaactcctggactcaagtgatcctcccgcctgagcctcccagattgctgggattacaggcatgagccatggcacccaggacatttcatttcttaattggataattgcaaaagcttcctaactggccattctgattctagtctatagctcagacttcagagcctacaagaatcactcctatgtttgagatgtaacatgcagattcccaggccttgaacccagagattctgattcaataaagggtggacccagaaattttcattttaatgtgccttgtcttccccacccctcaaattctcatgcggctattgaaagaaacagtgctctgatttcactctcaagtccatcccttctggtcacaattatctctgtaaaatgtaaatctgaacatttctttgcttgataacgtttgttggtctccagtgtttactgaataaagttctgtaaactagagtgtggcattcaaaatgtttcagtctagactcactcctataatctcaaaacttcgggaggctgaggcgggcagattgcttgagctcaagagtttgagaccatcctgggcaacatggtgaagccacctgtaaaaaaaatacaaaaattagctgggcctggtggtgcgcacctgcggtcccagctactctggtggctgaggtgggagaatcactggagttcgagaagtcgaggatgcagctgcagtgagctgtgattgtgccactgcactccagcctgggcgacagaatgagactactctgtttcaaaaagaaaaaagaaaaaactattaaaataaagtgtttcagtctagccttatttgtttcagtcttcctcatactcaaatactccccttcaccacacactattcatcagccatgaagctttttgttgttactcttccttgaacataggctgtgtatattcttttttgttgttgtttttatttatttagagacaaggtctggttctgttgcccaggtttgaatgcagttgcatgatcttggctcactacaacctccacctcctgggttcaagccatcctcccacctcagcctcctgagtagctggcactacaggcactcaccactatgcccggctaattttttttttttttttttttttgtagagactgggtttagccacgttgcccaggctggtc

SEQ ID NO: 587829 - DNA, 4001 bp, Homo sapiens
gttatcatgctgtaagaatattcaaagcagtcactacactgtttctgggatgaacatgcagaatcctctcaaacagagcccagtttttaacacaaattatggtggtggtatacgttagcagtggcaagtaggaaaggctggaattaggtagcaggtgggttactgaagcagcttgggctgaacatcacgtttacatctttagttttaagatctagcatatgatcattactactgcattctgtatctggattgcagctgttagggaggaaagtaaaccatatttaatgtcaaaagatttttaagctcaggctctggcaaccacttagcggcagcctaccaagagcaaaacacttaacctctatgaccctgtttcctggtttgtaaaatgacaataccaccacccacctctgggggatgtttgaaggttaggttagataatacctaccagtgaaaatgctttgcaaaaggaaaataccagataaatgtaaaatatggctatttattgctaagaacaaaattcggcctttattgccactcctcttttgaaggaataaagcaacagatggcttgtaattcagaaaggcttggtaaagacctcaccatcagtctgccctcagcaacacttcaaaagcactagcctacttaagaccgatcaccagaattacctcatcaacaaaatttgccaagttacaattacttaaaaaattattttacgcataaatgcatctccctctgatgatgtaagtgaagatggaaaggaagaaatgaaatataagatacttttaacactccatccatacgaaacaaagacaatgattttcagaagtctctttggcaaatgtctcatcactttttacagtcactttcaataccttctcgtttattcatggaaaattttaggactcgatttaagcatcgccgctttcatgagaatttttggtaatggtttcaaggtctgacattcaaaaccctgtctccttcgcttggatgtcatttactgcagacacttcacgatcctgtggaccctcgggtgcagcagaagtgacaacatacaagtactcggcatttggtaataaagggaaactgaggcccacgccttggcagaagtccaaggtcacacacgacgagactgggatagcagagttgtttttcgaaggctgtcgcataggacgcggtaagccagtactcatttcccaaggcaaacgggcaaagagctgcatgctcacacatccttactttctccccacctcactcaggtacaacactgaatcctcgctagggggactgctccgctgtcaactcagacaagtatcatctccttccccctcccaacccgtaaagacgaccctttgagggatgaaactgtagttcccaaagacacatactcgacccatggcctctgcgcgcctgcccgctccccggggaacgtctcggcccgcatagccgtcccgggacgtacggtaccctgttcccttaccaaagagccggaggaagatctggagcacgatgcagaaccggctttggctggaatccgggtaggagttgaagatggcgtcgatgatgtaaaggcagggcacccggagcgccacttcgagcgccgcccagacctgctgatgggccatccgcacctgctgctgcgggggccccacggccgccatgagccgctgccacaccagggctcggtgggccgggcagggccgcgcggggcagggcccggggccgcggccgggggcgggggctaaggcgggcaactccgcccctgccctccttcctctcctgtctctctcacggccagccccgccgcccgctcgcgtccctcgaggtggagcaggcggcggaggcagcgatggccgagagggcggcggcggcggctccccaggaggtctctgggtttcggtgtttccggctggctaaggtctgactcctcctccctccactgcctcccccgcccgcggagccaccatcttgacctcgcccgctggcctctgccgttgctgctgtggctaggcccggaggctgcgccgtcagtcaagcgaaccgcagagtccgcgcccactgcctgcgtcataatccagcgtcataatccagcgctagagacgctccccatgtcgtcatcacccatggttgccatggtttccgcccacctcctcagcttactctagcttcgtgccaccccgtggcgcatgcgcttttcggtagccgcgctttccggcgttggagttgcagcttcaccctcgcagattcggcttagcgagcgagtcggtgcttccgcggatcaaaattattagccgttttattagagcccattaaacgttgcataaacatggttcagagctgcctgggagaagaaaagccaaaggatgccaccctctcgatttatcccaccctcgggagtctgaaagccgacgccaggagaaatcccgcgaaggccgcccgggatcctggtagaggcgacgctgtgtgcgtttatggagcgcttgcggtgcgtggcactaggctgggtgtggtgggtgctgccgaaaaaagggttcctcccatccatttgcacgtcacccttcccacctcctgcccagatggacagaagtgaggacattcatcggccgcattttactaatggcaaggagatagcgactgaagggcaagaacctagggtttcctgtctttgatatttctcatctttgaggtaagtacacctggacagtcccttccttcctcctcagggctcatgctttcttgcctatccgtgtaattaatatgatctggctatctttgtctttgttccgaaacttcagctgcaaatgaaagtgtaagttaggtctgagtctgcactatagacctagctatcctaggttaaaggggataaaataggaatcaagaagcctggcccgcttgggctcccagctcaagtgcattctgcaatccagtttatattaggcctccatgtgggtggctatcctttatcaagatcccccccagggggaggaggattattagtcacattatcaaactcccctccaacccctttctctgcttagaggtatgtgtaatgtgtagtagaaagaccgaatccccacccaaaagtccttactgctactcatgtttttaaccttctgttctttaccctactccctaataatgaccgccatcatttatctactgcttaatggatactaggcactgtgctaagggttttatgttttacttcaatcttttcatcggctttattttgatagtttgttttatagaggaggaaacagacttaggtaagttacaagatgacaaggttactaccttgttcagttagtagtcagcagctagtatatccaaagatagtacgagtcagaactaggattataaactcagggctacctgaaactcacaacttcaggcatctttgatttcttcttttcacccacagccaattcttcaactaaattgtatccattctgttttcaccgtctcttgtactggtctcctttctattgtaactgtcatcatcctaactcaagatccttctgtagctttccccggttattggaatatccttattacgactgccaccttttctaatccagtctgtttactactgccgggttaatttccccaaactgcatgtctggggaataaccttgtggttatgacagaattcccaaaggaaagcaaacttggcaaggtgcaaagactatgaagacttagaacttaagagttctatggagatcttcagaaatataaattagctactcaacatatctgttattctgccctgattgcactgtaaagcaaaaggagagaggccattatggggaaaaagatccaaaaggactcatctaaaacacaagttgggtagaggagataggtgagtactattatattatgttcatggaaaatgagttcatgggctttcctctaatttttattttaaaaataaatgtaaatattaaataaaattttttaaatgaacaaatgcttcagtctttattaatgttttaactgtccctgat

SEQ ID NO: 587830 - DNA, 4001 bp, Homo sapiens
ccggctaatttttgtatttttagtagagacggggtttcaccatgttggccaggatctcttgacatcgtgatccgctcgcctcggcctcccaaagtgctgggattacaggcgcgagacaccgcgcctggccacgtatgtgtaatttctaaaggtttctctgcccttggtgtagggaagaatgtttgaaaaaaagaccattgagaatacttcaggtaagtttttttttttttacacttacaaaatgctaaatgatcaggggtcaactatcaagtggtactctgtaaggcaaccttaaaaactcactgctgacccaggctcggtggctcacacttttgatcccagcacttttgggaggctaaggcgggcggatcacttgagcccaggaatttgagaccagcctgggcaacatagcgagaccccctctctacaaaaaataagaaaattagctgagcatcgtggcctgcacctgtggttccagctacttgggaggctgaggtaggaggatcacttgagcccaggaggcagaggttgcagtgaaccaagattgcgccactgcactccagaacgagaccctttctcaaaaaccaccatcaacaacaacaaaaaaccccactcaatgctgtcttggcagttttcagtgctcaatgagaaaacctactcttaatggaaaaaaagtgggggaaaggggttccaggaactacaaagcaaagtgtgtcttgggaagttagctttgttgcactccaaataaaaatttggcattgggtggtagttatgcatactctacgcatcgacaattctctaaggactccaaagtgcatgtcctggaaattccaacatatttgcactacgttccaggtacactagaatgtttatagccatgttctgagtggcctcagtctgaacaaaatgcccaaccagagtagaatggattcactgttctattcacactggaatactaggcaacaattaaaattacctatacatacacagtacaccaatttaatactgattgaaaaccacaaaacaacacactgtgatccacccgcaaaagttcaaaaacaggcaaaggaaaacgacatcgcatgcacacatagatggtaaagctgtaaggaaatgatcacactagtcaggctaggagacaatcaggctccgaaaggagcacagggcatgggtgagaaactcctggggtgccggtaatgcccttttcgtttttatctgggtgttttattaattcttctttaaacgtgtatgtcgtatgcacttttctgcgtatgctatatctgttaaaaatttatcggcagcccagcagacagattcgtgcctctaaagaggtggaagctccagaacgatccgcctcgccattaagcgaaggcaactccgaacgctgagaaacgcaggcccggggtcggccggtgtccttacggattggcgagcgggcgcacacccctcctgcattaaggagagttctcagggtcacgctccgagcgaccctagagggagcggcggtgtcctcgccgccgccaaacccacctagagccgctctccgcgtcggcccctccaccgtcgccggcgactccggacagccgcggggcgattctggggcttccagacgagggaggggcccggggggaaggaggcggcgactcccgccgccccgcagagcctcggcggccagagctaccccaagaaggccagaccccgccgtccgcggctccgcgggccccgatagggtgggcgtggccgccgcgcgccggacgtacctctccaccgcgaaggaactacctcgccagttcccggcgacagaggacagattatttccaggaccgctcccgccacccctcccgggcaacccactagacgtcccctttctaatttggagtgcgggtgcgggcgcacgcgcactgccgagcttccgcgagggcgcgaccggacggcggaggaggacccgtcgccgcagcctccagggcggagcgcgtgctcgcctcgacacgcagcgaactggtggcgggggcgcgcccggcggcagcggcggcggcggcggcggcggcggcggcgcggcggcgcgggtcggccggggcgcgagcgtgcgcagtggctcctcggcctcggctccagccagggcggcggcgctggggaggagcggtgtgggcggccgggggcggggacgcggggcggcgggcgtgtccgaagtcgcgcgcggctggcgcgcggtcccgagtgaaaggagaaggaggggcgctgggggtgacggtgcggagccgctgccagcgctgggcgagagtcggcggccggatccgaggagcaggcgggcctgaggccgagtcagctgcgcgggcccccggatcccccgacagagcggcggcggtgtctggccaggcggtaggcgctgcctggccgcggcggggaagatgttcagcgtagagtcgctggagcgggcggagctgtgcgagagcctcctcacttgggtacgtgggggccgcgggccggcgggaagaccccctccccccgccacctaccgggaccctccacgcgcggcccgtggggcgagcgctgcgggcgacggtgccgtcacatccggggcctggggcgggcggggcgaggaggctcggcccagggtccgagagagacttgccgggcctgaggcgtcgctgttccgggcggaccccggccggggctgggctgggaacgcggcgggcgactctgggatccgtgcggctgctcgcagctggggctgcgctgcgctctgggggtggccgagcctgactgccccgcgtccaggacccgccgccgctcctcgcctttgttgccgcgttcgcggaggacgggcccggctccggcccgggaactgaaaggacctgtgagggagcgtggggagaatgcgggaggcgcccggggaccccgtttcggatgcaaggcaccgctggcggtgggagtgcgcgaggggcggacgcctgtcagaggcgtcgggcagacgtttaaaggagtctggaggtgtctgggcgtcaacaatggaactcgaaggccttgggggacagagtcgtgggattctgattttgaattcttaaacggttttagattcctcatactttgaagtaaatacatgttcacctctcacgtcagctgccgcgccttcctgaagccgggtcttcaggacgcggcaggggaaccgacgcccgggttccagtcgttctcgccgcggcgcggccggggagggggagggatgcgcagagcccgggcggaccccgcgctgccttcgggagcctccgtttcactcattgctgagaatgttaattaaatgtttacggatgtgtttatgaaggctactacagcatttgtattacttttaaaggtaaaacacgaatgtgagagaaattctctttagcggtgtcttgggttacgagtcaggatccctggagtgtagacgtcacgatcctgtgcaaggcactttgctggaaaggctggagaagtattgccttacgttggttgttaaaaaaattaataaaaatagtctgaggtttttatagtttggctacgtcacgaatcaatttctgtcctctgaaacagacttggtagagcttgagtagccagttgcatatcagaccatttaggggatttcagatcgttagcagtagtatgtagttagcgtgcagcttacccttctgatgagttctccctccaggcaaggagatggctttcactgctgtatttcagaaaagaggaagactggtaagttgtataatgtggctgaggtttctgactaggcaggggagagagagagaggaaagaattactaaattctttgatgttgtggaaggaatagatttggcagaatctgtacatctgtaaacagaatgctgaggaacttaagatttaagtttttgagactgtgcaagtagtgcttccctttatgctagaagaagcagccagaaggcaaagatgaagctaattgaatctaagtagggctacattgtttaaaatctagggagaaagaagacatggaa

SEQ ID NO: 587831 - DNA, 4001 bp, Homo sapiens
atgcttcacggttctgccaccatttcttgtgtgctaattttgacttttcaactattttgaaagctctgtgaaggcaggcagtattaatcattatcttcttttcaccctctgctctgtttccacacagtgctgagcagagggtaaggctcgataaactgctgacaaggctgatatgatgaccaagttcttgggcaatgtcttctttcctcctttcctctgttcttacctgctagcctctcttctgagtagtgctcagtagcagaggcaaattagttgaagccccagaacattggggttctgagccctggctgcacattataagtatctggggagctttaaaaaatatggctgctcaccttctccctttcttgtgccccacctccgagctccagaattttattggtctaagatgggaccagcattggtatgttttctaaagctcccttgttgattctaacggtttcattgagtcccactcctttcaagacccagccccgctggcgtgcacccattcagcactttcctgtctggtttccaggcaggaagtcatcctagaactggccagagactccaaagagacggtctttagataagtcctttgacatcagctatagcctttgttgtatttcaaaggtgtttaccttcaaattgacaactgtctgcactggggcctgctctgaaggttgcctttcagtctaggcaccaagataagctaatgggtagatagaccagcactagggttaaaataagctcagatctccccaaacaataccctgttgttatacagttaagcaatctgattgaagcaatttgttttaattggaaatgcaatacacaatttttatgacagagctagaacactgtgtcaaggaaaagtaattacgtatatacaaataggaaaacctcaactattatcaaccattataaaaactctactaatatgttagtacatagctcccctatttatataagaacaacaaaacaacaacaacagcaataatactaatagttaacaatttttaacacttactgtaaaccaggtacccatcctaaatgtttaatttggatttttctcatttaaagtggcagccctgtgaaagatgtactattattatcctcattttatctatgaggaaattgaggcactgtattacaaaagatttgctagctgggaagtggcagagccaagattagaaaatgttcagagatatctactcaacaacttcctagtttctatttcaaaggaaaatgagattgaattgagaaaaaaagaaacccaagctgtcccaaatatgagtacatattaaatactttttactatttttactttaataatttttaatggaaattactccaaagtctactgtacacatcactgcttccttaaatagaagaaactgaacacaatttaaccttttcttaaagacttcatgttactgtcatagactttatctggggaggctagatggagcctgattctctggggctttttatggtttgaagagttgggtcactcttacccagtgcactggacagtgacggtggccgcctgtccctaggtgctttctaaggtaactgctctgcccacagtccctgcggaggtgcgggcctagacagcagtgctctggtctaagtgggccaggctgcccctcagccacggctgattgggcaaagagcccacacgtgacccaaagcagctatcctataggttggccgctttctatactatgaaccaacgggacaagtttagccaaaaatgggtgagatggtccagattctccctttggagaatttgaatgactggttagcagtgggagctaaagggatatacagtacagacagagtccatgggatagaacaagcaaaactgataagaaaccagatattaccatgagcagaagctgtggggtagcgaagaaatgcagggcatgggtcccacactcaaatgccctcggcagtagacaggcagtgccaatgagagaagagggcgcggcgaaggtgatcccgcacgtaaagattccggactgccaagctcatgccacgcccagagacttcggaattctcaacaatgcaaaggcgtcctgctggccaaacacaatgagtctgcaggctgaaataggtcaggagctgccagtttgcaaattccaaagaaaggacgaggaagtcagttaggggcaagcccagaaaccgaacgacactgacaagcacagaggcaagggagagcagattcacaaaaataactcatcgctgaggtgaactcccgatgctgaagtcctgaggtaaccttggattcccgatgacgtcctggctccagtcttcatgagacttctcgctcttgaagctcctgttcttccagaggcttggtgatttggcctctcctgggttcccacgaggccttttggggctgagatccctgttttcttcattccttataactccttcccctaatattatatgtaacttgagctgttcctcggaaccaaaagagcctgacgaaaacactctaaatggccccagattgtttttttttttttttcttctttggaattattgtactcctatttatagtttttctgtttcctcctttgctgctaggccgtcaactgtcactttttattgctgtagtgtgcttgcttctcctggccattctctctgttaataaagctactcatagacttggacactagatctggaagcctgatggaattaaaaagttgaaagtaaacaagcaatgaaacaagggtgaattttataggatgtaagttaaatcttaatacagttgttatacaaatttaaaaagtaataaaggatttttagtatcacaagatcttttgtatatagtattttgaaaatgcaatttggctattcagatgcatttcttgtttacttttttacttttggctctagtccagttggtgcatatcttactaaagtaatctctggttctgaggaatcaaaacatactggagccagcacaagtaatgggaaggagatttattttaagttatcatacagaacccaactgaagaaagcatgtgtgatcaggcagcttctctccctctttctgttcctccctttgcttggttttccaatctctttgtccttgtttcacatctgctccattttccttttggcagactagttattctgcatctctgtaagtttttttggttactttaccctcataacactggcttgcatatggttttgagctgtcatgctgccagttttggcaacaagtcttcatgacctcgcatcatcagtgtcaacactatccacttcagcttctgtgtctctcagaatatgatttactcagtttgggccaagtgactgcccctagtcaaattagctggtcagagagcagagcacagcccctattatttaaggaatgtccttccagtctgcaggcagataggctctccaaggagattttggcaggggtgaaatgactggcattttgacctgagcgaaatttctgaatttccgagctgtgataggtaatgtattattacatatttacttttcctcttcttttttgctctttattcagcacttaaagtcctactaacaataaaattgtttgttggtgatattacctatcagcacctggagttagattatctagtctagtaaataattgctattttagtttttatttatgtaaaactacaaaaatgttaaagacatttcttcccttcagctcttttctgtcatttctcaggactctactactaaactatcattgtaaaactagtcttgtggtttggtttgtttctttgagacagaatatcactctgtcacccaggctgtagtgcagtagcacgatcttggctcactgcaacctccgcctcctgggttcaagcaattctcctgcctcagcctcccaagtagctgggactacaggcacccactaccacgcccagataatttttgtatttttagtagagatgaggcttctccatgttggccaggctggtctcgaactcctggccttaagtgat

SEQ ID NO: 587832 - DNA, 4001 bp, Homo sapiens
ttacccacacagctaacgtggcagagctaaaggctcagcattctttctactatcttactgcctagactaggccttcattaatcacctggtatccaaattaccacattatcctctttgttaaagtctgcttacaaatttccactggtttccccgagatgaagaataaatttcaagtttcctgtggcattaaaagccctccacagtgcaacctcagtttctcactgttctacataaaaaccccacactttagccaactgacctatttgttaaatatcttaacaaaacatatatagtttcaactctatgaattttcctacgcctttgtctctgcctggagtattcttttccatcttcactgctagtcctactcctctttcaaggcccaactcctatcttatctccacaatcattctaggtcagtaactataaataagcattactaaaagttactccatgctcttatatacaagtttacaattttctaaatatcgtctaaatattttaatattattctttactagaaggtggggaaaaaagttaggcagagcaaaggagatcagtgtatgtgtggtgttgattactattttaaacagggtgatcacagtctcattgaaagggtggcatttagcagagacctgaaggaggtaaaggaggtgttagctatgtggaaatctggggaaagagcatccaaggcacagaacagccactgcaaagcccctaagggaggaatgtgtctggtatgctcaaggaatagccaggaggccctaatatggctgaaaattaatgagcaaggcaaagactatctgagatacatgagaatgccaggttgtgtggggttaaggccactgtaagtactttggcttttattctaagtgagacagggaaacttgggtttctaaagtgacagagatagtttaaaatctaagtttaaaaggatcattcaagtgttgtgaacagatggggaggtattaaggatggtagcacagagaacagtttaaagactactgaagtaatctatgagaaagatgacgatggcacatcagtgaaggtgttgaggacatgttttgaaggtaaaactgtaaggatttcctgatggattacaagaggatttggcctgattaatcagaaggctgaaactgctatcaactgaaatggggaaggctatgaaacacaagttttaagagtgagccaagaccagaagttcatttttagacatttatacttgagatatctcttatacctaggtggagatgtatatccaaacacccgtttgacaagcccagagattaggaaaaaagtaaagcctagagatgtaaattttggagttgctgttatttggatggtatgtaaaatcgtgaacacagatgaaatcaccaaaaagtaaatattaaagagtagggaatgaggtctgtagcatcccaacattaagatgtaggggagaagaggcgaatccagtaaaggagacagaaaaggtggaagggggatcatggaggaattacactttaaagaagacaaaacctgttggtctatcctactagtgttttactcattcccctcccccatgtcaactacatcttaaaaagtatacaaagagcaaagaaggagcaagttaggagaagaaagaaacgatacaagcaaaataacaaaatgtatcttataagatataatcgattcctgttgagactggagggtattaaaacacttcctctgatatttctcagaattagaattctaacgaaagagctgtttagtctctgatcatcatagcacatgatataaaacaacgataattagagatttttggtttactgaagacttttgactgcatagtagtttcctggggctgctgtaacaaactaccacaaactggttggcttaagacaatggacatttctcttacagttctggaggccagaagtccaaaatccagctgggccgtgctcccactggggcttgaggggagaatgtgtcctttgactcttccagcttctggtgactataagcattcctcggcttgcggttacatcactccaatctccgcctccatgagcacactgcttcctccttttctgcgcgtcgtcttctctgtaatgggtctacttgtcccttacaaagacacttgtcacttgattttgaggctacctggataatccaggatgatcttatctcaagattcttaacttaattacatctgcaaaacccctttttccaaataacatttgcagattctggggattaggacatgaacatatcttttgtggggttaccatgcaacacactaaaatatggttctggaaatttttgctaaggacatcagtaaggtatgctaaattatgcaaaaatctaaaggatatttaacgtttgtgcataattttaaaaatgggccaggtgcagtggctcacgcctgtaatcccagcactttggaaggctgacgtgggcggatcacttgagtccaggagttcgaaatcagcctggccaacatggcaaaacctcgccgcttgtaaaaaaaaaaaaaaaaaaaaaaaatgattagctgggtgtggtggcaggtgcctgtaatcccagctactggcaggctgaggaatgagaatcgtttcagcctgggaggcggagggtgcagtaagccaagattgcgtcactgcactccagcctgggtgacagagtgaaactctgtctccaaaaaaaagtttttatttatttatttatttttatttttgagacacagatttgcttgtcaccctgcctggagtgcaatgtcgcaatctcggctcactataacctccacctctcaggttggagcaattctcctgcctcagcctcccaagtagctggaactgcaggtgcccaccaccatacctaggtaaatttttttttgtatttttagtagagacagggtttcaccatgttggccaggctggtctcgaactcctaacctcaggtgatttgcccaccttggcctcccaaagtgctggaattacaagcatgagtcaccatgcctgacaaaagttggttttatattaaagggtatggctataaggagaaatctatttgatatggctatgtatacaaccagaagtcacaactgcctaccaggtaaccactgccacccttgctttggataaaagaattacagtcattgtactatatacatcatataccctaagataacaggcttttctaaatggttactttattttccccacttacgcactcacactacttaccagttcccacccccacttacgcactcacattacttaccagttcccacctccactttccaaatgaccttatttcatgattttatttaaggatgcctatataaaaagtcccatttattccatacaaaaactgaaaaacagatttgttcaggcaatattaaatagatgagaggtttaaaatctggtgctcaaaccaacctagtcgcctctcctgattctatttaagagcatcttgtattgatttattgttactgattccaatgtgggaggtaacagtacattctatatgcaccagtctcatgggaacttctatcctgttttttacactgagccttgctctgactagttactaataattagaggatctcttttataacagtcttgtctgagtagcccagagtgtttcaaaggcataattaacttatactaatccaatgaaaaagatgatgaatatccttccttattttattttagagatggtgtcttgctctgttgctcaggctggagtacagtggcacaatctcagctcactgcaacctctacctcccaagttcaagcaattctcctgcctcagcctccctagtagctggcatgacaggtgcctgccaccaagcccagcaaatttttgtattttttagtagaggcagggtttcaccatgttggtcaggctagtcttgcccgacctcaaatgatctgcctgcctcagctccccatactgctgggattacaggattatacattgggaaagacagtaacgcgcaaagtcattttgtgcggaga

SEQ ID NO: 587833 - DNA, 4001 bp, Homo sapiens
actaacattagttgccaactgtaattttttcctcaaagacaccttgcgatgacattaaaatattttccatggacacgtaaaatttaaacttcagttaaattttatacagtaatttaaaaaaagagaacattaagcagggcattaaactaacaaattttaaaagtgtttttttagcataatttggtttattaagtcccaagacttaattctaaatttttaccatgaaactgtaacaaggaaagaacatttgaaaatacgatcatcgccattttctaaatagagaagtatttacattttaactcaattcagatagttcagtcagtgttaaagaagcaaaaacaggcaaacagggtaatggcttgcattataaacagaagtggtaaaatgtgtattaagacgggtaatggcaaaactgaaaataaaacttaaggcaaaccgtcagacttcaaacaaccaaaactcaatgaatctaggttaaaataagaaaagatattttaaaaaaatgaaaagaaccatgttctttaaaaaaaaaaaatgtggaatgtaaagatcacaatttaagacaaccgatcaaaggaaagggctgctttaagcctctactgtttactaacacttaaaattagcatttctagccaacatctaggtttgaaaattgcaacggcacttaaacgccgtcttttctaacgtcaccccaacagaacattctgcaacactgtggacagtaaacattaagcagagtaaagcatcgttcgtgtatttatatctccaagggtcaatgggaaaaaattaaacgtttctctctcccatatatagccttaaccactctcttccctctttttatttactgcccttgtcgcggggttaatgaaccctaaacttctttttcttcttcccattaatggaaatgggaaaaaaagagcaactgcagagtggaacccagataagaaaaactgaaaattcaaagtagtagtattacttgccgggcgagggctgggaacaccctaaaggcttagcacggggagacaatcccggaagacccccgttaacacatacttcaccccaaggctacaccattttggtgtgatgtgtaatttttgcttttgaaggaggtggtagcagtcccggactaaccttcctccgaacacagctcccctccctaaggccccaggcagcacggcttgcggggcgatgtcccggctccaaatttgcagcgaggcccggaaatcggtcccgttagagccgatttcacccgtcaggaatgcgttccgcccccgccgcctccccgcggcaaccgcccttgggtctcccccgctttaggggcaggagacagctcgaggggagcgccgcctcggcccgtcataatatcgccgggccggccgccggccgcacaggcaccaggaggacagggcttggggcggatcccacgctccacctcggcccccgcggcccgggagacgcccgcgcctgggccgggtaggggacccggagctgaccgaggcctgaccccctaagccggccacggccccgagcccacgctggacactggaggagacgcctttcccaccggacttccgaatccatttctgtcccgggcaggggcgctagggctgcggcccggccagagctccctgggtcgtaagcgagagccgccccttctctcccgctccggggcgcaagctcctccgggtgcccgcccgtacctttaactcctcagagcggcggcagcgcagggtggcgggcgagtaggcccatctcccagcagcggcgacagcagcctgaggaagcgcgggggagggtccctccgatgcgccgaggcgcctctcaaccggggcggagacgacggaggggaggagtcccgacggccgctttcccgaactcctcctccgcagttgtggctcgacggctgctcccgggaaccagcgccgcaactaccacctccccctcccgcagcccccgctttcccctcctcctcctcccacttcttcctcccgcccccggccgccccgccccagcgcgccgcccgcgtgctgtgcgtcatggcgtcacgcccaccgggcccgctgcgggcggctctggacgcggctgttcccttgcgcacgttcgttccgcgcccgcgcaggagccgccccgctgcacccgggtggccccgactgcggcccccacgcctgtccctggcggaggggacttcgcctcgagcgcgccgggcagtggggccggtgtctccctggccggttctccgtggcccagagagcgtctcctccaaggacaggtcggggtggctggagctgcgcccggttgaagggagttgccagactcggcgactctggctcttggcagtttgcccggcattattcattcctttgtgttctcagggttcacctgctagattggcaggccgagggagagaagtgccgggatgttgcagctctcggcgaggaaatgtcctttcccagaggacggcagcaccctgtgcgtctgcagccgccctcttagtgcacctgtctttgcagaggctgttaggaacagtacttagccacaatagcaagcctacgtgagggtttggagagtatcttccattcatctcttttatttcattttttttttactattttgcagtcaagtaatcagaattcctatttcatctctaatacattcctaattactttaatccagctttatttgttccttcgtctcatatcttttcagccagtcatatcccctttgaatgtttcaatctacactagtcttggtattcttagttgaataaacaaattccgtctgggcctggtgcatttcctcctggtttattctcttcaagatttagatcactctaacatagaatactgagaaacgaatgtgatagaggctggacagaatgtccatttgccatctgttacttaactaaatatatcactctcccagtccttgtttagtgtgtctgtgtaatttaaattagaaacaaaccaaggagccatggtctttccgaatgtacttggtatctttggtaacccagtaaatgtttaccaattagaaaattgaacaagctaggcagtttaggtttaagtgtctttggcctcgaatcttaaaggaagtaattatgggtatgtttattttcatttatgggaagttttaaagctgttatacctttaaatgctacttgaaggctgccagcgactttacatatgggatgctttaagcctacagatagcacaagaatagtaagttaagtacccatatataatatccttcttgaaaatatatcaatatgttggccggaattggtggctcacgcctgtaatcctagcactttgggaggccgaggcgggcggatcacgaggtcaggagatcgagaccatcctggctaacatagtgaaaccccgtctctactaaaaatacaaaaaattagctgggcgtggtggcgggcgcctgtagtcccagctactcgggaggctgaggcaggaggatggcgtgaacccgggcggcggagcttgtagtgagcagagatctcgccactgcactccagcctgggcgacagagcgagactccgtctcaaaaaaaaaaaaaaaaaaaaaagaaaagaaaatagatcaacatgttaaacaacatttcagcacagatggggcactggcttgaaaggggattttgaataaagaagctgtgcggaatgaaaatggtcttacactctgtacaacggtaatattttccagagatgctgcttctggctttcttgtcttcctaaaaattagaaggactttctattcttcactaggccaaataaatctattaaaaaacaaatacctattgaacatccccaacttgaattcctagaggcacctcagattcaggctgtccaagatgtagtttgttctttcctcaaagcatgcttctttcattcacccagacacaagccagaaacctaggattgttcccaggccccattctttttgtcccttccaattcataactaaccaccaagtcctgtttattataccccggaaata

SEQ ID NO: 587834 - DNA, 4001 bp, Homo sapiens
tgtgtgagagaatctctgggaactcctagaagtcactgggggaacttttaggtagagtgttgagattctgcatccttgtaggtgagtcttaagagcctatgataaagagggccttgtgtgtaaaacccagaacatgataaagattaggtattattgttgaataaaaacatttgtgttcattgattgcacaatgtcatcatttggaaagagggtgcaaaccaagtatttctgaaggaagtgaatcagcttttgccctgtcttaataatgtgcatttcctacagagtccatgggaagttcacagagtaactcaatagctcaactgaagaagaggaagagttggggtaccaagagaatattaaggagggatgtctaatacagcctcagggattgggggtaggagtgagaagagagggcaatttccagaggagagtctgtgtaaagttgagatgccagaggcaaaaagtggtagagatgccctccaggaagaaggcagaggtggtacaccatttacctggtgcacctgagcaagactagcaacgtggtcattaagtcttgacaatacagtgcccacttctgtgaaacagagctaccagccctccataacgtttttgagttctcctatgttagctgtgctccattcttaatcagttttaagaacgaatcagaatttgcatggaaatttagcaatgtatctttacatacattttcgataataaggtgtatcttatgccctttaaatttggaataaggcagtaatatacttaagggctacctagggaacgaacaaactgagcagcataaaatggttgaattctcccagaagtttaggctgaagaagtggtggaggtggaaagaggtaactgtagaatcttgaggccctccagtttcttcaccagtgacttccttatatgtagcaaggaagctggtttacaaaaactttttgccttaaaatccgcttctaatgacatgacagcttgctaccaatatcgtctcttcttctctgcagagactctttattgcctaaagttagacaatggagctatcatgcatactttcattgctctttaatattaagcagattttttaacacccttaggctcaactgtggctaggcttatctgtggcatcattagtttcaatcaaaccccacttaaaacaatcatttacagctgtgctgctcagaactaaatagttggcctctaccaagagggctgtgtcttcactctctcactcacttgacaaaacatgacagagttacatgcgtcatttcactaattatattttaagtttaattttctaccacatagtgtgaattcagacaagtcacaaataatgaagtagaaaaaatggaaaattgagaaatacagaatgtacagaatgttcattcttttagcaattcagagacttgatgttgcaagaaaaatcagttcatttcagattttcataagcctatggggcagagttgagagaggagattcaaaaaggaaaatcaccagttattcactgtggtagtcacagcattgttgaattacaagcagctgtcttcttctttagtgtattgcctagatgtctataagaagtatataatgcttttattgtcagaaacaaagtaaacattactcatttgaataaactagaatcacttgatttcctgatactgaagttccattctatttcaatatcagcatattgtgaaggttgctggcatagttaggtaaaagataattattaataacatttatgctttttctaacagttaaagacagaacacagatatataatctaagtataacatggaaaacaaaatacaactagcaaaacagaatattttccaaagaaagatttcaaatagttttgtacttaccacaacttgaaacgtcccttattaagaaaagaaaaagatgtttaagttgtttaaatagctcaaataaatgtcactggatatgtaacctcatttcgtgcaaagaaactaatgtctttggatttattctcagtatgtccagcaagggattgagtacagccaattaatttaatccatggtgatgctaatcaccagacagagctcaccctaaggagacaacagccagaagcaaaccagttcctagcatgctctgcagttgtgaaatcttcctcatgaaggtttcccttgcatcttctttcttgcctagtgttatcctccagaaaaagtacttcaccagtacacaagcatttctctcccagacaacttttaaccctcatttatttatgttaacaggagaaagttgttattgtgcaggctaaaaatgaaattgtttgacattttctcattctgataagtttctaagtcagtacttgctcctggtaatcatttaaaaataaagatctaggccttttgttttatttaggcactcttgcttattacctcattgatgtaattctgaaatgactgtgaacgtacacaatttggtgactcagcataacgcaggacaaacagcagaagcagcacacgatgaaatgctatgattttatgcttctgcatacccagcacgcttccactgcttcccttactcatactggggtttgaacatgtttcaggactttgtcacacataaagtccccagatggcacctgatccttctaatgactacctgtggtctaatcggacttgaagatgcttcacctaatcgggtttcctacggggcttcctgcctcagctctgaacaacaaaaacaaggtaaggggtcctctggggaaacaggaccaggttcaagcatgtgcgccacaatgttgtctccacaccaatcacaaaaggaaaaaggtcatgaaactgcacactttgcctcataaatactgactttgttgcaggccacctatgagagagaaatggagagaggagtagggagggatggggagaaagagaaagagtgaggtgtagataagagaaacagtagtgtccagctttgatacaaacctccatttataattatcactgtctacacacagacatggctattaaatcagtaaggaaatttgtgtttacagggtagcaataggcatgaattgtatcattaccagctccaaattgaagtacaaattcaaaaagtttgggatcagatatgatctgccattaaatagctaaggactaatgcagcatttctcttgactttatctttaattctataatctatgtctgataaacaattcacattgatcagttctgttttgacactgaaagtatttctgccagtgaggcttttggcattccttagactcacttatcaaaggtgggccagggccagaagcatcagcatcaaaagaatcaaaagaaccaaaaaaggtttcttttggagcacttttaggaaagataacatttcttacatataagacagcacaaaatgggctctccatttctgagcatctcccgtagtatacgttccactcccacaactccagttaaggacagagaccaggtatccctgttatccagtcgagctaccataccctctccctggtatcacttgtctctggcacatatcagtgtgtatctaaaccatggcttcccaagcttgaaggtgcacatgaatttcctgggatcttgctgcagtggttgactcagtaggcctggggtggggtctgagagtctacatttctaataagctgatgctgatgcttctggccctggcccgcctttgataagtgagtctaagaaatgccaaaagcctcattggcagagttcatattaggcttcttccctgagaatgacttcaattgccatggcctctgagattacctgtatgtcatatctgagctctgttaagttctgtctagtcactgctgttagagtggccagatgacaggagtggtgttaagcatacattctcagcataccactgagtcagtcagacctcagttcaaatcctgcctcttccactttgctatgtgaatctgcaagccatgtacttaattcctctgtctacttccctggccataaaatgtggaaaagtacctgctttataggctc

SEQ ID NO: 587835 - DNA, 4001 bp, Homo sapiens
agattgatttactgactaatttatatgacatacttattcaatgacacaggtctcttggagggagttcacaggaaagtaaccaagatgattaaaggattggaaaatgcgttttacagggaaaggttacagggacgggttatttaacttggagctgagaaagctgttgaacactgcatgcacaggccatcgagctggaaagaaccgaaggcttgtttagtccagaccccttgatttccacctaagagaccaaaacccaggagcagaggagcagagaactatgttgccagccacagtctacacttcgtgactgcaggtccagggatccctccaaaacaccaggtgtctccctccaacacacacacacacacacatacacacacacacacgtgcactcgtaaactaacacatgcatcacatgcacacacacgtcacatgcacacccacctgtatacacatgcacactcatgtgcacacacccacacccacatcacatgtgcgcacacgcacctgtacaaacatacacactcatgtgcacacccacacacgcatacacacacacacacacattaaacacagaggttcagaaaacggcaaccagctctcctcgtcccctcctgttagaagagagcagcaggcctgtctgaggtcactataatttgtaagaggatttctggaagatgtttatataaccgagagggtaaataaagaacgatgtggagtgcacatcttgaaggtgtgttctcactgtctgagatgcatttctgggctgtgcacctcccccagggaaggagtcctggtgccctcccgcgacctcctccaagcttccaccctgaggcagtgtctttgctccttttcccttcactgtgcagcagctggggagggagcctggggcagggggatgagctggctgtggggcatggtcccatggggaagtacagatctgaggcacagggacagttagctgcagccgcgctggacctcgtctgaggtctgggccatggatctctgctcacttgccgttggaaccactgatctcccctaagcctcgttttctccaccagaaaactgggacgggagactggcacttgactggccgctggggggatgtcattaccataaagagagcagaccccagtttgattttgtggcccttccatgacttcatctgtccgggcctcagtctcttctgcacaaatgggcccaggatgccagccttgaagctgggtagagaaaattcaatgacctcattgatagggaccttctatgccccttccttaccactctctctatttgccctgggtcttcagagattcttgaagtctcggtcctctaagaagcaaattggacacctccccagaatctgctcccaccccagctgacctcaccctgcaggaatcaaggggcagctgcccacctctccctcctctccaagagccccaagaaatcctcaggagggatttctccctctctgactccagcgactgcattgctcaccctccaggtccaggtgggagaaacagacaggctgtgatactaacatcctgtaaatcaacgagcagaaacctgaaactccactgtgtcgtgtttaaacatgatctgctcccaaacagcccagcaggccttgcagaagagaaccgatcctgcgtcaccgcaagcatcctgttcaagacatccctcccaggctctcaggctgaaacgcctccccacttgctgtgacttcccagagccaagactctctgcccctcaggtggctggctgaccctgcgggacataggcagctgctgactcaccgtcctccagggagcacaagggcatggctcagcccctaagcctcagggggacgtcctttggaggaaagtcaggccagggggaacaccgcctccttccctgccagtggctcagtccctctgggcagcagggctggccaccctcctccggacagtcctcggggccactctccttggcctgagagcctgaggccccagtcccttgggcaggagcccagcctcctgagctccaacagatggtccatttgcacagagacctgccaccctggccactctccccagagggagctggattatggcaaacccaagaggattagtgcgggaggccatctgcagagaggataattagcttaatggggttacacggattgttcctggccctctgcccaagggtacacttgtcaagactgttaaacacagcctgggggcttgcaggggagccctctgagcaccagcagctcccaccctgttccagttgtctgggtgggccatgacaggcctgcaggattgggggagcgccccgcccaccgtggtactgggcaggaacaccaggtcctgagtgggggacaccaggggaaaggtggggaactgttttccatctcccggaagaaagcagagaaggaaacatgatggtattgcatcgggcaggaggcagcacgtggaggcccgaaagaagcagctgagaagtcaacccgtcctcagccattttctccaccaaagccgaacagcagcttcccctcgaagggtcctccttcttcatttcagacaaaatggatcattttggttttaggttggcagtgcctatggggagccacaggagcctggaatgttcaaatcaactctctcggagggctggaaatttgttttttgtttgtttagaatacacttgtttaagtgcagggctgcctggaggcaggggacaaactgtgacctccagcctggcagtttcctccctggaaattaactaggtggaagggcagcctgtggaagtcatggggactcagggtgtgttgccatcaagaggcgaagatttagtgtatgtgtagtccgcattgaactgatcagttccacaaatgaaatcacttaagccttgcttctggctgacagacacagcaggtcagtcccagtgatcagatgtgtgtggatgttggctctggggtgcagatcacactgtaggtgaaagataggcttgcccaggtaattttaataagttagcataagcatcgtcaaacacagtagtgatcagccaaagtccagatgcttcatgcagagcacagaatacgagtagcgcaaaggcatttcagatgatgtacgtttggttcacatgtagtgagcacctacctgcaaagtgtacagcagtcattgctattcagtaaatgccagttcatccaaatccatgaataagcacagagttgcaataaaacatttcactagcttcttttccccaggggaatgtggggaaacattgtaagtaaagggaaaatataatttgttcaatgtccacacttataaaggagagtatacttagtggcctcaaagtggggttaccgcatattttatcagctaaaccaaggcactttggggagtgaaacaagacattatcaatttcatctggaagacaggagtaaaccgcaactgtccccaggcaatcagcacccagggctcccttacctcgaagaatgaccaagtgtaacatctctgattttgtgagttgcatagtcaaatagcctttgtactacagaaaacctacttcaatgattcaaagctgcaagacggtagctagaacttttgaacctgagcctcagaggtctttgtaccaaccaacaagagattcatggctcaatgtttcccaaatacctactatgttccacctgccctcttagccactactgaatatgcaaagaaacctcagagaagccaacatcaaattgtagccacaaaagataagccagttaaagtaaaataccaatcctagactttgacaacccttccaagtggctgaaagcagaatatgcaaagtgactattattgacagtaagtgctataaatattccaaagctagaaagactatcatgatgggaaggaggacatcactcctgaaggatgaaaaggagagggcattttgatccagatgaagcagaatatctgtgcatgaatttataccctctgctccgatttcatagccatgagggaccaaatgaaacaaaggaacaa

SEQ ID NO: 587836 - DNA, 4001 bp, Homo sapiens
ctcacgcgtgtaatcccagcactttgggaggccggatcacttgaagtcaggagcgtcagaccagcctggccaacatggtgaaaccttgtctctactaaaaatacaaaatttcagcgtcaaattagtagatactaatggttttaggaatcggaaaggagtcctatactatcttgccactcaattatgtgaatccacataccagcaatagtgctacaatgtattagttaaaaaaacacctcaagccgggcacggtagctcacacctgtaatctcagcagtttgggaggccgaggtgggtggatcacctaaggtcaggagtccgagaccagcctggccagcatggcgaaaccccatctctactaaaaatacaaaaattagccaggcatggtggcaggtgcctgtaatcccatctactcgggagggtgaggcagaattgcttgaacctgggaggcagaggttgcagtgagcttagattgtgccattgcactccagccggggtgacaagagcaaaactctgtcttaaaaaaaataaaataataaatggcacctcgggccccatcccagatccaatgaaatcagaacttgcattttaacatcacccatgtgactcctttgcacagtcatgtttcagaagcactactatagaagacaggctttaaagaaagtttcaaagaatggttagggaaaagccgaacccatgggacaagacagaaagggccctccaggctttgacggtaactacagacaccctatataaaatgctgtaagcagcttatgcatcaccacagaaaatttgctcacatagcttatactctgcaaggtccaagtttgtttggcttatttacaacaccccctaagttcaatttcaaaacagtgagtcaagcataaatcttgactcagaactgatttagcgggctaaactaggtgattctatgatagcctgcaactccatagcccagcctcaacttttcttacctagttttttgacactaaaacaagttcacacaatgaagcatcattaaagcacctcaaagctaaaagaaccaaaaaagcaggacacaaaatacatggaaaaaacagtaatgtgtctgtgtttccattaaacctcgatgttctgttttcactcctgccacacacacacatttctcctccaaaaataagctcacagaaggggagcacacgatttgggggtgggtcggggagacgggaatgaagggccaaacaccacaatcgctaccgtaattatcctgcaagtgttcgagttcatggtactcagattacaagtttacactcctgtatattcgttcacgatgaattcgcggtaggcgaagcccgttcagtctcttcgattacctcaaagctgggcagttgttagcgagaatgaccaatttcgctttgccttgtctgatcatcttcagagtctgcttgtaccccaggacgtacttcccacttttcataacgagttggagcctagagttgatcgactccagcgactttttctacaaagcaaacattaaatacggacctaagggcctcgcctgcaaccgcctcaaaaccggacccagctttttgaagccgagccccttaaacttccgaagtcgaggaccccaagtcattgagagggccactgggattccttctggggccctccaaatgccagcaggcatgctgtcacccccgtgggctcacatctgcccgccctggccaagacatctctccacgtgaatcgtcttccgggcctggcccgcctcactcaccgtcttctttgcggccaccatcttcctgccttaggagcgggacggcccccaacctagaagagacagagaacaggacaggaattttaggatccggagttacaaatggcaacccgcaaagctccccgcgctgcctaaacctcggtcggtaggagcccactcaccaacagcagccgctaagatggccggggaacgagaaaggaaagacttcccacaatgcaaagctcttcacggcagagccggaactgcgggaccggaagcggaaacagatcgcaagcagaaggggcggagcaaaagcggagggcagctgccggttgctattggtaccgctagctagaatggctgcgggggccgtacgcggctgctcatacctttaatcccagcactttcggaggttgaggcgggaagatctgttgcgtccagctcaaggccagcctggacaacatagaccacccctgtctctacaaaaaaataaaaaagaaataaaaaagaaattagccgggcgtggtggcgcgctccagtagtcctagctactcccagctacgccggaggctgaggcggagaggtcgcttgagctcggtaggtcgaggctgcagtgagccatgatcgcgccactgcactcagcctgggcgacagagtgagactctgtctcaaagaaggaaaaaaaagaatgacggcgggggtgttcttttccccctctgcgggcctttaagcttcgcggcgttgtgttgctgttctgctgcgagctgcggtctaactaatcgaggcgcttagaacccggagggagttcgaaaagccgactgaaggtgaggtgggagggtagatgagaagaggctgcggcggctgcgaccacggtctcaatgccgctgaattcatctttgtcctgaggcgcggctcttggagagccttgtgggtgactccgatgcgccgcagcacccgcatttactctccgcttggtagaagcagctgtgtcctcacccctgcggtcacccaagttacctgtcccctggagaacggtggcgccctgctcgagtttcccaaaactcgccttttgtgactgtgttagcgtgaacttgtgagccgagtttgcactgagagcgcgataaacaggtctaattttttaaaagtatttttgctgttaacgttggatcttggtataaatgtccagagacagaccactgaagatattaggcgctgaaaatccccacctaatcaatcagaccagtggataagctatatgagggaaacctcttcccctccttaattaagcctcaccaaaaaacgcgtgctgtaccaggaatcatttacatatatttatttaatactcacaaaagtcccatgagatagtaacctttttattgtccattttacatatctaggcctattgtcagagctaggaccagagcccaggtaacttaggtctcttcacaattaaagttgattcaggccgaatgcggtgactcacgcctgtaatccaaacattttggaagtccgaggtgagcggatcacctgaagtcaggagttcgagaccagtctggtcaacatggtgaaaccccacctctactaaaaatacaaaaagtagccaggtgtggtggctcctgcctgcaatcccaactacttgggaggctgaagcaggagaatcgcttgaacctgggaggcaaaggtagcagtgagctgagatcgggccactgcactccagcctgggcgacaaagcgagactccctctcaaaaaaagtaataaggccgggcgcggtggctcacgcctgtaatcccaacactttgggaggccgaggcgggaggatcacgaggtcaaaagatcgagaccatcttggccaacatggtgaaaccctgtgtctactaaaaatacaaaacttagctgggcttggtggcgcgtgcctgtagtcccagctacttgggagggtgaggcaggagaatcacttgaacccaggaggtggaggttgcagtgagcagagatcacgtcactgcactccagcctggtgacagagcgagactctgtctcaaaaaatagtataattactattatactttaattattattatattaattattataattaataataaaatatattttaaaataataaaataaaaataacattcattcaagtgtgtgcccctctttgatgagaaattaaccaagttgaattagattatcatagtacttgctttaatatttagtcataaattacttaacactgcaaatccagatatctgccttcctctatta

SEQ ID NO: 587837 - DNA, 4001 bp, Homo sapiens
tcatttactgacttcagattggggtacctgaagtgaaaaagcaaacataaataaggtgaccactgttaaaacatctaaaattcatgttgctacataaccaatttatcaaatagaaatcaaaggagaaaagagacttacccccatgcaatatatggctctacaatcctcagcatgttaatcgaagccttgttgagcttcacaaaggttccattgaagatttgacgaaggcgaagaagctgcaacacctttcgaacctttgggctcactccattgatactgtggtgaaaacggaccagaaatgcatttgcctttcatcgaaatttttattaatactaaccattatagttttgaatatcgaatcctacctaaacagataggaatcctctcatgttacacactgaatttctgtattctattaagagaagggataggagcttggggaacatggcttgcaactaaaccattagtgatcagcaccctccttgttctagcttcccctaaaatattgttactccggtgtttcagaatcagggctcccagaagtaatgtgaaggttttttttttttttcccattcaaacccgaatgcagtaaaactgaacttaccctctgattctgatgacaaacgccaatttgggttctgcaggtacatagaagttgccagcttttcttgccatcctcgccattcgaatttcagttctgtacatctgcctatattccttgtgatagtgctttgctttttcatagataagcttcctccttgcctttcgaagctgaaaaccaataatcagttattcataatttttagctcaatcacaattagcaatgccaatcattaaaaagaaaactacaacatgtttcctttaaatcttttcttgccacagtatgcaattacatcccccaccaaaaaaccccactaccttcagattgtaacattaggtagctaagcaattactcagtacagttaggaagtaaatcttgccaagaacattcacctcatcctcaatcccaataaggcgcctccttatgtgctagtgcctcaaaaagtttacttaccatcttttgggcaaacttctttctcaggcgcttgatcttcagctctgcgaaattccttcgctttttcttaagggtttctggcacagcaggaacctccttcttcttctctctaacgttaataaacaaaaatgttatcaatagctcaaaaagctcacagcgctgtattactcccgtactgagcagtgttgtttaccagaaatgctgtcactgactttagtcactagtaactttacttgctctggcatgctacagtgtacgatgcatattttagctccatgtcaataacctttaacaccatgttgcctaaaacgcaatcacaaatatgacaatagcaatacgtttttccctatttcaaccaagaggcccggcctccgacgactaattaaaaaaaaaaacaaaaaaaacacaccaacacccgaataacaaaatgtactagctgaaagactactgcaaggcactgaccccgagactttaagcgcaaaaattaaaaaataaaaataaaaaaaaaacaagccaccaccactctggttcaatcaggatccacatgttgaaagcaaaggcctggcggcagggaggcctgtaccaagcaccagccaaggacgaacacaattcagaggttctgcgcctcccccgaaagaccctctaccgaggactgggccgtcagccaaccgacgggttccacacacattccaacccgacatctcgttcccgggatctccaaaacctccgtcctaagaccgcccgcatcccaaccctagcctcaggtccccactggtgtcacacagcgttcacaatcaagcagggaggtgggcaaaggtgcaagctacggccagagagagaaaaagtgacacaaaaagtatctggctctggagatggagaaggattctcaagaggaccagaagcaactcactctacaccctccatggttccagccggaaaaagaggaagttggcgcatgcgtactgtccacttaaagacttcgcgagagaagccccacgactcataggtgtcttagaataagccggaaaagaatccagaactaaaaagccgccttgcagacgcaaagaactccctgatttagcctctttcaacaaactttcgggtaaaacttgtttgaagaaaatatatgcatttgattagactttttaatcaattcaagagcaaagagtgctgacaccttggcaactccgggtcctaatccccaggctgcgctgacaggattaggctccgttcctccccataatgttcccaggacgagcctcatggggacgaactacaaatcccagcatgcaccagtcttcgcccgcccggcgggagggcaacggctgaccaggaccgcaggcaagcaccgcggcgacggttccagccaggaaaatgagagcctcttgggccacgttccaaacggctagctgcaattcgaagtcacttttggccgccctcccggctccctgccgcggtagtcgcagactacacccctttcgccgctccgcgaggtccttgtcgtcgctccagcccacagggctgtcttccgcagcgcctgatcgcaggcggggcggtctggagtgctctagcttacgaaaagtggctagccagggaccagtggggaccggacggccggaggaggatggccggggctctgctgactgccgagctcggcaggcggaggccaggacaccccacgggagggggcgtgagctgcgaagggaggtgcgaggagggctgaggttgcggccacggccgtgtgagaggggctacccggctcggctccgcggacggctggcgggctgggggctgggccgggggcggggtgcgcccgggggcggggaggccgggcggagggagggccgatgccgaggctggcgcgggctcttcccggtcgcggggttatatagcgcggagcgtggagcccgctcagagccggcccggagcgctctgacttgcaagcgggctgcgctgcggagcccagtgcccgagtgacacccgcggagagtgcagggccggggaacgcgagccctcgggggcagctgcaaggcgttgggcagcgcttgcctgcgccgagcgagtctccccttcccggcgctccgccgccccgcaccccactctcccaccctctcgcaacttgggtcgagttgacaactcccgcggcagcccgctggcccgtgccgcctccgctgcgcacccctcccccggggtgagagggagccggcgcgccggttccggggacgctcgggcggcagcagcttggccatgagggcagttcgagtagtctaactcgcggctgtcaccgccactgcagcggagccggccggccgggcgctgcgggacgggcgggcggctgccggcaggaggcgccgagccgggtgactgccgcggcgggcacagtccggggccacagcgccgagcccgggcgggagtggccccgcgcaggcagggagcggcgccgcgcactccaacccggcgggcacctcgggggcgggcgcggggcgcagccttctcgtcccggcctctgtgacaagcgccccggagccgggagcccgattgccgggctcggggtgggcgcggacgcaggcactgggctcgtgcggggccccgggcgtcgcgatgaacatcgtggtggagttcttcgtggtcactttcaaagtgctctgggcgttcgtgctggccgcggcgcgctggctggtgcggcccaaggagaagagcgtggcgggccaggtgtgcctcatcaccggcgccggcagcggcctgggccgcctcttcgcgctggagttcgcccggcgtcgggcgctgctggtgctgtgggacatcaacacgcaaagcaacgaggagacggctggcatggtgcgccacatctaccgcgacctggaggcggccgacgccgctgcgctgcaaggtaacctggacccgcgcgggagcattgttgggtcaagcctctttccaccccgcgccc

SEQ ID NO: 587838 - DNA, 4001 bp, Homo sapiens
gccagccttcaagatgggtttgtcaattcggccacctccagccaccacacctgtaggggatcagatacctcagggaacccccagtcggtcagagcacccccacctcccctcaatctcctgtcatgcaccttcccaatactgcatccaactacccagcaaaaagcccactcgcctccaccctagggagccccttgcaccctgtgagctgacatccagtttcttcaatccacaatgggcaggcaagccaaggccctcacctccatcacctagaatgctggctgagctccaagcgcagggaagcacccccctcaccatgtgtgagacgtcaggccggccactcaacctgacgtaagacacttgattcagcctgccccatctcagctttacttattccaggaacacaacctcagagcctcccctgtgcgaggctgagttcatcacaaggattccaagatgttcccaaacagcacagtgagttaacctagactcaaatcctttttcactcactcagtaggcgtctttgagaaagccacaatctctccctgccttctctaaaaaggctgttaaccaactgcatgcaagtgcagcaatcaggaagcccacggtagaatccaagaccctggtgacttcgtcccaatctcatttaacgcctcaacagcagtaaagcaggtactgttgtgcctgttgtacagtgatgacaactgagactacaggatgagctcaaacttacagaacccaagttttagaacaacaggtaatcgaattccagggaccaagtctagccactggctgtccaccggcactcacagcatgttcacccacagccctcagcattcaactgctgcctgatactcaccaaccacagctctgttggctgaggagataaccttcttggagccggagggcagcttcacacgggtcttcttggtctcagggttgtgggagataacggtggcatagttccctgatgcccgggccagcttgccacggtctccaggcttctcctccaggcagcacacgattgtaccctcaggcatggtgcccacagggagcacattgccaatgttgagctgggctgcaaggggaagcagcatcaggccgtcagcacagtaagaaacaatgcgaaccccctcgctctaggcaacccgcgaagttgcgagcacagcattcaacatccagcctcccggtacaactctctcggcacccaccggtggccactggtctggccacgcggatgtccccacctgaagcttctgcctgcgaggttcccatatcggcttaggacgttaactcctcaggcaacacccagacccctccccaccccgaccttccttccccgccgcgatgctaacccttcttgccgcaatacacaaactggcccgtgtgaatgccctcggcggcaatgaacagctccgtccgcttcttaaaccgatacggatcccggaagaccaccttggcgaggggcgcgccgcggcccgggtcgtggatgatgtcctgtgggcagaggcggcgtgagtgcggcgttccggccgggcgtcccttcccctcccgccccggccagcgttccgcaccttgacgatgcccttgatgtagccgtgccgctcagcgaaatccacggcgcgcaggcgcgcagcgcctttacggtgcttcacgtgcgcgcggaacacagacccggcgcccttcctctgtccacggatcacacggcccatggcgacgggtcctgggggcgactcacgattagcgcggccgggcggcccgggtacccccgccagcccggctttccgggaccccgcccccgaggccgccgcgcccaccactccctaccctctccgcgggcgcccgcaccggcatcctctcaggagggccggtccgggtctcagcgcgcctcacggaagaggatggcggcggatactgcccatgccgcaaggccgcaaggatgacctacctgttcaccagcgcggccgaaagaggaaacacggcgtcagcgagcggccttatcttccggggcggggcccagggccgcgacaccttccgggcgcgccacggccagcctagcgcggtgcacgccggggcttgtagtcaccagcggccgccggccccgcctacttctcctcctccagggcccccgcgcaggcgcaccaggagacgcggctgaaggtgtcctggtgtgcgtgggctcggaaggagggtgcaggagtgctcggctttcaccggggtctccgggagggcaggtgttttctgagtggccgaggaggcgccaagtggttgagtgacctgtccagggtgtcacagagcgacccactccgggccacggggtctggggctcccggcttgcctggtgaggggcttccgtgtaggccgagggggttctcgctggtgcagagcaggagatgggcaggggagacgcgtggacccactcgtggaacgtcatggtttgcaggtggcaaatgtccgtctccctgatgaacgggcgcttctggacgcggggaccttatccactgtaggcccttggagaggtcgggcgtcgaggagaggagccccgggatccttgccgagggtgagggccggccggcccaggaagtggggagggccaagctggagggtcccgggtcgaggaagaaggagcggggatgggctgggtcacatgctgcggagtggacgaataatgggagactggaccgtaccctgaccagaaccctgtgcgggagaggtggggaaggagcaagaaatggaggctgggaggggctgtgggggcctgagctggaaagagtcagcccgactgggggtgtcctgcggtacgtgctgtggagaggggcttcgcggaatcgggcccctaacgggtgggaccccgaggccgcgggtgggggatggtggggaagaggttttccaggagagagtccctggctgagtgagcactgtcgagcacacgcgaggccgtgggtggggaggcagcaaggaggtgaaggcgggggtcccagtgggcgggagaggcttgctgtcggtactgggaggtggggtgtttcctagaccctgcaggggctgaggcagggttgacatcgtgagaaggagacaggagagggtggaagggtgtcctgtgcccgctgttgctcacaggggagaggaggggctgctgcaggaggccctcccctagggtcggcagggggatggaggaggagctgcccggtggggactcaggaagcagcacagcccacagctagggccaggggctgaggggcaggactggaccctgggggcagggtgaggggttctggggtcagcccaaaattggcccacaggcccagcctgtccgtcactcctgaacaaatctgcttctctggaggagcagaaggagagttgggtgcgggatagaggtgagaagagtgcttggacacacaggctgtggggtccccaagatggtctcacgggtctctgggatgagatgcggctaccaagaccctacgtgcagccaggagactgaccaggccgctttaaggctggaagagacatggccctgccagcatccacctgacagtcctgaggactgtgtgactgggctcagtcttgaccttcacgggagaccacacagcctggtacacagcaggggctatgcagttctgggtcacttgacagccactccagacgaggccgcaagcactggacatggggttttccagccttctggggtggagccatctttcttaggccaggattagtccctccccacacagtgcctctgcttgtgctagtggcctggtgacctcccttatgccatccgacgtcaccccaacctgctgttcaaactttattgttagaaattatttatttccggccgggtgcggtggctcatgcctgtaatcccagcactttgggaggccgaggcaggcggatcacctgaggtcaggagttccagactagcctgatcaatatggacaaaccccgtctatactaaaaatacaaaagttagctgggtatggtggcaggtacctgtaatcccagctact

SEQ ID NO: 587839 - DNA, 4001 bp, Homo sapiens
ggttacttacattcatggccacaccccgtactcgtggccagcagttcctctttgccttatatttgtggtacgcccggccagccttcaagatgggtttgtcaattcggccacctccagccaccacacctgtaggggatcagatacctcagggaacccccagtcggtcagagcacccccacctcccctcaatctcctgtcatgcaccttcccaatactgcatccaactacccagcaaaaagcccactcgcctccaccctagggagccccttgcaccctgtgagctgacatccagtttcttcaatccacaatgggcaggcaagccaaggccctcacctccatcacctagaatgctggctgagctccaagcgcagggaagcacccccctcaccatgtgtgagacgtcaggccggccactcaacctgacgtaagacacttgattcagcctgccccatctcagctttacttattccaggaacacaacctcagagcctcccctgtgcgaggctgagttcatcacaaggattccaagatgttcccaaacagcacagtgagttaacctagactcaaatcctttttcactcactcagtaggcgtctttgagaaagccacaatctctccctgccttctctaaaaaggctgttaaccaactgcatgcaagtgcagcaatcaggaagcccacggtagaatccaagaccctggtgacttcgtcccaatctcatttaacgcctcaacagcagtaaagcaggtactgttgtgcctgttgtacagtgatgacaactgagactacaggatgagctcaaacttacagaacccaagttttagaacaacaggtaatcgaattccagggaccaagtctagccactggctgtccaccggcactcacagcatgttcacccacagccctcagcattcaactgctgcctgatactcaccaaccacagctctgttggctgaggagataaccttcttggagccggagggcagcttcacacgggtcttcttggtctcagggttgtgggagataacggtggcatagttccctgatgcccgggccagcttgccacggtctccaggcttctcctccaggcagcacacgattgtaccctcaggcatggtgcccacagggagcacattgccaatgttgagctgggctgcaaggggaagcagcatcaggccgtcagcacagtaagaaacaatgcgaaccccctcgctctaggcaacccgcgaagttgcgagcacagcattcaacatccagcctcccggtacaactctctcggcacccaccggtggccactggtctggccacgcggatgtccccacctgaagcttctgcctgcgaggttcccatatcggcttaggacgttaactcctcaggcaacacccagacccctccccaccccgaccttccttccccgccgcgatgctaacccttcttgccgcaatacacaaactggcccgtgtgaatgccctcggcggcaatgaacagctccgtccgcttcttaaaccgatacggatcccggaagaccaccttggcgaggggcgcgccgcggcccgggtcgtggatgatgtcctgtgggcagaggcggcgtgagtgcggcgttccggccgggcgtcccttcccctcccgccccggccagcgttccgcaccttgacgatgcccttgatgtagccgtgccgctcagcgaaatccacggcgcgcaggcgcgcagcgcctttacggtgcttcacgtgcgcgcggaacacagacccggcgcccttcctctgtccacggatcacacggcccatggcgacgggtcctgggggcgactcacgattagcgcggccgggcggcccgggtacccccgccagcccggctttccgggaccccgcccccgaggccgccgcgcccaccactccctaccctctccgcgggcgcccgcaccggcatcctctcaggagggccggtccgggtctcagcgcgcctcacggaagaggatggcggcggatactgcccatgccgcaaggccgcaaggatgacctacctgttcaccagcgcggccgaaagaggaaacacggcgtcagcgagcggccttatcttccggggcggggcccagggccgcgacaccttccgggcgcgccacggccagcctagcgcggtgcacgccggggcttgtagtcaccagcggccgccggccccgcctacttctcctcctccagggcccccgcgcaggcgcaccaggagacgcggctgaaggtgtcctggtgtgcgtgggctcggaaggagggtgcaggagtgctcggctttcaccggggtctccgggagggcaggtgttttctgagtggccgaggaggcgccaagtggttgagtgacctgtccagggtgtcacagagcgacccactccgggccacggggtctggggctcccggcttgcctggtgaggggcttccgtgtaggccgagggggttctcgctggtgcagagcaggagatgggcaggggagacgcgtggacccactcgtggaacgtcatggtttgcaggtggcaaatgtccgtctccctgatgaacgggcgcttctggacgcggggaccttatccactgtaggcccttggagaggtcgggcgtcgaggagaggagccccgggatccttgccgagggtgagggccggccggcccaggaagtggggagggccaagctggagggtcccgggtcgaggaagaaggagcggggatgggctgggtcacatgctgcggagtggacgaataatgggagactggaccgtaccctgaccagaaccctgtgcgggagaggtggggaaggagcaagaaatggaggctgggaggggctgtgggggcctgagctggaaagagtcagcccgactgggggtgtcctgcggtacgtgctgtggagaggggcttcgcggaatcgggcccctaacgggtgggaccccgaggccgcgggtgggggatggtggggaagaggttttccaggagagagtccctggctgagtgagcactgtcgagcacacgcgaggccgtgggtggggaggcagcaaggaggtgaaggcgggggtcccagtgggcgggagaggcttgctgtcggtactgggaggtggggtgtttcctagaccctgcaggggctgaggcagggttgacatcgtgagaaggagacaggagagggtggaagggtgtcctgtgcccgctgttgctcacaggggagaggaggggctgctgcaggaggccctcccctagggtcggcagggggatggaggaggagctgcccggtggggactcaggaagcagcacagcccacagctagggccaggggctgaggggcaggactggaccctgggggcagggtgaggggttctggggtcagcccaaaattggcccacaggcccagcctgtccgtcactcctgaacaaatctgcttctctggaggagcagaaggagagttgggtgcgggatagaggtgagaagagtgcttggacacacaggctgtggggtccccaagatggtctcacgggtctctgggatgagatgcggctaccaagaccctacgtgcagccaggagactgaccaggccgctttaaggctggaagagacatggccctgccagcatccacctgacagtcctgaggactgtgtgactgggctcagtcttgaccttcacgggagaccacacagcctggtacacagcaggggctatgcagttctgggtcacttgacagccactccagacgaggccgcaagcactggacatggggttttccagccttctggggtggagccatctttcttaggccaggattagtccctccccacacagtgcctctgcttgtgctagtggcctggtgacctcccttatgccatccgacgtcaccccaacctgctgttcaaactttattgttagaaattatttatttccggccgggtgcggtggctcatgcctgtaatcccagcactttgggaggccgaggcaggcggatcacctgaggtcaggagttccagactagcctgatcaat

SEQ ID NO: 587840 - DNA, 4001 bp, Homo sapiens
tatttaaaatataaaacactgaaaatataagtatttttaaactaagttttagttcctaaaaccctaaaacttagttttagtcctgcctctgccacttaatccttttttaaggacgttaaacttggttaatttaaaaatattagttactagctttttaacacgtgcctactagcgcactaggttctcaaccatgggtgtgcattacaaacgccccagaaaccttaacaccccataccaatcagaatttatctagagtatgccaaagttataaactgccagtgtccaataaaaccagtcaggtctcacatattatgtagttaacggaatccagttttcaaatgactcaaacgacaacgaaaacaggatagaccactctaagatacccatatattccacctgaaaagtggaagtctcatagtacacctttatattcctaaaatctgccagtattctgaataaaaaccaacagaagttaacaactggtcatcaatttattaaaatagttgacttaagcatctgcaatggtgacttccacctcaactcctggctcaatactgatggaagtaatctgcttaacaatctcagaaggactgtgcaagtcaatgagtcgcttgtgaattctcatctggaaacgatcccacgtcttagaaccttcaccacaaggagtttttcttgtagtgattctcaaagtctgtaacaaaagacaaaggaaaccaagtgtttatcgttttatacttatccctagaacatctggaaaatcattacttctaatcatttcattagtttccctttggtatgattccaatttacactaatagattttcaggtaccatgggttgaaaatgccaggtctgttttcactgtgctaggacaccacccttagagcttgcgcctgttaagcaccaaagcacaccaagaacacagcaacaataattcaacaatcatatctaaacattagctacttactaggaaccgcaatctaccaccgatttctatgtgcgtttgtagacagcatcagtgttaacaattttggcagccgaactccttaaagaacctgaatttatgcaacatccggaagcaactcctacttcctgcccctccgatttactttaccttggtaggcattcgaactggtcctttcactttgagattcttttcttttgcgcctcttatcaagtcagcacacactacaggaaataaaagacctctcagtataatcgaaacaattaaaatcggcttaaggccttcacttctgctggctcagaatagcgtataaaattatcaccgttactcaacacaataggtacctcctcatcgccagctgtatgacagtaaaagcaattttaagccacgctttacttttttaagtaacttgtcactttagttcttgcagtccaccttctacactaacattaacgagtaaagctcgtcgcttttcgcccaattccccctcccccccgcataacgaatgcactgacccttttccaaggattttacgttgcggcttgttagggtgattcgaattcggtgaattgccacctccggctccacgggtgtttttccggtatccttaaaagcctattattagatacatgaaaaagaacaataagccaaaaatggtctgccacttctggagaaaggcagcttccggaagcttcccgcgtttccccaccatttcaggagcgcctttccgcccctacacgccccggcatctgccctcaggagcacgaactcgaaaccggggtccccccggcgcccgagccctgcgttgcgccgcccgccgccgactgccgcctcaccatggctgttgcgcgcgggcttcctgaccgacttgttcctcggcgagagcgaacagcggtgagtcaggagcaggagcgtgcggaccaaaaatcctcagcccttacgaccgcgtcttcctcaaaaagaaaggggtgggacttgagcaacgcttatatagcacgcttgcatccgggtcccacacgccccggaacaggaaatatcccgggccctagaggcggtcgcacaagggcgagctggagcactagtggagttggcgggaaaggcacggctgcgggcgccccctgtccgcacggaggagccgaagtcccgcagggtggggtccccgcctgcgccgagagggccacctggtcgagagaacaggcgacacggaaacctgagaaactcctctgtctggtgcacctaaccctcttcctcataaagtgcacacgaactctggtttttccgttgcaaattttgctttctacatagaccataccattcgttgctctctgaggatgaggtaacttctctgagcttagctgacatgagcattggcagaaatgcttctcgtaatctggataacttacgttagaattagtaagcagttatttttcatagcctgaaacgtcctgttgtgatatttcagctcctggcttcccagtccagcagaagtatctacatctatttctggaaaggacctgaacttggcttctcgtccttctggaaagtgaggcgaaaatgccaggctgcgcagctatcctgaggcccggcctggaacctggctagccacccagtcctgatacctcatctcctttctgttggataaagtcattggataagatcccccagggtcttcttaatactgaacatctgttcataatcacataagtgaccaagtatagtggaaaacccgaatggtcaactgagctgagcagtgggagagagcgcagggtgagctcacctacacctgagcaagaagccggggctaaatacgtggaaatcactgagatggattttgatacagggcagaaagaagagtaaaatcatctcatattactttccacctgaagctctgagccgaaagagttatttgctcaaacactctgaaatggggagggacagagctctgacccctccgtccaggcctgtttgttgttttttttttttgtttgttttgtttttttttttttgtgagacggagtttcattcttgttgcccaggctggagtgccatggcgcgatctcggctcaccgcaaactccgcctcctgggttcaagcgattctcctgcctcagcctccggagtagctgggattacaggcatgcgccaccatgcccggctaatttttttttttttttttttttttttagtagagacggggtttctccatgttgatcatgctggtctcaaactccagatctcaggcccgcctcggcctcccaaagtgctgggattacaggcgtgagccaccgcgctcgccccgtcaggactctttcttgaggttttgtcttctgttccttggtaggaaattatgtttgaaactttaatcaaataatagcattgtcttatttggtgataattggaacataactaataactgggtttctttggctcacgatacgtatgaggttttttgctgccattttaacaattattttaaattttcaaatttggatgttttccagttcagttttttgggttttttgtttgtttgttttttgagatggagtctcgctctgtcgccgaggctggatgcagtggcacgattttggctccccgcaacctccacctcctgggttcaagcaattctcctgcctcagcctcccgagtagctgggaccacaggcacgtggcaccactctcagctaattttttgtgtttttactagagacggtgtttcaccgtgttagccaggatggtctcaatctcctgaactcgcgatctgcctgccttggcctcccaaagtgctgggattacaggtgtgagccacctatcccggccccagttcagttatttttaaatgtaatccattgtctgtaaatactctcttagtagaattttcagcagaaattctgaaaacctgcattcttattgtgctagctgtaacctgagacttcataacttagaggtttaacttattggtatggctgtgtgcgacaaatagacaaaagcacaattgccctgctccctggggtgtgatcagccaccgctgtagtactgcctg

SEQ ID NO: 587841 - DNA, 4001 bp, Homo sapiens
cagttggaagacatgcctgggcatgtcaggacaacaatttaggtcaagatttcccagcaagcacttacgatgccccaatctaggctggcatcataccaggctcttacctcctatccagccccaattccaccacttccgtttctttgcctttatgtctcttctacttctgtaaaatagctgtatgttgtcatagtcatacactacttgtaagtattattttcacttctattcccacaaagtctgacggaaccaatgggatacccgcccaggtgcaagaacttggttttaaatttagctcctctactgagtcctgggcatgccatttaatgttttctggcctaaactttaccttgacaatagactatgaattagattagcaatagttaactctgagaaattgacaataactatggacccctttctcagaagattcacatctgcacatacaaaatctacatatcacttcaggagatttataaagccccttctagtctatctatggaccctttaagacagtggggggttttttgtttttgttttaatatgtgtaccaggatcacctgaagtacttgttaaaaatgcagatctcaagagattttgattcactatgtttggggtgttggtccagcaatttacattttttacaaaatactccaagtgactctgatgcaggtctcctattatgcactctggcatctagaaaaacaaagtgcttcaggcaacccagcatctcaagttaaaaacttttggaccactaaaattcattctgaatctaaaattctgtctgtccttgcgggtctgtatcattgagataggagtaataaataaaatgtaatatccaggtgttaagcctgaatcactgctggtgccattagcataaacagcagtctgaattttcccctttgagtagggaagttggtactaaacgcatttgtttcaaaacaggaagaaaaagcttgagggatatttacagttagttactaaatgcttacaaaaatcaagttaaataaaataaaatctcaaacctggaatctacaactttctaaagaaatgtagggccaagcatgaatctcttggggtggaaacgtttgtttcccccaaatcttcacagtattaaatcaaagataccacagcaacaggttccagtagtacaaaaagcatttctcttgtccacaaagggcttagaagtatttgcaaaatgacagtgtttgaaaattatacagcaacagtttaaactaccatacaatcctacagtctaacaaattctggtttatttattttaggtacttttatcagcataaacaacttggatgaacaacttgggcttattaagcacctacaattttcgtggcactttgcataaagcattttacttaattctctctgaagtatcacttccattgtataaaggaagaaagtgacaccccgaagattcagttagttaaggagccgggcctgagcaaaactggcctcctaccctgattttttcactgggaggaggtcatgaggatttcgtgtccccttctacctgtcatcttcaccccagccacctgtgtcaatttccacacgcgttctccaactccttgtcaccatcccaaatggtatgcacctctccagcagagccgccacagtcctctttccttgcctcggtttccctggccagggctccaaaacagggaaggagggtgggagagcgtgaggcggataaacgcaggggtaagtctcaccccggcctgaggcctccaagcgtcgtccttggctggccccggggcagagcagcgagcgggacgcaaacccaaagtcagctccttcctccgccctccccggggacggcctccccggcgctcgcaacgacgaagccaggctgcggcgagggcgggcggacaggcctgtcctgaccgcggcgaataacatttcctacagcggtcctgcaacttgcaatctaacgggctggcgtgactgcggtgagggggaagacgcaacagcaacatttacctcatcctgatccagcccggccgcttccggcctttccgggtcgcccatcgcgcagactccgccgaagctacgggcgctgagggaactgagctcctcaggccacctccaactacgacagcacccaggtggtccgctggtccgctgggtccgccccgcccccagctctagggactcggccggccccgccccgccgcgccggtcctgctttctcgcctgtccattgagtgactctccctgcgccggcccggccccgcctcccccgcctcggggctccgcctaacttcggccagccccgcctccccgcctgcggcctaagggtttctccccgcctcggccgacccgcctcccctactgcggcctaagggatcctccccgcctcggcctgccctgcctcccagcctgtggcctaagggattatccctgtctcggcaagccccgcctgccttggggcaccgcctacctctgccagccacgcctcccctgcctcggggctccgcctaccccggccagccccatttccccgcctgcggcctaaggaaatctccctgcttccgctggccccgccttactctgttgcaccgcccagtcgcccggctttccactgagggacgccccctgctctggactgcttagcctactccagctggccccacctcacctcatcggccccgcctcctccgctcgcccactccgggcgcccactcctgaggagctatcccagagtccgcgcggcctcgccttcccggcccgctcaccaccccgcctcgtcccacctcgcctcgccctccccgggctctagccacttggtgcggcaggtgtcctgcaggccggctcgagattcccgagctcgccctcgtggtgttccaggaacacggtactttgcgctagcctggcctgtcctgagagactgcgggaggcgaagagaacgcgctgttgctgtgggaagcgccggggacgggacagctacaccgccaaacacttcgctagggaaagggctggctggtttcgtgcgtaaacaaccgaaaaggggaagtgtctgggggaaagtgtgtgtgtgtgtgtgtgaatgcgggtgagtgagggggagagggacacgttactaaagtcaggcaaatattttgaaaaaaatatattttgaaaaaaatagtttggtctaacaaaaataaaatggaagagagatttgtttaagtagtttgaagctgaaagattgacgggatcttgccatgacctgaacagcatgcacctgttttgtggctggctgaaggatggtaaataggatcaagatctcactttaagcgttgaaaatgctgaaagccctttctcaaacctgccatagcgtaggggtagacagtctttcttaaagcaactactaggggtcaaatgctgagtgaaatttttttcatctgtgaactttaaataatagccacatacattctgctaggcaactgagtctcaatttactataggccacgtggcaaataatcagattcaattaaagtcatcaaacaataattgtgtgtcgggcatcacgtttaggtattcaagatacaaacatgaatgagtttggtgaaaaagtcatatcatcatgggcatgaattctagttccctcacttattagctatgctaccttgggtcaattaacctctctgagactcagctttctcatctacaggataagaataataatcccttcctcataaggttgttgtgtgaatttaataatatattacttgtaaaacacttattggggtgggaaattaccttgatgcaatggtagcttccacgtacgagtcaggccatcccagagggtcatggaactcagatggctgagttcaaaaggctcagatcaaattgagatgcctgagtcacacagtttattaaatcaatttattttcattttaaataagtttattcaaacaagacatttgacttgaaaggaaaactaggatttttttttaagagtaatgtgtcattactgaaagattgccttacatgtaatagccacg

SEQ ID NO: 587842 - DNA, 4001 bp, Homo sapiens
aaatttagctcctctactgagtcctgggcatgccatttaatgttttctggcctaaactttaccttgacaatagactatgaattagattagcaatagttaactctgagaaattgacaataactatggacccctttctcagaagattcacatctgcacatacaaaatctacatatcacttcaggagatttataaagccccttctagtctatctatggaccctttaagacagtggggggttttttgtttttgttttaatatgtgtaccaggatcacctgaagtacttgttaaaaatgcagatctcaagagattttgattcactatgtttggggtgttggtccagcaatttacattttttacaaaatactccaagtgactctgatgcaggtctcctattatgcactctggcatctagaaaaacaaagtgcttcaggcaacccagcatctcaagttaaaaacttttggaccactaaaattcattctgaatctaaaattctgtctgtccttgcgggtctgtatcattgagataggagtaataaataaaatgtaatatccaggtgttaagcctgaatcactgctggtgccattagcataaacagcagtctgaattttcccctttgagtagggaagttggtactaaacgcatttgtttcaaaacaggaagaaaaagcttgagggatatttacagttagttactaaatgcttacaaaaatcaagttaaataaaataaaatctcaaacctggaatctacaactttctaaagaaatgtagggccaagcatgaatctcttggggtggaaacgtttgtttcccccaaatcttcacagtattaaatcaaagataccacagcaacaggttccagtagtacaaaaagcatttctcttgtccacaaagggcttagaagtatttgcaaaatgacagtgtttgaaaattatacagcaacagtttaaactaccatacaatcctacagtctaacaaattctggtttatttattttaggtacttttatcagcataaacaacttggatgaacaacttgggcttattaagcacctacaattttcgtggcactttgcataaagcattttacttaattctctctgaagtatcacttccattgtataaaggaagaaagtgacaccccgaagattcagttagttaaggagccgggcctgagcaaaactggcctcctaccctgattttttcactgggaggaggtcatgaggatttcgtgtccccttctacctgtcatcttcaccccagccacctgtgtcaatttccacacgcgttctccaactccttgtcaccatcccaaatggtatgcacctctccagcagagccgccacagtcctctttccttgcctcggtttccctggccagggctccaaaacagggaaggagggtgggagagcgtgaggcggataaacgcaggggtaagtctcaccccggcctgaggcctccaagcgtcgtccttggctggccccggggcagagcagcgagcgggacgcaaacccaaagtcagctccttcctccgccctccccggggacggcctccccggcgctcgcaacgacgaagccaggctgcggcgagggcgggcggacaggcctgtcctgaccgcggcgaataacatttcctacagcggtcctgcaacttgcaatctaacgggctggcgtgactgcggtgagggggaagacgcaacagcaacatttacctcatcctgatccagcccggccgcttccggcctttccgggtcgcccatcgcgcagactccgccgaagctacgggcgctgagggaactgagctcctcaggccacctccaactacgacagcacccaggtggtccgctggtccgctgggtccgccccgcccccagctctagggactcggccggccccgccccgccgcgccggtcctgctttctcgcctgtccattgagtgactctccctgcgccggcccggccccgcctcccccgcctcggggctccgcctaacttcggccagccccgcctccccgcctgcggcctaagggtttctccccgcctcggccgacccgcctcccctactgcggcctaagggatcctccccgcctcggcctgccctgcctcccagcctgtggcctaagggattatccctgtctcggcaagccccgcctgccttggggcaccgcctacctctgccagccacgcctcccctgcctcggggctccgcctaccccggccagccccatttccccgcctgcggcctaaggaaatctccctgcttccgctggccccgccttactctgttgcaccgcccagtcgcccggctttccactgagggacgccccctgctctggactgcttagcctactccagctggccccacctcacctcatcggccccgcctcctccgctcgcccactccgggcgcccactcctgaggagctatcccagagtccgcgcggcctcgccttcccggcccgctcaccaccccgcctcgtcccacctcgcctcgccctccccgggctctagccacttggtgcggcaggtgtcctgcaggccggctcgagattcccgagctcgccctcgtggtgttccaggaacacggtactttgcgctagcctggcctgtcctgagagactgcgggaggcgaagagaacgcgctgttgctgtgggaagcgccggggacgggacagctacaccgccaaacacttcgctagggaaagggctggctggtttcgtgcgtaaacaaccgaaaaggggaagtgtctgggggaaagtgtgtgtgtgtgtgtgtgaatgcgggtgagtgagggggagagggacacgttactaaagtcaggcaaatattttgaaaaaaatatattttgaaaaaaatagtttggtctaacaaaaataaaatggaagagagatttgtttaagtagtttgaagctgaaagattgacgggatcttgccatgacctgaacagcatgcacctgttttgtggctggctgaaggatggtaaataggatcaagatctcactttaagcgttgaaaatgctgaaagccctttctcaaacctgccatagcgtaggggtagacagtctttcttaaagcaactactaggggtcaaatgctgagtgaaatttttttcatctgtgaactttaaataatagccacatacattctgctaggcaactgagtctcaatttactataggccacgtggcaaataatcagattcaattaaagtcatcaaacaataattgtgtgtcgggcatcacgtttaggtattcaagatacaaacatgaatgagtttggtgaaaaagtcatatcatcatgggcatgaattctagttccctcacttattagctatgctaccttgggtcaattaacctctctgagactcagctttctcatctacaggataagaataataatcccttcctcataaggttgttgtgtgaatttaataatatattacttgtaaaacacttattggggtgggaaattaccttgatgcaatggtagcttccacgtacgagtcaggccatcccagagggtcatggaactcagatggctgagttcaaaaggctcagatcaaattgagatgcctgagtcacacagtttattaaatcaatttattttcattttaaataagtttattcaaacaagacatttgacttgaaaggaaaactaggatttttttttaagagtaatgtgtcattactgaaagattgccttacatgtaatagccacgtacaaagagttataaaattgtcttggctaggccggcacggtggctcacgcctgtaatcccagcactttgggaggccaaggcgggtggatcacctgaggccaggagttcgagaccagcctaaccaacatggcaaaacccgtctctactaaaaatacaaaaattagccgggcgtgttggcgcatgcctataattctagctacttgagaggctgaggcaggagaatagcttgaatcctggaggcagaggttacagtgagctgagattgtgccattgcactcctgccttga

SEQ ID NO: 587843 - DNA, 4001 bp, Homo sapiens
acgatactcctgcctcagcctcccaagtagctgggactacaggtaccagccaccgtgtctggctaatttttttatttttagtagagatggggtttcactgtgttggccaggctggtcgcgaactcctgacctcaggtgatccgcccgccccggcctcccaaagtactgggactctacaggagtgagccactgcgcacggcctgctttgtgtttttcagaaagtaaacaaaaataatctgtaccaggtatccaggtaaccggcttcaagtacaatttctacccagtagtcagaaagttaaaagtcacactagataagacatctttattacttaatctttaaaacagtcacttgcctattcaattctgaaactgtttgttttctttccctcccccgcactcccgctctgatacacaaacttgttgtaaaaataatgcagaaacatatacgtcaatctaagtctctgaaatatggccaactctacctcgccgtatatccaacattaaaaagaaaaaaaaaggctgtttaagaatagaactcattcccggtttccaccaaattatttccctaattcttaaatcctcaaataagttcttaatctccaaagtctcggttgtgggaaaaacattaatttgtgcagtccaacacttacatactttcttgacggaagggcaatcctgtccctttaaactcaatgaaggcagcggccaggtccttctgagtccccgtataattgcctagaacttaacatttagtattcatagtccttggtttacagacgggtccgacagttagaaactattacttcctcctctttcctcctgggcgctgtcctccttttctcttgccacccaagccaggcggcccagaattcatcttgcctcccaagccccctttcctcttccctccctggctgggcgggccccctttcctcttgcccccaggcccctgccggcctccctttctcttgcccttctggctcattttcctcctcttggcggcctcctcctggtcctcctccctcatctgcttattggtggccctagtcacatccagctgaggcttcttgctgttcatgacacgaagcagctccaactggttctttttctcggctgcaaagtccccgaaaaggggttgaaacttccttttcttgccggagccccggggcaccttctccttggggaggcgctcctgaaagcgccccacagaggcggtggagaccttggccacttgcatggcgcggcccagctcctccttactctggtgtccggtagggtgcaagccggccgcgctgggcagctgcatcttgtgcgcgcgggccaggttacgcagccggttcagctcgttcttggccaccctttccttcttggcctgaatccgcttggcgaactggtcctccaaggggtcggcattgccgggcacctcaatcagccattctttggtgtcgtcccgggcgcgctggtagccccagcgccgccgccactggccactcacctcgtcccacaccaggttggtcttcttcttgggacggatgcccttgaggcgcgcgaactgctgccagcgtgtaagtggccgcggtcggggcagaggcttctctcgcggcaggcgtgtggtgggctccggcagccgcgccactatcgcctcttccacgcgctccgtgggcagctgccacagctggttgatgagcagttgcgtgttgtcccgcgccagggcctgtagctcggcctccggcgtgggtccggcgcaccgcagcccggtcggggggttccggtccgacgccagcaggttgcccaggtcaaactgcagctccagctccttgtgcaccgtgatgcgttgcaacttctctgcctcgtcctgctctgcctttgcgagcagctcctccacgctctggccctccatggctccggctcggctcactcgctttggggctgcagctgaagttacttttcctacagtggcggcccaaactccggcagcataaccacgtgcagatgccgggatgcccaatccggaaaagaaaggttcgcttccggagcgtccggaagcggctcgcaatccgggcgaccagaggaaaggccggcagagggcggtatggagagatgatgggattagaagcgggacctttaggctggcgccagatagaggcggagctggcccgagcaggccgcactgctagttccagagcaggattgggactacgattcccaggatgcagggggcgggaggcggtctagagggcggtccagggacagctcggggggccgcctagggggtggtccagggggcggtccggggacagtctcgcaggcggtctagagagggcggtcccggggggcgatctagggggcggtcttggggggggcagttcagggagtggtcttaggatggtggtccggggacagtcttggggctcaatccggaggggcgggccggagggtttgtccaggggcgcggtccgggaccggggcgggtacaaattcctgggactgcctgtggtgtggggttccaatcaagtgcgtgttacaatttcagtgtaaatccgttgtgaagatgtttagacaatcacccttcttagggccaaatagtttcactggagtcatagtcggctttcagggttcctagttgtggcccgagaaagataacatcccaaagatacacatagagctaattgtagaagattcgttttgttttgggagtcagtggctctggcaatgaagccaccccgagtgggcgcgggtgtgcaccgaccctagtgagctagctgactcggagatccgggattctgcagttacagaacctagtctagttcaattaatctagtacagtgctgaaactaagccacgctctgcagttacactgcctgggttccaatcctgactgtgccactgttggtccttcagcaattttacttgttgaggccgttttaaggcctgcgagataatgataataatacttcctagggtggttataagataaatgagttaatatcgtccaagggagggttagacgagggcctggagcgtatgagtactcagtacaaattagccaaataccgattattatttcattttcataggctctgggaggtaagtgctacatggtgttaagtatgagtcaaacggcctacaatcaggtatcaggtcaccattacttggagaggatgtttgatctaagccttatttataaattgacaaacataaaacattagttactgctacatggtaagaactcagtatgtgttagctattagtattaactatgttattaattattgtattaactatattattttcacagatgaaacaaggagggctcagagaggtgaaatgacttatctaaagttatgcagttagggaatataagaacaagagatatcttaactctggttttaagtctgtagatctattctctgcaatgtcgtccaagctcttgatactcattaaagtgtggtctgcataccagcagcataatatcccctgggagcttgttggaaatgcagaacgtcaggcctcactctagatgtaatttatcagaacctttattttaataagatctgtaggtgactaggatgtacatttgagtatcagaggcactgttgattgcgtggtttacagggtttatcttcctttcactgggggccaggtttatcctagagggggttatgctggagaattaaccaatgaaattaacttaatagcaattagcaaatagactcagtttagtttcagcattgtgctagcctttctcatccagaagcattttagaatttgctgttttttttttccccttgaacctactttaacattcagcatcaaggctttaacatcagtcatcccatgtagccaaggctaggtcaaagaccatattagctaactgccttgagccttaaacctttgggatttgccataggagagagttgagtgtattgatatgactgctatgggcttggcttggtttctcattcattcattcacttgacaaacatttaattgaatggctacca

SEQ ID NO: 587844 - DNA, 4001 bp, Homo sapiens
cagttatttggagctctgcgctcaggtgggccaatctctagctctgcccctaggtgagaacagcttaacaatgtcctaaaaagccatcaaaaaaataaggttcggaaagtcctcctcaaaatctggatgcaggagcggagattacacacaatgagttataaacaaatcacatcacagatcgagtgagatgtttacatcttggagaaaaagtcaacattcatgaacccggcgacaaattctaattgcgcaaaagtccaaagtgccgaatgaaatagacagctctcaccaggtccctgggaaggggctgctgcgcgcccttcctgcgcgggtaattcgatgtgcgtgtggtgagtggtttatgtttaaatccacccagaaaattgaatcgtgtctagccgcccttcttctaaaatgcagttggattagttgcatctccagcggactccgagacagaaatacgcactaaatctgcaggaaagcgagttccccgaaacctttctggaggcttccacccgccttctccgctacgcacaagtgatggagagggagggagcagttaaaaagccgcaagtgaatttcattgagaacagaagcctccaccggtgtggctgcttttgcaaagcaaatggagagagcgaagtggggcctgttttaaaaacaaacctctggaggcgaggactccccagaaaaccagcgcgggaattgctgcttaattcagaaagttcccatctcgtcgcagtttccagaaaaaagagatctatgttggcctttttctggaaagggaggtcctccccctcgacttggtacccctcccaagctccggaatacagacacacgcttgggtacacccacacaccacacacacactatgctaggtcaagtccgaagagatctgaggccgggtttggggcgcacgtggatggggaagataaaacaaatgagctacagggaagatggttaggaggacagagagaagaacaacgacgacaaaaaaaaaatgcatgtcagataagaaatacgtcctaaagagacaagtttagatgaggaggtggggcggcgaacatgagtgcggaccgcacgacttagccctgagcgcccgattggcgcccggctcgccgagctcccagcgcgtctcgctccggctccccgcgcctccagggtacagaaaacagagtgttttgtagagctccagggtcctaaaggtggggactggggacccgcaaaagctggggtggagagcacagccctgaccatctgagcccccggagccagggcgtgagtgagcgcctccacacgccacccctgaagcccaccacgcacctttggcagagagggacccacctcgcttactgcgtctccatcggttgccttggcagtggctgtaatccatgcagttcagaatgatgagggcaaaggagaaaaggcgaaactgcatctgggcggtcgggcgggggagagacgcctctcaaagtctaggaactggagggttcgcccaaagagccggcgccggccgcgctgctggggaggactcagagggagactcgccactcacccccgggccgcaccggtcagttcagcgcgatcagcatctctccgccacgaacctgagagacaagaagcgaaaacagggtgtgtgggggatggagagagccccggggaggcagctgcgccttcgcacgtcccaatttaaagaagagagggaaggaggaagcgaacccactgcctagcacgagccgcggagcggcttaatccagagcgggcagctgcggacgagttggagaggaaggtgattataatcagtgaattagcaacctctgccgagccctaagctccgacccagcggcataatgcgttgtgccggcgctccggggaaaggaaagaactctaaaggcactgagagcgcagggctaaaagaacgctcttaggccatttggagtccacggcggtgtacccaagcgccgcagctgcggctgccttggtgtgggttgcctaccgtgcgcacgtctcgggcggcgcggcctccctaggcgcggtgctccatcccgggctcgggaagcgagccgcttggttagcacgtgggctggggaaaagtttgccgagaccggctgggagcgcctggcagctctggaattccagcggccgccgcggggttggcgacgccaggcaggagcgcggagcggcgggtgcagccactgggatgctccgtccccgcccgcgagcgcggtccccaggcaaggggtgcgcccgctcacactctctgcctccctaaccaattgtgtcgcttcctgcgctttctccacggtcacttcacagctaagatttctttctttccgagctgtagaaggcagaacgctctcgggaggacgaagtgatccgaagggatgtggcaagcgcactttccgatggagatgcagaccggctgaggcttgggatgcttctataagtaggtggtgctgtggtccaaggcatctaagtctaggctgcctcggagttcctgggtcctaaagccagaaacgtcccggtttccctgaggtcctaaagaacgttgacagccaacagcgcgcctaacttggagcgaatcctcttcgggctttccagagtgcgggggatagataaagagtagctggggagacgccccctgaccttgctgggtcccagaacccggctgctcacccccaaggggtcctctccagccctctagggtcagttccaacctcagcgccaacctttctgcagggagatctgactgaaggactgatgactccctttaaacttttgcaatatgccacaactctgccactttttaatttacatcttgtctgtgttttgcaggaaggtatgttagccggctgaaattattcataaaacgcgcccccactttgaggagtgaaatgggtattcccaacagcttttgttcatcctcagaactgttatttactttgtttcttctccaataaaacaaaaacctgtgatccgttgcctgaagtgctgaagaagttggggccttgattctttaaaaataattttaaaaagttcacttcccactaaagtatttttcattcttaatcctcctctcatttccaaagtctcctgaattaaacttttaggtgctttgggtttggggaaaatattctgtttaacaaagtgttacattaaatagacttgatgccatccaatttcattctggtgaaatctgtcctgcattcactactgtaggaaaaaatgtatttattccttaagcaaaagataagaatttatgccactaaccgtggcagtatgaatgtctatagatatgcccgcagttaccatattattatgatagcattttatactatttaaattcccttttctattccttcagtttcagaagatgttcagaaatttgatgacttaaaagacaatcatataaaaagaatattgcaatactcatatttattaactattccattattgcctattcataactattttacagactcactattacatagtggtatttatgtgctaagaatttcagcagtatgcctttgatgcatgcctgagaacacccaagtaaatctgagttgaggtcattggtcccatttcatagataagaaaatccatcactgagactggcccacagggcacaaatagagttcacaaaacacattgcagaaacagtggatctgtttcttgacttttgagcctttgatttttatcacagaatttggaaacatttcagtgtagggagtggccccagtgtttggcataacttgatatttcttgatcatcttgatatgatgctgaatatctcttcagcaccataaatactacttctttccaaatatagtcatatatgcacacaacaaatgaattatacttataaaggagttaaatctatgggagaaaggaagtcttccctaagtaagcccccctgcctccttgcaaagctttgagatccattcaagatcagtggtcatcagtgtcttttaaaatatttaaaggcaaaagtaaacacaaga

SEQ ID NO: 587845 - DNA, 4001 bp, Homo sapiens
gttccccgaaacctttctggaggcttccacccgccttctccgctacgcacaagtgatggagagggagggagcagttaaaaagccgcaagtgaatttcattgagaacagaagcctccaccggtgtggctgcttttgcaaagcaaatggagagagcgaagtggggcctgttttaaaaacaaacctctggaggcgaggactccccagaaaaccagcgcgggaattgctgcttaattcagaaagttcccatctcgtcgcagtttccagaaaaaagagatctatgttggcctttttctggaaagggaggtcctccccctcgacttggtacccctcccaagctccggaatacagacacacgcttgggtacacccacacaccacacacacactatgctaggtcaagtccgaagagatctgaggccgggtttggggcgcacgtggatggggaagataaaacaaatgagctacagggaagatggttaggaggacagagagaagaacaacgacgacaaaaaaaaaatgcatgtcagataagaaatacgtcctaaagagacaagtttagatgaggaggtggggcggcgaacatgagtgcggaccgcacgacttagccctgagcgcccgattggcgcccggctcgccgagctcccagcgcgtctcgctccggctccccgcgcctccagggtacagaaaacagagtgttttgtagagctccagggtcctaaaggtggggactggggacccgcaaaagctggggtggagagcacagccctgaccatctgagcccccggagccagggcgtgagtgagcgcctccacacgccacccctgaagcccaccacgcacctttggcagagagggacccacctcgcttactgcgtctccatcggttgccttggcagtggctgtaatccatgcagttcagaatgatgagggcaaaggagaaaaggcgaaactgcatctgggcggtcgggcgggggagagacgcctctcaaagtctaggaactggagggttcgcccaaagagccggcgccggccgcgctgctggggaggactcagagggagactcgccactcacccccgggccgcaccggtcagttcagcgcgatcagcatctctccgccacgaacctgagagacaagaagcgaaaacagggtgtgtgggggatggagagagccccggggaggcagctgcgccttcgcacgtcccaatttaaagaagagagggaaggaggaagcgaacccactgcctagcacgagccgcggagcggcttaatccagagcgggcagctgcggacgagttggagaggaaggtgattataatcagtgaattagcaacctctgccgagccctaagctccgacccagcggcataatgcgttgtgccggcgctccggggaaaggaaagaactctaaaggcactgagagcgcagggctaaaagaacgctcttaggccatttggagtccacggcggtgtacccaagcgccgcagctgcggctgccttggtgtgggttgcctaccgtgcgcacgtctcgggcggcgcggcctccctaggcgcggtgctccatcccgggctcgggaagcgagccgcttggttagcacgtgggctggggaaaagtttgccgagaccggctgggagcgcctggcagctctggaattccagcggccgccgcggggttggcgacgccaggcaggagcgcggagcggcgggtgcagccactgggatgctccgtccccgcccgcgagcgcggtccccaggcaaggggtgcgcccgctcacactctctgcctccctaaccaattgtgtcgcttcctgcgctttctccacggtcacttcacagctaagatttctttctttccgagctgtagaaggcagaacgctctcgggaggacgaagtgatccgaagggatgtggcaagcgcactttccgatggagatgcagaccggctgaggcttgggatgcttctataagtaggtggtgctgtggtccaaggcatctaagtctaggctgcctcggagttcctgggtcctaaagccagaaacgtcccggtttccctgaggtcctaaagaacgttgacagccaacagcgcgcctaacttggagcgaatcctcttcgggctttccagagtgcgggggatagataaagagtagctggggagacgccccctgaccttgctgggtcccagaacccggctgctcacccccaaggggtcctctccagccctctagggtcagttccaacctcagcgccaacctttctgcagggagatctgactgaaggactgatgactccctttaaacttttgcaatatgccacaactctgccactttttaatttacatcttgtctgtgttttgcaggaaggtatgttagccggctgaaattattcataaaacgcgcccccactttgaggagtgaaatgggtattcccaacagcttttgttcatcctcagaactgttatttactttgtttcttctccaataaaacaaaaacctgtgatccgttgcctgaagtgctgaagaagttggggccttgattctttaaaaataattttaaaaagttcacttcccactaaagtatttttcattcttaatcctcctctcatttccaaagtctcctgaattaaacttttaggtgctttgggtttggggaaaatattctgtttaacaaagtgttacattaaatagacttgatgccatccaatttcattctggtgaaatctgtcctgcattcactactgtaggaaaaaatgtatttattccttaagcaaaagataagaatttatgccactaaccgtggcagtatgaatgtctatagatatgcccgcagttaccatattattatgatagcattttatactatttaaattcccttttctattccttcagtttcagaagatgttcagaaatttgatgacttaaaagacaatcatataaaaagaatattgcaatactcatatttattaactattccattattgcctattcataactattttacagactcactattacatagtggtatttatgtgctaagaatttcagcagtatgcctttgatgcatgcctgagaacacccaagtaaatctgagttgaggtcattggtcccatttcatagataagaaaatccatcactgagactggcccacagggcacaaatagagttcacaaaacacattgcagaaacagtggatctgtttcttgacttttgagcctttgatttttatcacagaatttggaaacatttcagtgtagggagtggccccagtgtttggcataacttgatatttcttgatcatcttgatatgatgctgaatatctcttcagcaccataaatactacttctttccaaatatagtcatatatgcacacaacaaatgaattatacttataaaggagttaaatctatgggagaaaggaagtcttccctaagtaagcccccctgcctccttgcaaagctttgagatccattcaagatcagtggtcatcagtgtcttttaaaatatttaaaggcaaaagtaaacacaagaccaagcagaggtagcgctaccattaatcacctgcgtcactttgggcaattttcttggtctcagtttccttggcagtatttttaggaagtctgtccaaggtctctttcacttctacatgttctggtttacaatcaattttctatttgtactaggaagtttgctatggtatctaaccagtgtaagggcaaactcatcagtgatgggttctttgtgtagaaagaagagggttagccactgccttccttagttaaatttacagaccacttcacccttatcccttcaaagacaactttccataattttaattttaatcttttgtgttgtacagttggtgcatttttagccagagatgcttttcagtttagtgaacccccagattcagttcatgaggaagaattttgacagtaccacttctgtagaaaattggttaatgtgtttagtaagaaaagaataggctctggaagaaaggaaaattcttaatt

SEQ ID NO: 587846 - DNA, 4001 bp, Homo sapiens
acattattttatgagatatagatttagcaggtgcctggctgtttcagtacccgactggaaaagaatgaatgtcactcatgcaacaaactggtcacctaaatagtgactgaccactcactgtaaataactccaggtaaaggtaaatcttgaaaatggatatccttctatataaaatatgcaagatctatggctagcatgcttttcatatttttaaacgtgctccacctatttctctgtaacatccaattcggggtagaattaaagatgttcctaagacatgctatctgctagtttcttagccaaaagagctctaccctttctgaaagattccaggctgtccttttccattctgtctgggtgataaggtaacctgaaggcagaaatgacatacagtaatatatgtgccactctggccagttggtctgtgaatttcagtgtttcatcatgctcactgaggcaacagcaaacctgaaatgtcaatatgttcagtcaatggaagtaaaataatgggactctattgtcttacccaatcgatctgctgctgtcaacaaggaaacatgcccccctggctttaaacaaattttaattaggcttttagttactggatcatatctatctatctatgaaaacacctattttgacaatgtgtagaaggcaaaacaaccatcttttccacttttcttcattttaagaaccttctaaagttgatattacaatgtttcaaatacttgtgagtcaataagacatgttttctcctttttttaaactagctccaaccaaaagatttcatggttcaaatccaaaatacaaatctacctaacagacttgtagtgatttttttttctcctctaggctgagttgagccatactataaagtcaactaattccatattaaaagtaggcttcatttgcttttcttactcattcaagtaccgtcagcatcaatttatcacgcatttaaaacaagtcacacaaaaccaaacattaatgatcaatcccaaagcctttaccctcttttctcagttcatcaatcctaaatgcaaggggtaaacgaaactcctgttaaatcagggaggtgcatggtgctgagaagggtagggggttgtcgggagaggaaataagacattttaagtcattcaaattgcaccaaagttctctagcccttccttccaccaaaagagagacagtctcaccttaaaataaaaatgaactaatcaagttgttaagcagctttgtctctcccttcttcatctaaaggcttcagcgtccagtcaataaataatctattgttccccctttatcgagtctctttaaacctattcagactggcaaaactaaacccaattaaagataaggccctccggtattctcacctcggtgagtcctgtctggatagcagaggtgatgggagatagcgtcaaggccaggggtagatgcctcctcctcaccccacacaacaaaaggcagatttctctttctcactctgctaatctttaaatgtaaattctctccgccagctaagaggagcgacagataacatgttacatcttcacttctcctggtcttatcgacttctgaatcatttggaaagggagagagggagagagaaaagccgcctccccacgccccccttcctcctggccacccctccttcctccctgctcgcctccctcccctgttcacggagattaccttctggcaaaggagcgcgggagagcggccgcggccgaggcggcacccagaccgcggctttgtattcattaaacacacattggagcttatcagaagtaaaagccttgtcaggatggcacattgtgtgtgagtgagtgtgtgagcgcaggagggagaggagagaagccaacgtgcatcagggtgattacaatatcagcagggcccagatggaggcaggaaaataaacagagggtgcgtgtgagacggagcgggagagggaggaaaagtgggagagagagagagaagacagaaagggacaggcaggagggaaggagagacacaggcaggagggaaggagggatggaggagggggcgggggctcagaccccaggatggggccagaaagtgggggagagctaccctaaggctatctgggaatgagaggcaggctagaagtcgcctgcatgcccaaatctgcccctaccacccaaagaagggaggaatccagcaaactgtatttccctgctccagggctaggctggaacatgttcgagattctgtcaaggtcagaggaggatcaagagctctcttttggcagagcctaaggagacagtcgccatctcacctccatccaaacagccacattttgcaaaacaaacctactgagtctatagagcagttaagctgccttccagaccaacctcaagtcggagttcttgtccctttctttgctaaccccaatactcctaaattccagcccctgcacattcacacactcagagatataaaatagcttctgtccctgaactttaatgtgtcccagctgaagactcctgcagccagcatcattgtgataaggaggaacacttgtgattggtagccacaggtgactcttagagacctgctccacctccagaaattgtgttgggggaggaggctccttatgtgtgcatctgagagtctattttggaggtgggaatctgaaattgaggcaatcaatctcggcttgagctgcctcatggctcttcacccacccagagccagagaatcaatcagagaacaagcaagggctaatgcttgtccgtcagtccagagttcatccccctccccagcagggtcaggaaggagacacacctgagtagtcccttgggagtcccttttcacttttaaatacacccatcagacaatgtgaacatctgatcagctccttaatggagtgcagataatgcagcaaaggaggttattttattgggggaggggaagtatttggttgtgctgtgtttcaaggcactgaagcttggttaagaagctctcactacagcatcaagagtgagttcagaatgaaggagccaataaattacacaattgttcatggtgtgcactgtagccctagctgctgtgaaacttcaggttataaaatagttttatgcagggggtctccctagaaaggaataaaatggggatgaagggtaaggctagtgagtagaaaaaaaaacaatagcaagagaactagcccctgccttttaagggaaccatattttaagaggccctttagaaaatgaggagaagcattgtttaatcaggcactcccctccaaatcacttggccaaaaatcggttttatgtatagttgagcaccgccccctctcccccaccccacccaaacacacacacaccaatgttccaaccccaagaatagaattaaaagaaatttgataggtaacacaaagtgaaaaaagctgggcataggtgggggaagggcatgtgtgaaaatcttgtcatgcaatgaatgtcagataaaaaggggtctgccacaatcctccagtaatccaataacgtggaaaacctcatggtatcactgagacgagaacaaggtaatatttctccataaatcttcaaaaagtgaccaggttcaatagttagagaagggtgcaaggataggaagtaaaacacttggctggctacattacaaaatccagtgagctttaaatgggtgaaaatctgtcattcttacatgttttaaatttaataacagatttctagcgtatcactttagctctcataaaaggtcacctttcaccttttctctagctattctagaaaaatgcattcagagtaaccgaaagcaaccacacatacccccaccctttattgcattttagttagatcagcttggacacagactacatacaaacacctaaaaatccaagaaaactccagaggaagaaaaatacaatttacaagtgcccccctgatttttccattacatgctcttttaagaaatgctatttttttaaaaaaaattgcattactattgctttcaaacccaga

SEQ ID NO: 587847 - DNA, 4001 bp, Homo sapiens
atactagaggcataaagaaatctgttcaaaagctaatctgccagtggtcttattttgtaaatgcacagtatttctattagtaccttgtttgttcattgacttttggctcacagttatagaaaagatcaaccaattctcaaatgggaagaatccatgactctcttccaaagcaaacactttgctgcaaagctttcaattaaaagaaaaaaacagcaatacaataatcaagaagtataatcacagaagtgtaaaacagaaagtggtttctataatcacagctgtcttaaagtccaggctagagactagaaatcttaatttcaactagttcttttcttaataataggttaccttcctataaaaggaagaagtccatctgccccaggcagataagttttgaagcattaattcagataaaaatctagcattttctttctttctttgagtatgtgaattctagtgtgctataatgtgagaattccaacatatgaccattatggcataatatctcattgctcagcttgtcattatttcatttgtaattcttatgttaattatgttcataattactataaacagatgtggtagacattcatgtgaccttttattgcagaatgcattcttcactcattttgctttaatttctcatggatacaaagctgaaatgcaggaaaaagaaaaagcctttccaattttccaatgttttatatgcataagctaaaacagaacctaccttctacttcatctgcatttcagaatatcataatattcttaatgtttaagctgctttatacagcacatttctaaattgcacactgaacctcactgctgctcactaaattgtagctatggatgccaaacaaaggctaacatccatgtctaagttgtttgtcttttttttaatatcaaaggttaatgcagcagaattgtgcttcaaaaccaagtgcctagcagctacatagcgatttattcactcagaactcaaccatcaccctctttacataaaacgcatttacaataaaatcagtatggatttcattagctgaaaacctcctcgaatttcatttctttggccctaatctataattagtttggacagacaggtgcaaacccttctcttctacagatggctactggaaatggtgcaaagtagctccttctgtttaaacaacacagagataacctgctctgtcttatcacttacaattacctccattaaactgaactaatgtttgctttaataaaatgttcactgttctttaaacattatttaggaactcttatattaatggctgtggaaaaaaagtgaagttggaaggtgtctctagataataataaatagcttattctggataaaatgttcccactgacagataatacttaggttcacagaggtgttttagttgattgaatatttgttattttgcataaatagagtcaaatttgatttttaaaaggcaaacataatttaacaagttgggggagacaacatttttcttgaatttagaaaaagaataaatttttttcttatagattttaagttgttattaacatgtagaaattaaaatccttattttcaaaggatatgttaacttagttttatgcatttaacttctgatagattattctcaaagttgaatgagttcattctttcaaggcacatcttaaaaattaactatgaatgtaagtgcactctgcaagcacatggttaaaagcaactccattccataataaataacttctataaagccagagctcacttctccctgcttctgctatcaataaagtctgtggatcactatatgatgaataaggtgtccataaaacaaagaacctttaaatgcccaaacagcaacaaataaatagcctttctcactgaacttacataacttacagtaatagactccggcaaaatgcaactgactccgtttttttcacatgcaaatcctgcaggtgccaatttttcagactgctttgctatgaagggctatgttgcctgcataaaacctcagtgaagaaggctttgcattcagtgcctgtcagctgatgttcatatcaaagaagtgagaaacaggatttgacagtgaagaatgtcctaaactgacaaccactgaccagcattcctattggaagcatttctttcttgtgatcctttttcagtgtttaaagaaatgcaagattttttggctacggttcgatttgacaataaaataaattataatggcaccttaaatgtgtgtagttctttgcaatttatgaagtgctcttttatctacaaatatttagactaacacctcaatgggagagcacatcatcaaatactaacatcaagagcaatattttactcctctcaggaaaagaaaattgtgcaaatattaaaaagctgcagtcccatagctgcaaaaatactgtccttgcaatttaatagtgcaatgtattgtattgcacatagaatgatttttattagaaaggaccttttaaagatcattttaacacaaattattagcaggtattaacggaccacagagactaagtccacaaaggaaaatatcatttcaaagacttctagtctgctttgagttgtacaaacataaaagaaaaaatagactgttttctccactgcttttattaggtataaactggacactggagaaactgagtattgaaattctcccatgcaatatttagcttttcaaataaagtcactgctatctagtttataataaaattattaatgactgaacaaaaatatttaataaaaagttaacctcagtattaaaaaagtccgtttttatgcacccagtataagactgattggttgttttgttggaatttcatcttttaaaataataaaccaacaaaatataaaatgctgaacacagcacaagaaataatggacttcaacttcttcagcatccatcctggctgcaaaaaaagcccggatcaaaccaagattccctgattactattgggtgagattgtcagacttctctgaaacaaacaaaaaaatcagtaaaggaaaaaaacgaaaatgaaatcaaataaccctatctttattatctgaaaatcataatattacaaactagactttaaggataaaagagagggaaatccacagaattataaatttgcttctgtgtatacacatcacagctgacataaacactcaggttggggctatgttagtttaagaaacaatggtgtttggtgaccttttctaaagaattgtgtgacaggagaaactgggcacaacagaatactcacatggtcaaggcaaacgctgccataaactaaaaggaggcccccaacactaacaaaccgtttatcacagagaagctggtcaatttgtattctagggagtgtggactcactgggcacagacccagttccactcctgttctatgcaaaggagggcaatgataataaaagctactgagtgcacttaaaaatggtacagatgttgaaaaggagactaggagagggaaaaaaatccctgtaaaacacatttcagttcacacagaaggtataaggaatgctttggtcagaaacccgacctttatcaggagataaatcaatctgcagcagctgcggacagccatttatatacaggctctgggcagattaattaagaaaagcgaagttaaagattcaaggggcctcagagttacattaagcacatgaagtttgtctggagtggcctctccagctctcctggtcttcactccctagctctggcctcgggcactattctgcaggacctcctccacgggaatcctagctattccttaaagcgaccttctgcagattcccccaggaagcagcagccagactagggcacggtggaatttgtggtgcccagtcttcaagggtttctccgttacgctttgcaaggaatgagaccatgggctgcacggccgcccagccaaatcctccaaactgaaaggccttttgggggagagggggagggaaggcggctatttttagtaacagttgtggctcacatc

SEQ ID NO: 587848 - DNA, 4001 bp, Homo sapiens
attttcataaatttctttaacataaaaatatgttaagtcccttctggttttttttttcatattcactctctgtatggttcaaatttctttgactcaatgtctgcctaatgcttagttttgttatttaaagactatgcaaaatgtgtgaaagggtaaattacaccaagataacaaatacttagtatttctctgcctttgcttgaaatacacatattaatctatataagttattgtctatgcatgcacttgagtgtaaaatacatacatctcactttgtattgaacccattatcgcttctcggccttttggctaagatcaagtgtattccacccactaaaagaaaactggaaacaaaaagtcagagtcaggccctatttttgaagggaacttacacattattttatgagatatagatttagcaggtgcctggctgtttcagtacccgactggaaaagaatgaatgtcactcatgcaacaaactggtcacctaaatagtgactgaccactcactgtaaataactccaggtaaaggtaaatcttgaaaatggatatccttctatataaaatatgcaagatctatggctagcatgcttttcatatttttaaacgtgctccacctatttctctgtaacatccaattcggggtagaattaaagatgttcctaagacatgctatctgctagtttcttagccaaaagagctctaccctttctgaaagattccaggctgtccttttccattctgtctgggtgataaggtaacctgaaggcagaaatgacatacagtaatatatgtgccactctggccagttggtctgtgaatttcagtgtttcatcatgctcactgaggcaacagcaaacctgaaatgtcaatatgttcagtcaatggaagtaaaataatgggactctattgtcttacccaatcgatctgctgctgtcaacaaggaaacatgcccccctggctttaaacaaattttaattaggcttttagttactggatcatatctatctatctatgaaaacacctattttgacaatgtgtagaaggcaaaacaaccatcttttccacttttcttcattttaagaaccttctaaagttgatattacaatgtttcaaatacttgtgagtcaataagacatgttttctcctttttttaaactagctccaaccaaaagatttcatggttcaaatccaaaatacaaatctacctaacagacttgtagtgatttttttttctcctctaggctgagttgagccatactataaagtcaactaattccatattaaaagtaggcttcatttgcttttcttactcattcaagtaccgtcagcatcaatttatcacgcatttaaaacaagtcacacaaaaccaaacattaatgatcaatcccaaagcctttaccctcttttctcagttcatcaatcctaaatgcaaggggtaaacgaaactcctgttaaatcagggaggtgcatggtgctgagaagggtagggggttgtcgggagaggaaataagacattttaagtcattcaaattgcaccaaagttctctagcccttccttccaccaaaagagagacagtctcaccttaaaataaaaatgaactaatcaagttgttaagcagctttgtctctcccttcttcatctaaaggcttcagcgtccagtcaataaataatctattgttccccctttatcgagtctctttaaacctattcagactggcaaaactaaacccaattaaagataaggccctccggtattctcacctcggtgagtcctgtctggatagcagaggtgatgggagatagcgtcaaggccaggggtagatgcctcctcctcaccccacacaacaaaaggcagatttctctttctcactctgctaatctttaaatgtaaattctctccgccagctaagaggagcgacagataacatgttacatcttcacttctcctggtcttatcgacttctgaatcatttggaaagggagagagggagagagaaaagccgcctccccacgccccccttcctcctggccacccctccttcctccctgctcgcctccctcccctgttcacggagattaccttctggcaaaggagcgcgggagagcggccgcggccgaggcggcacccagaccgcggctttgtattcattaaacacacattggagcttatcagaagtaaaagccttgtcaggatggcacattgtgtgtgagtgagtgtgtgagcgcaggagggagaggagagaagccaacgtgcatcagggtgattacaatatcagcagggcccagatggaggcaggaaaataaacagagggtgcgtgtgagacggagcgggagagggaggaaaagtgggagagagagagagaagacagaaagggacaggcaggagggaaggagagacacaggcaggagggaaggagggatggaggagggggcgggggctcagaccccaggatggggccagaaagtgggggagagctaccctaaggctatctgggaatgagaggcaggctagaagtcgcctgcatgcccaaatctgcccctaccacccaaagaagggaggaatccagcaaactgtatttccctgctccagggctaggctggaacatgttcgagattctgtcaaggtcagaggaggatcaagagctctcttttggcagagcctaaggagacagtcgccatctcacctccatccaaacagccacattttgcaaaacaaacctactgagtctatagagcagttaagctgccttccagaccaacctcaagtcggagttcttgtccctttctttgctaaccccaatactcctaaattccagcccctgcacattcacacactcagagatataaaatagcttctgtccctgaactttaatgtgtcccagctgaagactcctgcagccagcatcattgtgataaggaggaacacttgtgattggtagccacaggtgactcttagagacctgctccacctccagaaattgtgttgggggaggaggctccttatgtgtgcatctgagagtctattttggaggtgggaatctgaaattgaggcaatcaatctcggcttgagctgcctcatggctcttcacccacccagagccagagaatcaatcagagaacaagcaagggctaatgcttgtccgtcagtccagagttcatccccctccccagcagggtcaggaaggagacacacctgagtagtcccttgggagtcccttttcacttttaaatacacccatcagacaatgtgaacatctgatcagctccttaatggagtgcagataatgcagcaaaggaggttattttattgggggaggggaagtatttggttgtgctgtgtttcaaggcactgaagcttggttaagaagctctcactacagcatcaagagtgagttcagaatgaaggagccaataaattacacaattgttcatggtgtgcactgtagccctagctgctgtgaaacttcaggttataaaatagttttatgcagggggtctccctagaaaggaataaaatggggatgaagggtaaggctagtgagtagaaaaaaaaacaatagcaagagaactagcccctgccttttaagggaaccatattttaagaggccctttagaaaatgaggagaagcattgtttaatcaggcactcccctccaaatcacttggccaaaaatcggttttatgtatagttgagcaccgccccctctcccccaccccacccaaacacacacacaccaatgttccaaccccaagaatagaattaaaagaaatttgataggtaacacaaagtgaaaaaagctgggcataggtgggggaagggcatgtgtgaaaatcttgtcatgcaatgaatgtcagataaaaaggggtctgccacaatcctccagtaatccaataacgtggaaaacctcatggtatcactgagacgagaacaaggtaatatttctccataaatcttcaaaaagtgaccaggttcaatagttagagaagggtgcaaggat

SEQ ID NO: 587849 - DNA, 4001 bp, Homo sapiens
tcagaaacccgacctttatcaggagataaatcaatctgcagcagctgcggacagccatttatatacaggctctgggcagattaattaagaaaagcgaagttaaagattcaaggggcctcagagttacattaagcacatgaagtttgtctggagtggcctctccagctctcctggtcttcactccctagctctggcctcgggcactattctgcaggacctcctccacgggaatcctagctattccttaaagcgaccttctgcagattcccccaggaagcagcagccagactagggcacggtggaatttgtggtgcccagtcttcaagggtttctccgttacgctttgcaaggaatgagaccatgggctgcacggccgcccagccaaatcctccaaactgaaaggccttttgggggagagggggagggaaggcggctatttttagtaacagttgtggctcacatcctacttcccggaatcatagtactcaaacttttccaagggttgaccgcccttacaaaaaataaaaaatagcacgtttcaaaaaatggatctgagcgccttgtgctgacctagccgtatttgctcaaagcaccccagtcagcgccaggtcccccccgggaaagaggtctgggtgcgccaaccaacccggtcctttcaggttcgcaaagagggcggtgagcggcgggccctggagcgcgtctccactggcccgggggcttcaccagaggggtttctggaaaacgaaaggaattatccggacgtggctccaagtctggaccccttcgggcgggagctacagggcacaaggttgtgctccccactcagaagaagcgggcaccgagtcggggccgcgacgggaacacccaggagggccggggcggctgagtccagagcgcgcagaggtcgggcggggacgactctccccatcggcccctgactgcgaagcccgggaccagcctcgggcgggagccgccgtccgcccgctcacccaggagcttcccagtccagcaccccaaacggccaggagtaacaaggaaagttcgcaggcaggcgcagagcgcctgggtacctctaagcaaacccccaccctagttgcagccgggtcccaaagttaagatcccgcctctttactccttagggctaagttttccaccatcaaaacaagtctttgcttccagtttacagaaaaagaaaagaaaaaaaaaaaaaagaaaggaaaagaaaaaaacccacgatgcgggcatagggccacctgccaaatgcactgtgggcacctcgatcggttgttttgtcgggggagaaacccactcgtcatcttcctgctcgcataccgtgactatggagagggaagaaaaattatttttaaaagacactgtggggaatataatagtaaaaactgcatcctcggctgacccgcgaagttcagtgtcatcgcagaccggagtcacccgcgatgttcctctttgccctggtgcgtagtcctaccctaattgagcgacaagtacagcctggagcctcgcggtcgaataatccaaacgaagatgacggtcatcggaacagtaattaataacagtcaggggcccgaccccgccgcccgcccgccggccaagccctaccgcggacacttacactgcacagggccggagagtcccaccatccgccacaggctccgagctgcaaataaaacttcccgtcgtctcggccggcccgcggggcgacggggcgaggacgcggcgcggcttccctcgcgaggccagagtgtccgcggccactcgcccacgcgcgctcgccacgagaccgcggagtcgcgccgcggagcgactacggccgcccggcgctgcgcagagagagctgccgtgcaaaaagcccggggtcggggacgccagccaaacgcaacctccacgcagagcccaagacttgcggagctctgctcccctcctcccgcctccctccctccctccgcttttctgttgttgctgctgtggcagacaaatgtgatgtggggcgcagggaattgccactgtcacaggcggcgtctgcgtctccctcgcccgccctcgctcactctcgaggaaggcgacgcatttatctgcagggcggccgggcgtccgccggggagcaggagcgccgcgcgctgtgcgccgagagcgcccgcatcaggccggctccggcgcacgctcgcgccaggggcgccgcggccggtcgggagggaggcggctgcgcggccgctaccaggtgcaggggggaggacccgcggcggggcgtgggggaggtggaggtgggagacatctgtgttgtgcgggggtcacggaggtcaagtatatgttaacaatgggcaggcccggcacgctagggcgcgcgggctggcgggcggcctccctcccggcctcgccctctcccatgcaggctggacgtggggttggctccctaatgatgccttcccgggccgccagctctcaggcggcccgagtgccctgcagtaacccaagacgaccactttccccggccatctggagcgctcccggctgccctgcctgtgtctcatcactggctgaagagacagctctgctagaaatcaagccactctcagatctcctctctaatccccttctgttagctgatttccagactgactatttgctttcgcattagataatagccttagagaaaacaattatcattttcttttattctctttgtttttctacttctcccatagtataccattaagagggacggctttctatctcaggtttttgttagatgtgtccccctcccccagacattaatatcaatacttgggggcagtgtggggggtagtcccggaggaaaagatagggtgaaagaattccagatatttccagagtaaataaataatctcggtgaagaggactgacaatttgtacagagccaaaaagggcttgaataataatgaaaatattaatatgtaggtcaaatatgatcagataatggcttgcaatgataagtaaaatgaaatcttttaaaattactatggaacggtaccctgactgcaaatgttattgtatttagtggaactatttgaaatcctactctgaaccatgttttctccaactagcctaaatcaatgtaagatgtcctgaatacgtgttttaaaatctcatttttacaaaggaaaaaaggcatcagatagagtctgagtcggtctgatgcagttgagaactgatgagacatttgtgggttttattttctgaagtggtgtttcaaatatttaatagtgagtaaaatcccttcccccatccttttaaacccagctggagcttccaattctgaagtcttttcagactctactaatttttagcaattcatttccagaaaacactcattgtacattctcccctctccttgggacatttgtctaatgaattataatagattaatgaattgcaatgttaagtcttggtatttgatattatgatgctcttaatttgaatctcattttatcaaggtgtacattctataataatttctgtattacagttctttatattttgctatagtcgcaaatcttaatagcatgaataatcttaaactataaaattttatgtacaccatactaatataactcctttgtgtagaaaattatgtcaaagcttactattgttcttaaaagaataaaatcatgttgacattttattattctattacctgtattatctcttctgtcccccaaattgaaaccaaataatttggattctggaggcatatagtcatctttatttaaaatttaaaaagtgatacctgaatcaggaatgattcttgtgaaatagtgttacttctaaaatcataatttaaaatatagaaaaagtaaatcagcaatagttttatgatataaaaaagcagggacagaaataaaatagaaatgttagctgcatttttcttctgtctgtaaattgtgccagtgtaggtgtaaaattatggtagaaactttgaacttctaaatcaatgaaaagtaacttgc

SEQ ID NO: 587850 - DNA, 4001 bp, Homo sapiens
cttcaggctattgctgtagaaccagatgtattaacaacaacactaaaacaaacttatcaatgactctaaatccctaaatatagttcaatgctttttaaataagggtgctttgaagcttagtttaaaatgatgcaattagctagaagtagcaagggtcctaactaatctcgttcacctattataattcacaaatggctttggtttattatggggttttgttttacaaaattaacatatagactcttcaaaatgctgataaatcagatcatttaacacgtttattaacagcataaaaaagatctgaattatgacataaaaatcagataaatgtgctcaatattctggtgaaataaaaaacacaggcactttcacactgattctgtattatatacccagggcacattacatctttagttgcatggtgcatataaatcaagatgaaagcttaaagagttaaaatgacctttcaaagacctcagtcattgtctttttgtaaattgattttccccataattcagctacatacattcctagtctactaatgaaaaagtgcaattctgccacaaatgcatcctttctgcatatatatcaataatgattaggatggacgagacacatcctaaagggaaaaacattcttcaaacaactggcaatacctacacacaactgtggttgcagaaaactggcagataatgtttcaaaacaccatctgtgaggtgtacaaactctgtgaccaagcacagcctcttctgcctgtcctacccaaataatccacataaatcggccagctggaggatctctatctgccctgtcttttttatctgaagataggaagctccaaattaggcacagggcaatttagacagttcttgagaacagccgaaacaaccctttccccggccagccttctccacaagcagagccttcactggcaacgatcacagaaacactccaggctccaaaaataatatttttcagaggaaactgacatgcactaaatttccaggacaagagcttcactaattcagcaggctttttattttaattaactgatttcaattatttgtctgatgacatctaagggctgtgatttaggacaagactgaaattccttgtagttccaaagcttccttcactttctctgacataaacagctttttaaagagatcttattccaggattctgccataatctgaaaactctctccacagatgaaatttccaggacaccaagtacagatgatagtcacaaaattctgaacagaaacaatacttcttacttgagctaaaaccctcaagtaaattactccgacaaacatccgtggctgtacgaccccctcaacctttaaaatacatctcccaaattttaaaagcaagggctccacaccctgtacccctccatgtatcaagatctttgtggttctctttatgctaccttccaatcacacctctgtcacccccagcctcttcctgcccacatcagatacaacacgctgtggggcagaaggtattttccatgcataatagaaagtaagctttcttcattggaaaaacagagagaacacagaacagggctaactcaccaggcatccttgaatccagcgtaccacacagaaagtggctgtctcctaaaagcaagcgcgttccgggctcatgcctcctgttctggaatgagtggcagcagagaggagggccatcagaggggctggggcggcatcgccggaggcagggtgctgggcgcgtgcgcctgccaggcagagacagatggagagctgacactccggattgcacttggagcagaaatgtggaggatgacaggagcacatgtggccttgaacccagccctgtctctttaggcagaacaatgacagggatgtgtgtgcaaagtatcacaacccctaccctccccttagcactccacctctctctgcaagtttcagagcaccaaaaagcaaaaagtgaaattcagaatgataagctaaatgccgaataatttattcaccaccacccccatcctgttcaaggttaacccttattttgccaaaagatagaaatgtagacctggccccctaccacccctcacaataaaaggcttcccttcatcttctcattttcatagccataattgggaactgtattaaaaaaaaaaaggtacagaactcaaagcctgtttattcaactggaaatcccaaacagcctacaaacatttttataagactttgtatattgtgccagtttatcatcctgcacaaagtatcagaatcattccttttgtcagcttctcagtagtatgtgtaaaatagaacactttttagaagctgagccgaccacttttattttactcgagtgcttttaaccccctgggatccccgggttgatatgctccaaacattttcagcttactttcctctaccttgcatagagatccatgggagataaaaacaaaatcttcattgtaaagccttttcaaaagctgaacaatcatgtcctcctgattcctgatttctttgcacacccctaaatgtttatccttcccatgaataacacatacccagccaggttcaatggactcttccctattaagctttaatggacaccatgatatataaaactagaagcctttgttatagtgctttatctaaagctggctattttcttctcagcagtccctctttagtcctttgtaaaacatccctgcctcataggagaaacacacgcctgcctgccttgcatgcctcttctaaacacacaacaatgccaggcagaaggaaaatactgttctctcctaaaactctttctcagttttacacttgcaaatctttcctaggtctgtgtttgtttcaacaacagggcacatgatgaggtagctgcctcaggctttacctttccatcgtatgcacaatccactatcaacacagaaacaattccactcagggtcctctgatcagcctgcaagctcaatgaacatgatagacaggagcattcccgttaactcttgctattccttcagtcctcaacatgtcctttacttactctacactttccatatgcttttagcccttgtcagatggatttccacactacttgctatctccaaaaatttctgaaaacagaggcaataactctgacttctacctactcaatcttcctacacctcttcccaagagtgcacacaacctgtttcaaagcatacccacacacactctccgcacaaactaaaaatatattctcttgataaacagtgtcaatcaataagaacttctacagcccctaaatactgtacccaagaagggctgctttatccagcgaacccctcaaaaatccatcattgtcagagacaacttgtaaaaagaccacaattcataacgattactctgttctgtcactaatagtatactgcaccctatttatgaggccaatctttttgttcatcttagttagatgtcacttgtaatgaggttctctgtaatggatttcagtacagttaagcaccaagctcaaacattcttatgatagaaagctttatagcaggcatgagtgtgataatcaattaagtcctgctataagggcctttatggaatccagcatcctaaattagtagactttcatttttaaagagagtatttttgaaaagccacttaatgctacatgccactgattttttttttagtactatacttatgttagaaagaaaacattttcacagtgggaaacccaacctttcatcaatatgcatggtgaatcacttctaaaatagaaaatcatatgacaaaatgcaatacacttttgagaaaactggatgatatccggctttaaaatggggtcttaatatcggtacactgcaagtccctaaaccgcagctcagacaattgaacttccatatgctgtgtgattatgtatcttttctatgtgtaaaaaggctttttaagctgttatctgactacagtaattgccactttaaattgatccacatcaacaaaacctggatccctggagattctc

SEQ ID NO: 587851 - DNA, 4001 bp, Homo sapiens
catgttaagtcaattaatttgataagcagacctttatcaaacccatctttttaatataattttgatatagtttgaaaatgttttaaagaccatgttatgcttaaaagttcaattttgacataataaaatggttctcttgtcacaactgagtatcataataacctgtcaagaaatgccagctcaccaggacatctcacaggagacatatgcttacccctgtggctttgggtaacaacaaaccaaatataagatgacacggttacaacttggcattgcacagtcacctgctccttacacatttggaaaggtcttttaaatggcagtgcaacactgcataaacagcctgagatgcgtactttgctaatcccttatagtcccaaagatctacttttgccttttagttatttttcattcatatggatttcatggcacatggtgtgcaaaatagctgcaaccgataacatttattagtttcacaattccttgatgacaatttcaaccaggactttgagatttattaaaacagttactcactatccctaatgaaatacacaggaaagaatgggaagttgcaattctgtcagaattctctatcctttcctttggactgtactgaaagcaatacactctattgagagaactcagaacttgagccaagcaggaatggagtaaagttttaataagagtctgacaggttcaagacaagaaagacacgaccgggtgcggtggctcacgcctgtaatcccagcactttgggaggccgaggtgggagcatcacgaggtcggaagttcaagaccagcctgaccaacatggtgaaaccccgtatctactaaaaatatgaaaattagctgggctcagtggcgcatgactgtaatcccagctactcaggaggctgaggcaggagaatcgcttgaacttgggaggcagaggttgcagtgagctgagatcgtgccactgcactccagcctgggtgacagagcgagattctgtcctccccctccacccaaaaaaaagggcaagaaaggcacttctcacttcagaaagttttctgtatgatattgttgcatatcaataccctttttaacacaaggatattatattttaacattatttgtaaccacttgaaatagatgaaaatggtgttagaagaagtaacctagaaataataatagcacatttccatgttccaagtcatgctgaacaaactaaaataaagagctccacattaagatgaattagaagttacagtggtaacaactggaattacagaccaaatgctgcttcatttgctaaaatcatagcagactgcaacttcgaagcaataatgaaaaggaaggcaaatattggcagtcacacaaattagacctaagctatgatacttctgtgctcagtacctacttactggcaaacaaatgattttttttggttcatttctgcataatacattgatgctgaattttattttcccttgatttttcatttgcagaaaaaaatttaatttaaactttaaaactgaaactcaaaagcctgaaatgactacttacacgttgtcggtgtaaatgaactggttcttggagctccttgagtagttgggggaggtggcattgttggaggagtcagcctagattgcgtcttcacatccacaggtgagtctggcattgtggagtgcttctcagtacgatctggaggatgccaccaggaacatattattttactccttaagcacctcagtttttcaagtggggtttatcttttttaaaagcaagtgaacagaagaaattcaacatcttctatcaataaaatacacttatctactgacgtttaaatcaggattttatcatccaaaccccacttaagaaggtatagcacagatggcaggacctcatttgtaactaggttatattatatcctattgttatttctggcttaggcagatgctaccttggtagtgttatatgcagcagcacaactgcactggaagctgaagccaatgttagcaagaggtagaaaatagatgaggaagtgggatgataatgaacccctcatgacagctcagaaataacaaaaacctgaagtctgttatgcaggtgagatactggtaggagccagctctttgtaatgattttctcttacacctgccatccctgtgctgtccttagttttctggcctattagatgaaataggttatcgtcttccaggcatatttcgcatttcaatttttcctgccctgttttaaaaatcactgctacataggtgaaatgtgttatacaatgaagtgaaactattatttacttaaaaggtgtaaatttatgacctgccattttaaaagcatgaaaccaatactccaattaataatctcaaacagagttaagaatgtaaaagtcccaaacagagaactaaaaagaactagacactgctaatatttttttcatgagtatgtggcagatatgaagaaatttcctgattacccaataatggacattcatacttcagaactgctgtaagtatacttttcccttgacattctgaactgtttttctcaatctaatctacttatcaaagcaacagaccttttgatctgttcaaagcaatttcttaacactttggttataataaacatttaaaagttgaaataattttggtatcattttaaggaagctgcaataaaagaataaaaataatcatcattcaaataagagcatttgcacgatgagctagtcaacagcagtatcagagtctctatttttggttctttagatctaattctttcacaaatgtgtaggcacgcacatgaacacacacacacccaacgtattttgaggcacctcttgcagttatagacacaaatatctcacacttgggcttttagaaaagtgaagtaactattaagaaagaacaagcctttaaaaatgttataataaccacagtgagaaaatctcaaaatcacttaaaggtcaattattgaaagaaaaagaaaaacccaaattactactataacaattccaaatctacctcacttttgttcaaagcaattgcttaacacttgggttgcaataaaacacaacatttaaaagttgaaataatgttgatatcactttagggaagatgcaataagagaatgaaaataatcatcattctaataagagtatttgcacaataagctgttattattattattgatgagttaacagcaatatcagggtctccatttctgaatctatacttctggctgaataacaacggatgtccctatagtgaataaaagtgttctgagtgaaaggatggtagagacacacatgaagagcattttcacctttatctattgttaaaaacttgtcttcagattgctacaaccagtaagtcacttattctagaaaaatacagaagttaggcaggcttaaaaccgcttcttcaacagttaaattcatttgcacattctactcacctcaaccaacctcagcaacaagggaataaatagcttcccacttatgttgcagctgagggaagaggtacagcagcaaatacaagtctccctaaataaaggcaaatatttctgtcatgccaaggagggagggaaaaagggaggcttgccagagtcggctgggagataacagtgggaactgctggtccatctggttttcattctgctaacactcacacggaactgttagagaaggcagtccagatacacagatttgaagcacgtggttgcacagacagagaaaggaagagcaggagggggaggggaagtgggagtaacaaaaaaataaataaagcaataggaggaaaaagaagaggaggaaaaagaacaaaatagagagacaagagcctgatgggggagtaagttaccctcaacagcttcctttaccctcagtgtctacaagctggaccttaatgtgcacagccccctacctgactcaagtttatagagttaaggagcaatatctaaacttaaacatatttgaaggctatttttctttcctaaaatagaccacccta

SEQ ID NO: 587852 - DNA, 4001 bp, Homo sapiens
tttaaaatacttccttcattctttgagacctcattgtgattcaaactcaggatctcctgtttactagacaggtactttaaccaagtcactagaaaataaactctccatagtccacatgtacttccttcctaagttcttgtttttgtaaagtctggcttcactggtgtaatcacccatcacgcaagaaataagacaaatttatacttcttacagggaacaagaaattgttttcgagaacagtgtggactagcaacaaagaggagtgtccctgtcttggggacacaggagtggtgaagacgagagatcataatcagtgtcacctgatgggtgacatagaacggacacttaaggagtaggtcaacatatccttggtctcaagctcaagatgaactttatctcggcttttgttttgttctttggcatctgaagtcttgactatcaagcataacgatgcaaaaaaaaaaaaaaaaaaaaaaaaaagattctcaccctactggtacatttgcacagaaaagaaaacctagaaaaatcttgattgtaagagagagagaggatttcatttttgttaataaagttaggaaagctggaagtggctggctgtggatctctgaacctgagatagcccaaaggcaagagtttcccgagtttatgggtgctgagtataggagctgggttgttgctacttcaggttgttaagacagtcgttataaggggagcaagagtcagattagttcaatttctttctcctggggcagggaggagagggagcagcaagccagcctcgtggccttctcgtctctagcctacaaggaataggctgatttccccttggcaaggcgcctgaagcagctggcaggcaagccctcctcttcctacttcagtacgccctctgacctgactgcactcagaaaccaaaattctgcaggtgaatgtaggctcccatttcgtcccacaatcatttcatcattcaggcacagcttgacctctaatgtgacatcacaaacccttccggtccacagtttttttttcttcttcagaaactacctaaacaaggaagtttgtgttccaaggtaagataacctgaaatgaaaaactcaggatccctcacgaacagcctgaccctgctttcaaccaggaagttcaagggaggcaggactttacggtcaaaactgcaaagccgaagctcaagactgtaagaagaaagtgatcttcaaagaaaaggattcacccaaatcgaagaggttgttgcacttcttttccctggctgattacatttcatgtctgtaaactttgctaagcccggggcgctggctgtataagcagagacaggtgtagggacacctctaccctctgggtacatctgcggccgccgctgctgggtgcataggacgaagggccctcgacccaatcccagtccaagcttccggatgacgcacctgggctggggacctctcccacgtgaggggggccaaccaagcatccccagccccggggccacccagcctgctccggagggagggggcagggaaaaagggcatctcggggccaaaacctcatgccggatcctccggctttccccccatttccaggatatcgtttcgcatcagggacactcgtctccacacctcctacctcaaagtcctacgcacctacccttcacgtctctccaaagcaactgaattaaagcgcctactggccttggcggcgcaggtgagtgccaagaggtggaggaggaaggggcccgctctccgccaccccctttcctcgcctccccacgatcgccaagcttcatcggggatgtgtgccttggggtgcgcgggttaagagggagcttaaaaatgccccaagcgtcccttaccttccacagccattctctcagagcttccctaacgcatgcataattttcttggccgaggtactcctcctgccccgcgctccccccttcctctcgctttcgcctaaatattctgcgcttatctgctccaggaccaacctgccgcggtcacgcaaagcgaggcagccggctcccggctcggcgcgcgcagggcgtcctgggaagtgtagttccctcccttcgctcggactggggagagcaccccgactcctccgcggagtgccgcctggccccgacacttggagagcaactccagcttcagctggccaggccgagcaatctctcctggggaagttgtgaggggaccagggatgcctggttgtggcggggcggggggggagggggggggggttcccgggaagcggtctggactacatctcccaggaggccgtgcgctgagataggttcgctgctaagagtagggacccgtgattgagcccttccctgtccattacaaggggtttggcacctagcaggtgtggtgaggtgggcaggtgacggtcagctgtgtgatgagctcctgcgagctcgtccgtgggcctctgccgccggtaccgccccgccccctggcctcctgaaccaccatttagtagggagagcaggaccactgtcctcctgtgtggttctccacctgggccagagaacgctgcccagggtgaggttgaaacttgttccttcgcaccctgagatgtatgggttttgtgggggaattccgacggttgatacagttgtcttatcctacagggtggttcaggtggctaaatacttggcatgggggtgtaggggaggaggagtggcttaaaccccaataggcaacgtccccaaggggttgttaggaacaaagtctgggagccaggattgcaccggaggaggtcagatgaaagcctgtctggcttccaggataggaggctttcaatttgcctagacttggagcctgttgacagcctgtgatagggcctaataattaacagtgcctgagaatcaggttccttcaacttctgaacctatgtcctagctgtaggtgctggggatgctataagcagacatgataatgggaatcacgtggatagcaatacaattcgacagctcgtaaaaattaagtttctaaacattttttcctgcgtgtgaaaatacggatacagttgtggctggaaggggtaagggaatagcctcgggaataaatctggctcaagactggattgacttttaaaggccttcagtttacaaatgtatttggtaccacatccacccagtcactcatatataatgttaatctctgtaaaatgaggaagtacaaaaatcggattcttcccatgatgactacttagacatttttgtgtgtcttggtcatcagcaaaaaaaaaaaaatgtttttcaaaacaatttcgtttctcagtgtatacatgcacacctgttgttctggtcactaattacatgcttagttcccctactgggtaatatataataataatatgtgtataggtactttaaaaaatacctgcgtgtaaccattaaatgctcttgttgatactttaattctgagtccatggagctgtgtacaagtcaaacctaagcctctcttttaggtacagtagagagagacccattcagtgagacataatttccatgggaaaaagaattttccgacctaatacacagccaagcattctaaactctggaaagaactgaaatccaggtgcttcactactttatgtatataaaatcaccaaagtgttaagtattttctgagattgaatgaatgtgaaagaaagccataggacaggtagtatcaatggttctcaaccttggctgtgcatcagccttctacaaatatatattcctaagcttttatcttagtctcacagaatcagagcttatgggggtttgggtagaggcactcaggttttaaaaacccacaggtgattccagtcttcattgagggtgaaaaccattggtctggttccaagcttttaaatatctgggtgatataaaaatataaaagtcattgaaatctgtggttaattttaaaacttcatcttagctcatctttaatatttttcccagtgatgtgcattctagacgagttttatttttagtataaataaaa

SEQ ID NO: 587853 - DNA, 4001 bp, Homo sapiens
tttactctgcaaaatattgtggtgctttgtgttccagaacaatagttttacagcgtagataaaccaggaagtggttcatctttaatttaaatttggttcttctttcatagtttttatagttcttctggctcttcaactgtaaacttcctttattaaatttatttacgaactgattcaaagttcaacaaattaaagtttcattctaggttttcacttgtaattctgatcaagtctcccactcatacacagctttctagaaatacaaaagaaaaacgtacagacatttaaatacaacttggctttttatttttggtaataaaatgtccacatcaaatgactactcaacgtgatgtgcttgcaaatagcaccttctctctcatttcagcatgtaagaataggctattatagaaataaacctgttgcttaaattcgacaatgcaggcatttccaatcaccaaatcacaaaggcaatatgctttccatgccatctttacttcgcaaagcaaaaatgatgttgttttcatttttttttttttttacagaattccaaagtaacagcatgcgtcatttattacatggaaaaagtcaaaatctgtatctaagtatatagacatatacgtattaattgcacggaatattactgatcccatgaaaattctttagacaattttaatactgtactgacataaaagaacctctttcctaaaacccacttatcatgtaccatcactaaaaaaaaccgagaaaattattttttaaattcttctctacggtgaaagccaatgggaagagctggtgccgcgcgatgtacatcactgcaatcgtcagataagaggcagcggttctcataaagacgcggtggctcacgcctgtaatcccagcactttgggaggatgaaggcgggtggatcacgaggtcaggaggtcgagaccagcctggccaacatagtaaaaccccgtctctactaaaaatacaaaaaaatagccaggcatggtggtgggcacccgtaatctcagctaccggtgaggccgaggcaggagaatctcttgaacccaggaggcggaggttgcagtgagccgagatcacgtcattgcagtgcggccggggcgacaatgtgagactccgactcaaaaaaaaaaaaaagagtgcaatctgcgattctgctaacagacctgcgaggtctgcagccctgtccgctaagggtgactcagagactgccagtggcaggcaacggccggcgatagcaacaggcagccatgacaacagcaggccacgatgacatcacacagccataacaacaaagcagatgcgcaggtgagtgtccagctctccagttatactcagagatgagaaagacgacaatgggcaaattccgggagtccggggcagggagaaaggggaccttaaggatctccagccgtcccgccccgcccactcgagcagtccctacccgcctcccaagacgcctgggaagagcagtggaaccagggagagcacgaacagcaaagaggtcagacatggggaatccgggcacccaggctccgggaagacggcgcacggaaacgcaggggagcctgcaccggctgacggcggcggaaaagggcgaacgaagcgcctgagggccctggcagcactcaccagggtcgttccagcccagggcagggcccgcggtcagcagaaacaaatgcaagccgaggagcaagcagtacccggccgctcccggcccgcaggctgcggccatggcgctcgatgaagatggcgccgggctgccagacgcctacgggccgaacctgggtgcggtagcgcgcgcgacgctgcgcagctacaccgctacccctggcggcggcgaaggaacggcccgactgcagagctgcagccgcaacggatccgtgcgccaaccctacgtcactgccgctgcggcccgtggggctcagtgagtggccgccgtgggcccccgcccctggagcacagcgcggcttggggcggggcgaggcggtgtgggcggggccaagggcctggggaggcacggctggaggcgggttggaggcgtggcgccgcggtgtgggcggggccgagggcctgtcgccgccgcgcccgcgggcggggcgagggcagcgcgcagctttgttgtgtctcgtctgagattcgggaagcttctgtgcgtaggcgatgcagtttgagaggctgaaaacgtcacgacgcgaaatctaagaaatgtagtcaaattatgtattattaaaacctcaataattgtaccaagggtagttctgtgctttattcagctctatgtgttcagcacttagcatagcgcttggtacatggttagtgttctatgactggttgctaaatacagagaagattcaagcgaaaagtaacagggaaatacattgtctggtttcaaggctcagaacctttacatggttccttgcgcatggaggccggaagactataaaatgtcaagaggagaaaatatcgtctgaatgaagaaccagccagagaaaacagttctctgggcttttgaggtctagcaggcttgggtttctttcattcattcattcattcattcattcattcattcattcaatgaatatatgttgaatacctaatacgcaccaggcactgttttaggcatggatggtacagacaagatccctgtactcattgaaatagaataggacaaacgacataccaattaaacaacaaaaataataggtaatgataggtaataacattgatgaaaaacagggtgatataatggagcctggggacacaacttcagggagggccttgctgaggaagtggtttttgaagcttgggacctgaatgatgagaaagaactagccgtacaaagatcaggggactcatcttcccatctggggaacagtggatgcaaaagccctaactttgtgtttcgaggaagagttatttggtcagatcctataaagagttcagtcccacaagatggccccaacttcagacatcaatcacaagtctcaggttgtgacctatgcttctgaccaaccagctataaattagggtttccaggccgggcgtggtggctcatgcctgtaatcccagcattttggaaggccaaggcaggtgaatcgcctgaggtcaggactttaagaccagcctggccagcatggcaaaaccccacctctactaaaaataggaaaaatagctgggcgtggtggtgcacacctgtaatcccagctatttgggaggctgaggcaagagaatcgcttgaacctgggaggcgaaagttgcagtgagtcaagactgccccactgcacctggaccatggagagagactccctctcaacaaataaattggggttttcataaccccccatcttgagttccataatttgctagaatggctcacagaactcaaaaaaacactttatgtttaccagattattatattgagcacctattagtacctaacagtacctgccaggcactgttatcagtattggggatacagcagtgaataaaacaaaatttgggggacaagaggcaaacaaggccataactgaagcaaagtaagttaggggaagagtggaataagagatggcagagcagtggggcctcggcatggaaccaaccaatgctgggaccaaggactgaaataagagataatagagaatctatgctcaacatgttaagtttgaggtgactattaggcatccaggtagacgtgtcaaataaatagataaactgtaaaagtctgaagttcaaaactaaggtaaatttggtagttatgttgtaaatataaagatagcatttaatgtcatgatgctattgtttgaatgtgtcccccaaagctcatgtgttggaaacttattccccaaagcaatagtgttgagaggggggactcttaaggggtgattaggttatgagggcagagctcttaatgctattatcacaggagtgggttagttattggggagtgggttcccgataaaagggatgagttcagctccctttctcttttgcct

SEQ ID NO: 587854 - DNA, 4001 bp, Homo sapiens
gagtcttccttgaattccttgggtcttttaagtgcttccttccaggtcagctcctggatcaactatttcagtgctaagtgtgtcgaacaggagcttgcacaggttgcccagctagagtagaaagtcctagagagcagagactgcatctttgtcacttctctatccctgcgcttaccacagatcaggggacattagctgggtcacaggaattccataattacctttaaaatgtatgcaagcccctcatgagagagaggctttgcttgagttatgcagggaaatgaggccgacagtttaggatgctgtgaggaggggctggagttacctggctcaagggcactgcatttcctaaatagctgactcttccatcttactttagtagtaaaatactctgaacttagagccagaaagggaaagaagcttatcaaaaagctttatcaaaaataatatcaatattcacaggtaaatcattagctttcaaccagggtcaaaaaatcttaatgctttcaactgtgttctttcagcatcgggcctggccacgggttgaagccctcttcaaacagcacagaggcaggagggtgctccccgccactgggtatccggttgcccagggaatggcatagccccagaaaatgctgaggctcccacatgtcgggatccttcagctcgaaccctaatatctgtgtggctttggggatgatgtgattaacaggagcagggcgacttccacttccatggctggcttctctcaggtacaccttgttcctcaaggctgtactcatcatttgttcctttatcttttaattcaattaaaccagcttttattgagcccttacggggacaaggaactgtgagatactgtgggaaatttaaagttgaaaaagactgaccctaaaggaaaaccagcaagattacaacataatagggacctcgagataaaatccttgtcatgctgtacagagaaaattaaattccaagaacatactgtacacctcctaggagaaagaggctgttctacattttggggtccagagatgaggacatcttcagatttttaagaccttgctctccagaagaaagtattaataccttcccagagcacgcccttggcacaaagtgggaagattacacaatcctgccctcatcacccctcaccagccccaaagatccccgagggttgacagaatgaaggtggtggagcctggcccaggggcatgccccttatctgtcagtgccatctctgccggccagaggtggccctatccagctggagtttctgagtcggagatttcgtctctcggctcccttccatcccgctggagaacagcgggatccagcccttccatccgggctctggtctgtcttgggggtggggggacacttcgatgtctagcaggggactgggagaccctaggatgaacggagccgggcgtacctggatggcggtggtggggatgggtggggataaagggtctggaggacacctggctcagggactgaggtccttggcacagcgccctgccctgtgcccgttggttgcaggctaacggccggcgccccactctcggcctgaccacccacctgggcacgccctgtcgtagtcgaagcagcagtccccggtgaagcgacaggcttggtcgcagaaacacgtcccgtagaccctgtccagcctccagccgcgggcgaagcaggcggggtcccggccgggacagcagcgcccggcctcggcgcagccggcctgggccccgggccacagccgcgacagcgcgcacagcgccatccacagggtcctcatggccagggctccggcggcgcctgcgacgcgacagacccccggggcaagcgctctgatcctcggctggccgcggcccgggagctgcccgagcggccggcgaggcacagccgggccctgccctgcgcccggcccccgccctccgcgccgcccctccccagccctggcggcgcgcccgtcgaggcccgggcgggtggcggggctgccctgcccaggtggggagggcgctgcagttcccgggacgggcccgcaatcgacggtccgggcgccacccactccccgctgccagctcgcgccccagctccagcccggggacctccggggcgcgggagcggaaaagcaggtgctggcggggcgggggtcggggtggggtgccggggcgtagccaggagcccggcgggggaggccacatttcctggctctaaactgtacttctaacgcctggggacacattaacgagcgggcattttcactctaaagccatgagaccaagagcactcgatgggcaccaaacgtgtctcagcagcactctgcgcgggccaccccgccttcgcccgggaaagctcattcaaatacaaagtggacaccagctcgcccaccctctcagtccccgcaggccgcagagaagctaggagataagtccaaagaagcatcctttctttctgctgcatttataatgggactcttctgccccaggaaaatgccacttcgcttcacgaggaggcaatttgtgaatggtgggaagaataaataaaataacggggctctgttttctgataaaccaatttctccccctaaaaactctgtgtactgatattttagaactttcactttaataaaatgcttgcctaacttttaatatatatattttcttctccctttctctccaaatgtgttacgttttctgcaccactctttttgttcacccaaatttatgctggaattttcattttatgttcttaaatcatttaccctaatatggtttttatgtgaaaccaggaatataacgttttttgcatctgcgaacctaagaaatcaaattaatttcatagactttctttctttctcatataaggatttacagaggaattttctttattcatcagagagaaaagttaacaaaagtagaaatgaaaaacttgactacaaaagtagtgaaacaatacggtaatcaaccatacaaaacacattgtgaaatgaagaagatttaatacattataagaattttatcttataaactctaaccacaaagtttgaccagtggagactgtaatcttatttcatcttccaagaaaaacacactctaaagtcaaaaagaagttttttctttgtgagcttatacaaacaaattctcaacgttgagattttttttccgtctttaggtaagtctctcttacttttgtagtctaaagaaataacatatacatatatatttatatatatgtgtgtgtgggtgtgggtgtgtatctttagtttttgtagctggaactaaataactgcagcaaattataccctctgccttttcccatgtcacagattttattagcagttttgtattaactcattcatgtaatttatacccacaccttctctaaggctgtctgctttatagaacgcctttaggcagatactttttttgtaatgccataagaatctggaacagttccagaaagatgtaaaggaaaatgatccgccgacaagttcgctttcaggaataaaacatgaaatgaagtgataacagaaaggagaagaggaggtctggtttaagagaattaaaagtataatgccaaatgcctgctcaaataccgttcttttcagcccgctccccacccccaccagcccttttccttatagacaaaaccaaaattggaaatcgaaaacaaaaagttagggggtctgtgctcatgagatttagcttccagaattacaaaatctgggtctagttctgatcctatgatttctgacaaatctcagtgccctcaactcaaacatagaacactaaatcttttcagattgttgtgagaggcccacagagacgaggcgatgtgagtgggaactaaatatctattaatgtcctaatgtccaccccactcccactccataatttaagcctaaaccaagcaaagacaagtgcagttttggttgtgtgcaaaataggggaaagcaaaaagattttgtcgcttaaaaaaaaaaaagaaaagaaaggaaa

SEQ ID NO: 587855 - DNA, 4001 bp, Homo sapiens
ctccctagggctgattataacttgcttggctcatcccgcagagcctaggacttggggaggccaacgggaagcacagaaagaaggtgccagaggcagagggaaggaagccacaaagaggcaaggtggattctagactagaagtcaggagtcctggggtctagtcaccctgactaactgtgatttgtaacaactcacttctgtccacaggaccagctacataatttgtggggcccagtgtaaaaggaaagtgtgtgtgtttgtgtgttggtgggaggggatgacttgttaaaaaattataagaatttcaggcctcatggtggatcaaggctgtaatcccagcactttaggaggctgaggtgggaggatcgtttgaggccaggagttatagaccaacctgggcaatataataaggccccatatctatcaaaaaaaaaaaaaatccatgcatggtggtgcacacctgtagtcctagtagtaccagctacatgagaggctgaagtgggaggatcacttgagcccagaagtttgaggctgcagtgagctatgatcatgccattgcactccagcatgggcaacagattgagtccctatctctaaaataaaacaaaataaaatacatttttaaaaagttcaagatagcacctgcagagcattaaaccaagtgtgggaccttgtaggatggcactggttgcagaagccatgaagccagccctacctgcttgggcctcagtttccctaactatgcaatgcggaggctgcatccagtcagaagtttgtcggtggagccctttcttccaatgaaccctcaggccattctttgtatgagagacaaacagagctgctctggttgaagtaggctgagagctctggccccacctcttccacctccatacctgtcagtggcacctgagagtgtggttgagagccctgtagatgatctcaaaggcccttttcagtttctactttccataagcagatgaggtggtgaggttctcactgctaggaacacaagcatctgctgggggtgttacaggaggattactgaaagacacccgaaatggcgttcaaaacctcggaggttccctgcctcatgagataactccaaagcctgcttctcctgtagcctcaaaatgaccttgaagaccaagtaggggcctaaagacacccaggccctggaaatggccacttgggatcatgtctggttcttatttccatcccaagaactggctgcaagggccaccctgctgctggctcaccaccctggggagaggtcagtcctggcccatggggcttccccggcggcttcctcccaaggaggtcagagggtgggtcaggcagggttcaggggttgggaagggcagggcctgggctgaggggctctgacactgcaggtctcttttggggaagggctggaggtcctgggggagaatcctaggcctggcccccggttgaaaggctcggtgggggatgcaggggcctctctgatgggtccccagggtcgaaatttacactgctggaaagttgggctggtgatgcctttctgcgtctactggttaaagggatcagaaacttctctggattttaaaattatttgtgaggttagagcaacggccgatgagaacaggactgcaagggggggtgtgtgagtgtccccatcctccctctcctctttgcttcctctggtcttcagggatccgtcctgtctcgcaggatgcccaaaaaggcaggggaaaagccagaggcgccctgccctcctctcagcctcgcctgcagaaaaggcgccccccaggccctgggtggagcgggggtgcaggcggcccccctcggagctgcccccgacaggccgcccttacctttcatggtctcttcctctggggcctcaggagggccccgctgcaggcggctggagctgtagtggagccgggcggccggcggatcctccagggcgcggatcgccgtcctaggcgccgcccgcggccgtggggctccggccgggactcatgctccggcgcgcgggctgcggaggcggcgggaggagtggagggtcccgcggggtcgcagcctggggaagccccgccgggcgcctagcgccgcgccccgccgcccagagcgcgcatcccgccgccgcccgcgcttcccgctggggccccgcgaggtctgccgccgcccctcgccccgcgcacccttcctccctccctccttcccgccttctcctctccctctccctcctttcctccctcgctcgcaagcctccctccctcctcgtcacttcttgggccccggcccagatcaacttccttggtattttcaaaactgccgcggccggcctctttgtgccgccgcgggggccccgcgccccgcctacctcgcccgtgcgcccccgcagccccacagcccagcctcgaacccgggctcccgcggcgtcctccctgcccgcgctgcggccgcaatgggggggctcaccgggagagctccttgatcttagtccatttcactatcgggaccgccaagtggctggggcaggggtggggaccccagattttagccctgcacgtttttctcgcccatcttatgatgtcgagggcctgggagaaggacgtccgggagaaggacgtccgcacattttagtactgaaagtcccgtgtccagggcagacgtggaaggttggccaccctgtgagcaccctggctctgcccctggcgagctgagtgactttgggcatccagttctcatctccaagcctcttctttctacatgagagaattgggcctggagtgcgccacattctgtgatttatttttcatttttatttttttgaggctctagccatctaagctggagtgcagtggtgcaatctccgctcactgcaacctccgcctcctgggttcaaatgattctcctgcctcagcctcccgagtagctgggattacaggtatgcaccatcccgtccggtaatttttttttgtatttttagtagagactaaaaatgttggggaggctggtctggaactcccgacctcaggtggtccacccacctcagcctcccaaagtgctgggattataggcctgagccactgcacctggccatcaaattctgtgattttgttggtggaggggtctctggggtaaacagtgacagccaaggaaagtgaatgcaggcagggagttgagactggtcataagcgccactcaggattctcacgtgtcatttttcattgattgaacaaacatttaccgagctcccagctgccggccaggtctaggtccgctgtccaatctgcccaccctgcaagctgcccctgcaggtaatcaatcaggtgacacgggttttagaaaagagaaaaaagacttattggcaagggcaccaagagaggaggtgggagaacagctctcaaatccacctcccagaagatcaggcttaaggatatttatgggttagggaagtagagtggtctaagccatggggaaaggcaattggcagtggggacaaatgaagaaacaggttcattccatgccaatgtagtctgagctaatggtatttcataggacatatatgcagaaaatggcagggttagcatgatccaagggtggagttttttggctctccgacattgaaagcccacctcttggggcacttgcccagttgaagggccaatggtctcaccagtttgagatggacaggagctagcccaagttcctaaaaaacaactgaagagatcattaccatggtggcctatgaatgttacctataaagtagtgaatgaaggttaagtttcagtgttcagtggtgtagccttcagcttcatggaaaaaagaaaacaaaaacaaaaacaaaaacaaaaaaaactcaccagaaaaacaaaaagcaagcaagcaaccaaaagcaaacagggcagccagactataccaaaatggtttcgctacaagggaccaggctctgccccaagctccagaagtgtgaggaacatgtcacatggccagtctggttaggaaagccagta

SEQ ID NO: 587856 - DNA, 4001 bp, Homo sapiens
agagggaggtcttgctctaacagggaggtgtcaccctctccactaacctcttggcaatcatgatttacttccagacaatttcacccaaggcacttagaagggcaggttcagagccagggatctgcttctagattctgcattttagagctggaaaagccctcagccatctgtgccctgcagccctgtgccctggggccatctgcgccctgcaggcctggctctctgcaggaatgcagggaacacagaagccaagggctcccatcctagctcctctgcgtattggtttcttgggggaacttggctcaattacctgacctcattcagcctcaggtacatgacctctaagatgggaaggtgggtagctgctggtcacccaggatcactgtgagcctcccgtgagataatgcatgtggcatgactttatgaacaaggtcactcaggggagctggtggcagtctgatgagaaaaagcatcccccagcatcttctgactctgcctggcagccaggtaagggggtgtccaggttcccaaggcctccctcctacctagccagtctcagaaacaaagctgtttgaagttccctttgtaaaaggcaatcgcgaatgcactctagggctgatatcaggaccctggctcttcaatccttctctggagatcagaaggactccattaattcctcctctgagtgggtagcacgagcctcatttgctgctaccaagtcagtttctctgggtacccgcatctaactctgcagggtttatggcttttctttggattacctcactttaaactcatcaaaaccaaggaaaaaaatcacatgagtgtggcccttctccaaagagagaatcactaaggaggttttaaatgttttcctcctctaactgtacttagttaagctaaatcataacccaaagctggacagagacagatattttagaaataacctctccccacatatatcccaccactggcacatgcacacgcacagacatgcacacacacacacatgcacacacacacacatgcacacacacacatgcacacacacacatgcacacacacgaagccatggagaggagctgtcacctgagccatctgcaccctgagtaggctcttgagctgtgacatgagtcaggtggagtagccaccaaggcaatagcttccctctggcaccccaaatgcaggctcacattctctccagcccaggcagttggatgagggcccggcagatatctgcgggcccagcaggcggggaccttcccacctggagaaggcacctccaggctctaggtctgaagtttcccaaactctgtactcctctccatccagttcactccagtctcctccagctgtctttgagacagcatgcccaggagataggacaaaattagtaccaagactcacctgagtgcccctggctgaggctgtagagccttgtcccctcagatctcagcatttgccatggtggccagagagctggctgccaccacgctgagagccaggccgcccctcggaccgcgtccccacagccagccaaatccagatggagtcatagaaaggggctgcaggggcgcccagggacgagtctcagagcaggaccacaggggccacttctgcaggaggaccaggtcaagatgcaacctgtggcagagtgggggtctgggcctgggggacccagaatggggggtgtgcgcctgggactccctgtccttggtgcctggtcctgggtagcgatcaggagatgttctgaggaggcaccggcagctcctctaggtactgcctgagatgcgaactgcagctgctctcgccgccagtccgtataaaataaagttcttggagcagttgcggaggcttctgcaatggggtctggaatacggcccccctcctgcggccaatcgtggcattacagccccgtgtgggaacgcccgctgggcccagagcagcgcggtcggccttggccttgggactccaacaccccagtctaaaggtcctgctcaaaatactttttggaagacttctgggggagtggcagctagacctggcttatgagccacgcaagaaaaccagtcttgtaaatttatttatagcacagaattggcatggctcaattcattcaccaagcttggcacagagttacttcatgtattttcctggagtcacattcatcctcagtggacacggattggccacactgggggtagtcaggaaaatgccccagggggttccacggaactcagcagcagaatcagcgtttctggctcattaacgctgcacaggggctggggggtgcaggatgaagactagctggctgtccatagcaattcagtatgggagggggacccaggcacgaataatcctaaacctgagcatgattgcttacgtttgaaaaaggacatctaggccgggtgcagtgactcacacctgtggtcccagcactttgggaggctgaggtgggaggattgcttgagcccacccacaagttcaagaccagcctgggcaacatagtgagaccccatctctaaaaaaaaaaaaaatctctttaaaggcaatctaaccatatgtgaagggagctgctaaattcagattgaggtggtagtatcaggggcatcagagaaatcaccataattgtccaagccagggtggcagagttaggctatgcagatggcttccagaggacagcacccagaggtaacattcatgaatgcattcctgtttgttggtgaaaagttcagcctcaagactccagggtcaggcttcgtacatgaaaagtgtttgccaagactcagctgtgtcactgcagctgcccgcccacagctgagtcagaaacgccgtcctcattctcagtgactgccctgcctgactgcctaggaagcagctccaacatcaaactccattttacagaaagaacaaatgataattgtatcattatggtaataatcccagggagcggaggaggagaaggaaaagaagacaacactttatagcatataccatgtgtttcttatatattagctcattgaacctattcaacaaccccctgaggcaggtgctgctattatgctcatttacagagacagagaggaagtgacttgtccagggtcttgtagccagtaagtggcagagctagtattcaaccctaggcaatgtgatcctagggtctatgctcttaacccctcccctgtaccattgcctctcaaggggaaacaaatgtttttgtcccccatcaattcaccaacattcctaggaatgtaatcttaaaaacagccagaaatgtgctcaaaatatgatgtccaaccagcctgggcaacatgacaaaaccctgtctctacaaaaaaaaaaaaatacaaacaatagctgggcgtggtgatgcacacctgtagtcccaggtgcttgggaggctgagatgggaggatcaactgagcccaggagtttgaggctgcagtgagctgtgatcgcaccactgcaccccagactgggtaacagaacaagatcctgtcttaaaaaaaaaagtgatgtccaaagaccttccctaaagagatgtgtatgttagcaagaaatgtggtagttagtgtccccctaaattcaagcattggaaatgtaatctttattgcaacagtgttgggaggtggggcctttgtgggggtatttgagtcatgaatgtatttgggatgccgtagaaagggcttgcaggagtgggctggcttgatcctctgcctttctgccatgtgaggactccacgctcatcctcgcttgtcctcccacctcccgccctgttcgaagcactgagtcctattgcgtgataggcacataccacacacaatgtgtatatcggtctcctgctgaagggggtttgggatgtttccaatctttgtctattatgaataaagctgccggaacaggcaaagggagatttgacagtgaagtataggaatgacctggagggctggttttctcatgggtgagagtcctcccggcagctcttagctcagatacctccttgc

SEQ ID NO: 587857 - DNA, 4001 bp, Homo sapiens
gaggaagcagggtggaggtgtggccacgcagccctggtccctgggctgtggccctgccctggctgttaggagaatgcctgtcacactcacgctggcagggacttgagcaggttctcccggagctccagggtcaccaggttggcgaggctgaaagagagaccaggcgctggggcaagaggaaggaaagcagtggcagcaggggcagggccaatcctggtcccccaccccaccctagttccacctgagaaggcactcacttgcccacgtccccgggcagtgcctgcagagacacatcattcagggccaggtgagccaggctgcgcagctgagtgaagccatcagggagcctggatgggaggaagcagaggccctcggatgaccagtccagggctgtgggacccatagcccctaccgaccccaccacaggctgccacccacctggagagggggttcccgctgaagtccgcgatctccagagccttgcagaacttgatgctctccgggatctcagggatatctgtcacagagggtcacagtggacagatgccatggcctgcaggccgtctgcagccccagcggacactccccagaccccacccagcccctgcccaggctccccaccgttccgggacacgtccagctccaccagctgcatgaagttggccacctcgggaggcaaccgctggatctcgttgtcgctcaggcccagcttgcgcaagttcagcagccggaaaaaaggctgtgggcagggaggacacggactctgtggcagagaccactgcagagcagagaagagctcctggacacgtgagtgtcacaagtcaagagtccctaggcctctgtctgctccaggtcacaccgggtcctggggtctaaccacgacaccccatttgcaaaaaaaggaaagaaacacacggtacacacgcccactgtggctgcctccctctactcttcacaccagcctccactctgagaagacacctgctggcgaccagacaaagccccaatcccctaccctgtgtcttacctcagggcccacccagcccctgaaccacttctgccaccctccaggggcccacactggcctctgctactgcatcctgacaacaagcctggcctggttctgcagcaagaactcagtaaacgctccccacaataacacagtaccacaggcacagtgctacgcgcgaggcctgcaggtggccacagaggaccgagctgtcactgccacggccagaacagggtcacattctttgggacacccaacccctaggtactgatcacccagcaccccatctccagaaaagaaatactttttaatctgctttctccagcctcctttcttgtagcagccttaggagagcacctgaccacgagaagcaagggtaaagaaagggggacagcgaacagatccgagagcaaagagtacatcaagagggctcccccactcacccctgcacccagcaaaaaaggagaggaggtctggacccacctccagagcggcccaagaagctagtactcatcagccacctgaatccaagttccaccctaaccccatccacctccctgaatccccacgggtttcactctgaggctccgcctccaggctcggtgacaatcgctatccccaggcaagcacctgatgaccgctgccacctgcgccagccagggcggctggaagagaagggtggggctggctggggtggggacctggccagtgcaaaccagcagggccggctggaggctgcggtgactcgcccgggcagattctgccgccggaggaatcacgggctgggggcgcgcctttgggcggcaggtgcgggcggccgctcaccttgggcagctcgcgcagctggttggcgtcgagcagcagctcctccaggctgcggctgtagcggtagatctcctccggcacggcctgcagcgaacagtgccgcttgtccaccgactccacgtgccggttgcagcgccacagcgggatgcacttgagcatggtgcgggtgggcggcgcgggctccggcggcggcgctcggcgggctcggggccggggggcggggctcagtccgcatgggcgccgcgcatggggagggggcgcaggcagggggcgggccgcccgagactggacggggacgcggccgcggccggcgctgggcccggcccgcgctcggaacgctcggactgcgggcctgggcagggggcgcggcccggcgggtctcagactcttaggaagcgcggggagcggcggcggcggcggctccgcatcccgcttggtcctgctcagctcgtcccgcccgctcgtccgcccgctgtgccgcaccggaaccgccgctgcccgccggactgccccgccgacacccacccggccgccgcgcagcccgtcgggaagccgagtccggccctcgccgcctagcacgcccggactgcggcccccagaaggccccgcgcgccgccgcctctgaggacccgtagcggcaccgcgcaaagcgtgccgggaagccgggcccgccccgcgcgcgggatattgggagctacaatccacgagaggcggcgccctccgccctccggtcttcagcccggcccctggccccgcggcatttggccacgaatcttaacgcacagcctcctcccgggaagcgaccatgcccgcccgcccgccttggacggccggctctgcggcacaaaagcactggcagcgcgcgctgtccagcgggtcgcggtgtcccggtgcccagccttctctcagcaccaccctgcggggacggctgcgagcccgcgcgcgagagcctggcgccccaggcagccccgcccacccagccgccgccacccgcgggacggggcccggggcgccaaccccctgcccaggtctcgcccacggcaggcccctcctgccaacaggaagcaggtccagagacccccccaaccctgcctcctcgccctagaccccctaaggacacacgcccaggatcggtgacaggaccgacggcagacacacggacgttcagggccagcagcatccgcacctttatccgcactgtaggctgggctgggcagagcgcgcctggccccggggacaccactgtatcactataaaacccagaggaaacaaggaacaagtgcaagtccggggagagggaccactgtcacgcagagaggtcactgttatcaaaacgctcctggtcgtacacttcagccaccaccttgcggccagcaaaccagcggccattgagggcctggatggccttatgagtctcagaggctatggaaaactccacaaagatcttgacaatgatttctgcatcctcctcctcgccttgtttctcttggtagatgatgacgcggttcacggccccgaacttgccacactcctctgtcacctccccttccaggtcatcatcgatgtccttggggtccaccatgttgcgcagaaccatcactgtagactgtggggcagggccgaggggaagacagctgagcactgcggccccgcccccctaccctctcccccgccaccaccctgcccctctgcctacctcctgcttgcggagcagcttctgcatcaccatgtgtcgggcgctactgcccgagatgctcatgtgctcctgctcgctcagcatctctggccgctctgactcgggaaacagctcctcttcttccttctccttcttgggctccaggagacccagcgttggagggctggccaggatggggttcaccactcccaccgaggggatggtgaccgggataggaggacgggctggggtcacacctgcaggaaaaccaaccaggtccatcagtcactccctaccaccccccttcccagaaaggcacagagctggcctgccctgggctcagagggttgtgcccagaccaccagggccaggcagctgagggcagcgagccgagagatgccaggacaggagaggagaggatctggtaccacttaagactcacctgtgatgactccaggtgcctgggcagccatgacagcctggggcaaagtg

SEQ ID NO: 587858 - DNA, 4001 bp, Homo sapiens
cagggaggatggagacagcagggaggggaagagaggggaggagaggatgagacagggccgggccacgctccgcccccgccgccccaccctcgcagagaggaggagagaggcgcgtcttcgggcgcggctgccccccttccgcggagcctcaaggtcaggggggaggggcggcgcttccctctccctcctcccccacccaccctcccctccccctcgggttctccccacttcagcagttttccctgattatgcaacacactgcagacccgcggcgcacaaagccaggactgccggcccagggaccccgtctgtcccacctctccggggtcctggccggctctccctctggcctgcagaacgtgcgctccattttgatgttgaccccctctggccttctggttcctccaacaagccctgaagacgtctccctcccccagttccctccggcctcaccagcacctccctcagctctccggccacccactggacttgaccctgccctccctgctcctccatgcactctgcttctcctccgaactccctctcaccatcctgcacccttgggtcctaccctgttcaacattgccctctcctgctcacaccctaacccctttcagggccttcccaagcccctgaactgtgcagagagggccagggcgtccactttcacagggacgagctgcaggagggcagcatcacttataccggtagctgcagttgctccccaggcacaagatggatctcataacctcaaagtcacaaatgcacgcccctcgcgacgctctgcctccttcagggctacacccagtctcccagcatgatcagcccttgtgtgccctcacagggtgggctgcacactgatgtgccgaactcaccacctcctcactcacgcagggtcacacatgcagtcaccccggacacactctcaagtcacatggtgcacagcggcctcagagtcacatggtcccatgtagtggcacacaggcaagcacacacacacacagggtcacacacaagcgcacacggtcacatggccacacacagtcacatggacccacacaggctcacactcctgcaggtcacacttgctctgccaccccatgctgctggcactcctgtccccctctcctgcatgctgacagttgtccttgaacttgggcacccttacacaaagagcctccccctgcctcccacaccttgggcgtcccttgctcacagcctcctccctgcttcctctccctgacccaggcttcagggaagagactgctgctgcctctgctggccctctgctctgacaggtgggcggccctgttggaccccctgcctactccctggagctccctgcattccccagctaaccctagcaggtgtcctggtgcagtcaaggaagaggagagggtggcgaggcggccctggtctcttgagtgtaggtctgtgtgtgccggcatggctgggtcccgtcatggcagcgcccatgcggctgtgtctgtcccagcatgggtcaggatgtgggtccatgtgtgcgtttgggtacctcagttcctgatcctcttccccaccctctgtccaacgtcgacactctccctgcccagccttggcctctgtgttccccttcctcccctctaccgtccaggctccagccacagactcttgccgtttctggttcccttcagtctgtttccccgggccctgccctccgcccccacactctggccctccaccgcttccagcaaagccccaggccccgcgccctggtctcagaccagcgctcacctttatcgtgcagtggcgcgccgaggtcgctgcgggcgcgtccgtaggcgctctccaggtcggccgaagagaacgcgtcaagtttgaccttcttgaccaggaaggacctgggcatgattcctgcggggctccggcgctgtgggcctgcggagccggggcttgggggggctgcggcggcagggccccgtcaccatccgaggagcggcggaggcagcgcgggtccccactctggcctttggatgctgccgcgcgagtggtgtcctctctccttgctgccctgcgtctcctccgttgcccctccggatccctcttcttcctccttccttcaatccttccttccttccttcaatccttccttccttctctcctcttctctcctctcctcttccttccttccctcctctggtcccggcttcccagcccgcagtgccgcccctggacaggcgggggaggaggctgggggggcggagagggggggagcggctccgtcccgggcctggaggctgcgagtgggtgcagggctggcccggctcggtggcccccttcccctccccccccccgccgccgcggcggagcctcagtcagcggccccccatgcccccgggggcggcggcgccgggcccggagaacgcggtggcagcggcagcgccggcagcttcagcaccgcggccagcgccggcctgggcagcaccgcggccagcgcccgggcgcgctcaaccggcgcgggcggagaggggcggtccgcgggggtttggccgccgggcaggggtcctcggcgggggtctctgggaggcttgctttattgttctgcagccggagcgagcggcagtggcgacggcggcggcggcggcggcggcggcggcgggcggggggcgggggtcctggggggaggggtgcgcagggagggcgggccgagggagggagggagggagggacaggggctccgggggcggggctcggcgctcggactgctcctgggcccggcctccagagcccgcagccgcctctgcctgcggcccggcccagcctctggcttttaaagcccaggagctgggggagggggagggaggtgggggagaggccggcggaaatggctgcgctgggccgagccccggcctgggtctcctgggaggggtcccggggatgcctcagcctgcgcgagtggggaattcccccgcgcggctcggggaaccgcggcccggcagccagcagcattgtcgggcgtgtggggagaaatggagccaggcctgggacccaagcgccccggactcggggtcttgtggggaggaacgtagggaggaccccagtcccgcctgcctcgctcggggcctggggcgcgggatctgcgggggcgggcgggggaggcgggagccgaaggagcaagtgctgaggcagcgaaagcgcagcgcgcgccctgtgccgcagtggctcccgccgctcggtcaccccggctgaccccgtgcacgctggaggggcctacccgcccccgcctctctccccccgggcgggtgtgcggcgcagcggcgtcgctgcgagccgggtgtggagctggagaggggctgccacgaccctgctccagaaattctgctgctttgggggttttccgcccttccgcgcggctgcagctccccacggcagccccgcaaccaggcggataaccctttcctcggccgcccgcccagcgtttgcagcccccatgacgtcaggctcagcggccaatggcggggcgccgggcgcgggggctccggggctccgggccgcacaatggccgcgcgcgggtgcctctgtccccaattagggcctggcgccgccattgtcccctcacccgccccgcccggtggtccgggtctacgggctccgagcgcgctcccacgcgccccgctgccgctggggaccaaggtcgcgggggcggccccggggagcgtccgggcgcgggtgtgccgggagcgcgtgcgatactggagcgcgctcgttgcggcgcaaaatgaccttgcgcggggcggacccgcggacagcggctgggagcgcgcggcgggcgggccccggggaaggcggcctgcgggggcgcgctgcacttgctgagctcagcgccccgcccccggccgcccggccccgcgcggagcccgggtgggtgtgacccggcccgcccgcgcggggggtgcggcggagaccacggacccgctttgtgccagccgccccggccccggcagcggcgggacattcatctt

SEQ ID NO: 587859 - DNA, 4001 bp, Homo sapiens
caagggtgggaatggaggctcaggctgggggctgggggtggattctgaacctttcatgaggacagttggcctccatatttggaagatactgttttgtttttaattatacaaaattttcagactttatattatcatatcaaaaacacaagatgccatcacacagtggccggaagaaaagccagcgcagaaagttccagtgggcccgggcaggtgctggggccagcgcagagtcccgctgccggcgcctgtctgtacgtccgtctgtccctcggccccgctcgcagccagggctggcctgggggcatgcttgcggtgggccttgcccagctcaggtccaaggtgggggctgtctgcagtcaccccgggcgtccacctcccccagcagcgtctgcctcctggctgctgccggccacctcctaactgcgaatcgctgtctttctgtcgcggtccttgctctgcagaggggagggaggagtgtcaggccccggcagagcccagcgccagtctgcgcctctctggcctccctgctgggtgccatctcaggtggccagcgccaaggcacctccttcccggctctccccagcttccctcaagcgttttggggaggggagcatactgctgcacagccgaaattgtaaaattaaatttcccagatgttcaggccccaggagctcgcgcgtgctgtctggagaggaaatggggattgggaaaagccgtgccgtattttctccctgctcaccctgcttttccggtgccaccaagcacagcaggagctgtaaatcacagctggccagcgtctcctgcaggggccctcacccccagcccccacatctcctgccagcctctgccttcgtgtcccatggcccacgtctcgggcagccctacaggacctggtgtcttggtgtgcggcctaggtgggggacggacagcaggtgcccaagatggcttaagccagtgctgggccgcaggggctaagaacccggggtccttcctctcttgccttgcagcctcttactttctgaactcagctgttttcactccgcctttcaacttactgaaaagggaagcttgcagcggcctggtccagctccccagcctccccgccctgggtgggcccctttggccatccctagctcttacccctcatgcagctccctgcaggggactccacactccactgggagccgagtgtcctagggacgccctggagaggagccccaggagaaggccccagcccccggcaggcctgtgttacaggtgtgcctgcctgtgccctgttggggagccctgcccgtgtggcctcgcctcctctgcctggcaggtgtgggctgaggggcgcgttggaggcccccctcggcgccccacggcccgtgctcaccaactttctctggttgctgaggcagaaggtgcagatctgtttgggctgggtgttctcgccgtcgcgggcgggaggcggcgggggcggcggcggggggctgccggcgcgcgccgcgtggaagaaggcgggcccggagtggcagggctgtccgtcgccgcaggcctcgcccgccagcagcacgttgcccaggtgcgagatgtagctggaggccaggcgcagcgtctcaatcttggagagcttgcggtcggcgggctcggtggggatcagcgtgcgcagcgccgtgaaggccgtgttcacgctgttggtgcggtctcgctcgcgcgcgttcgccgtgtgccgctgccggggctcacggcctggccggccccctggccccccgcccccggcccgccggccccccgccctccgccgggcgccctggaggccgcagcgcgccgcgtgcacgcgacagggtttctcgtcggagcccgagctgtcgctgccgcggtcctcgtcctccgacagcgggctcacctcggggtacaggtagcggcccggcggcgccgggcgcagcgtggcgaaggacatggggccggcgggggcgcggcgtcagctctgtcgcgcgctgctcatgccgcctcctgcggccgccgcgggcctcgcgggccggccggggcgaggcgcggggtctcggctgcgccccgcggtggcagctgccgggcgtcgcgcgcacatgtgcgtcccgggccggagcggggccccgagctgcgcctttatagcggcgtcccggcccctcccccgcgcacgccccgcccctctcagcccggaggctcctcgagcagcgcccgccgcgtccctcggccttctgtggccacgctttggcgggggtggggggggcggggctggtctttgggggcatcgttccgtctctggggatgcggaggaactgggaggtcgcttctgggctgtagttactcagggccccaaaactgcagtgccccccgtccccgggagaggggaggaacccaccaccccgttttctcccgtggcacaactgagttaacccagccgccctggccctgctgcctgaccgcaccctgtctgtctttgcctcccatgtgcgccagcgcctgcctgtgccaggccgtgtgcagggggcgggcacaggcgagtatttaggggcctagagctcagtctctccgcctgtctgtcctgcacctgcctctccaggcttggcacagactgtgccttctgctagctggccatgtcccctgttcttgtgctgtgtggacctctcaccccgtcggtctccttgccccttcctccttcccccgttcctctccagggccaccaggcccctcaggaagcacacacatacccccattatccaatttggggatggccccctatctccatggggaggagagggaaggaccctcagcagggggcagggcccaaggggtccctcctgcagcagggggcccggcaggctcccagctgtgctctgtcttgcctgggcccctccccgtggctactgttgcaggaagcagcctcctgggcagcggtccccaggctggaaggagcgagggtggcggctggcaggggctgcaaccaggaatgtacgtccaggaacgtggctgttctgcctggggaggggccgagggcagacggtggggggtcccccacagagaggtcttggcttctgcctctctgtggaatgggtcagttggggtcttccccgagtccccgtcttatagctgcccacttctgcctaaggcccctgccaggggagggagcccgtgggtgatgaggtcatccctgtctgtggctgcccagagccctggccaaggaatccagtgaggggggagctctggggttggcaccacttcagtggaaaatgtgaaggtgcagctccggcgcctccgagggcgggggtgggggcagcgtggccgccatgccacgtcagaccccagggctggggaacaggcgtaggtcagggccagtgacctcagggcacttgaggctgggcctgcactccccctgcaaccccctcacctgctcccctgggcggcccgaagcgggggtgggccttgtaggatcagatgccgacatggtggcccccggctgcaggacatccggaacacggtgggcaacgtgcccttggagtggtacgatgacttcccccacgtgggctacgacctggatggcaggcgcatctacaagcccctgcggacccgggatgagctggaccagttcctggacaagatggacgatcctgactactggtgagggctggtggggtggggccagcagccggggtgggcccgaggggtggggcagggctggcggggtctgactggcggtctccaggcgcaccgtgcaggacccgatgacagggcgggacctgagactgacggatgagcaggtggccctggtgcggcggctgcagagtggccagtttggggatgtgggcttcaacccctatgaggtaggtggcaggggctggcccctgggcggcgggggtcctggaggcaccagcagggcctcagccactctggcccacacgcccacatcttctcccccagccggctgtcgacttcttcagcggggacgtcatgatccacccggtgaccaaccgcccggc

SEQ ID NO: 587860 - DNA, 4001 bp, Homo sapiens
aaaactacctaaaagaccttaagatgatataatttgtctttgaaaagaccattcaattaattagaaattgacacgttattaaatggcaaagggagaggacgtggggaaccagaagggccagaaacagccgcactccctgagaccccagagggcactgaggctgcagacgaaatctggggtgctcaagcttccacctggcccgacagagctcctggcgcccaggtggaggcagctgcggacgagaggaggccaaggaggcagttccctttagagggcgctcattgggcgacgtggggaaacaagctccagcccccgaagcgcgaccaaaaggagaaatcaagttcccaccgccagggcgggggagggaagctgggtgccggcaggcgctccgccggagacgagactcctcccggccccagaagcgccccgccagggccagagagggcgagcgtggcgggagggaagcctctgtcccccagcggccaggcgacccgaagccgagcgccgtgtcacacgtaccccgcctcgccctgcttgcggcactcccgtgtaactcctatgaaaatgtcctcccgtccctgacgccccgcggtgcaacctccacccctcaacgaggagggggtcgccgcaggactgggaatccagtggccggcgtcccagcattttcggacgcgttccgtgcctcccccagtatccccttgagggatcgcctactgcgattccacgtagtgtcggttacctcgccctagccgcagggagcatcaaacaaaagaacttttgcaaacttttctctctggacactcgcgggtctcttaaatctggcccccatctccccagaacttgcatgcagtcaaacaggaaagctggcgcgggggggatggtgtgcggaggaagggaccccgaagtttccaggtcatccctggtctcgaggagcgcgcggagtggagccgttccctcgcgggcccgacccaggctcccccctcctgccaccctttcccctccgtccttcccagaccacgcagcaagacccgccgagggcgaagaagttgggagtgacttcaggggcctctgcggctagaccaaaccgcaattctcggtgcccccattcccgcggaccgcggggtaacgccagcgagcagcgcttttctgaggaagggaagagggggaaagggtgaccggacgagcgcatttgtcccagcggatctccggtgtatacttggggactgggggttccccaggtggcgctcccctattccctgcgggctcctctcgtagcttcaaacaccctaaacggcgcgcgcatcctccgcctggcccactcaccgactccgccgacacgcaggccaccaagcccaaggtgagcaggatccacgcgcgccgcatattccccagggaccggctgctcccagccgctgcttgcaaccagggcaaaacgaagcctcctgcccagcgctcggcgcagcccgcgcacacgaatccggagcagagtaccgcagcgattgcggctcaggctcggggactcgggctcggggctcgggggcgctcgcttcctcctcctgcgcctgctcccgccgcccgcagctgcgccccgggaacgcggcgccctctcacttgttggtttctgcactcccgacacggagttggtgctccgggaaggctgctctctgaagctcttcttgctctgctgtggttttgctcctccgcggactcctttcccgtgccgaggttcagtttctggttttaaggaataaattcgctggcttgaaagggagctacggcagaagtttaggggcagagcggcgggagcgcgcgatccgcgcggctggagctccgggggtatctggagagcagcgcgtccaagcggggccactggctccgcggctgcgcccctcctcctcccgcgccgcgcctccctccccgggtcctcctccttctcctcctcttcttttcctctggctccctccctcctgagcctgcttctccgggctcccctgggcgactggggagaggaggcggcagtgtgactcccagataaacccgggagaaattcctacaggattacacgccgattggcagctccgaggaccagtgggcgccgcggctccgcgctgtggctgcgccggctctgctcaccggcaagccagggctcctgcgttttctcagtccttttcttcctttctctccccacttttcctctctcctctatgctcttttcttccccgttgtcttttctctttcccttcttcactttcccttttctagagaacaattagtgaagaaacgagagacgtatgtagcttttctgccttgagaattcgaccagtagaaagaaactgctttgtgagttgagggaaaaaaaaagtgtaagatgctttcaagcaatgtgaagtgttcataaatcgccagttcatgaaaattgcattttaaaagagaagataattaatgtaataaatatatagtgagagtgtttcccattctcccaaatccttccgcacccccaaaaaagggacatggaggaaggatcctgtaaacccaaagtgcaacagtttgaaagctcctaacttcattaagggcttaaataccatttctccctcacacacagtttatgccactaaggctttttataggctccattttagcagataggtgttaacgtttggaagctacaaatagggtaatttgatgagaagttggatagagaccctgaataataacagatttaagataacttcaaagaaaagagggataaagtaattcttagtttgaagaaaataatgaacatgtatttcctaaatggaagtagctgacatgaaatattttgttacaatgtctgtggcatattatagaacatggcaaatgcgtattcccttccagtttctttttcttactgtcacaaattttacacacaaatcccttgcagttcgtgccatcatttttctctctgacttatagagtaaatgaattatgacgccattctgctcctggaatgcccactacaggaaaccagagacttttctgtctgttcaccattgtattctcattcctggtacataaagacacatgataaatattatcttgaataaattttgctctaaagctcaatttataccgtataagagttgtgagcctttaaaatacaccaatgtagatatatagatatgaggccatggtaatttttcaactcagtattagaataaaatacagtcataccctcagtgagaattaaatgtcttagtaacctattactgtaataaatctcaaagaaagaaatttaactggagaattacaactcaaacttggagacacttattcctttggttttgtgtgccagctaccaaacctacaaatgctcatgagcaagtctaaggcattggccaacaaaaaggtaatatggagaaatagaagagtaggcaaaggagaaagaagaaaaagagcaataggccagaagttgtaacatcagatgatgcttctgattccacagacactgtagctggcatctgtgccaatgtgggctccacttagcttttgaaagaatgaaccacagccttttttttttttttttttttttttgagacagggtctcattcttgcccaggctggagtgcagtggcctgcactgtagcctctacctctcaggctcaagcagtcctcccacctcagcttaccaagtagctgggactacaggcacaggccaccacaccagctaatttttgtgttttttatagagacagggttttccattgttgcccaggctggtctcaaactcttgggctcaagtgatctgcctgcctcagcctcccaaagtcctgggattagacacgtgagccaccagcctagtgcccttatttttaagatggagtctgtgggttgaagaggttcatgagatggggagacttcttaaaaaggcctccaaaggaaaagcagcaatgcaaaatacatgcaaagagccataaaataccagctctgtcctcataagaggcctcgtctactcgccagccttc

SEQ ID NO: 587861 - DNA, 4001 bp, Homo sapiens
gtgtaacagcaaaagacttgaaagctatatatgctgatattagaaaagctccaaaatatgatcactaactggaaaaataagagcaaaatgtgaagcagtatataaaatgttaacgtttgtgttaaaagcaaggaggcaaatacagcttatatgtttgcctgtgtagatataaaatttgcctagaatacctaagaaatgtaaaaaagttgcctgcctgccagaagacttgttactttatacctttttatgctgcttaaattttgagacaagtgactgtttacctactcaaaaacaatacatttacaaaacatgttggcagcacttgaaaagaaattaataaatgctaacgtaactattgctaaaagtagaaagtatttcaaagttatttgggggcgcttttcttttttagaatctcttggcatttaatacctataaaaagttcccaaatctggcaaaaacagggaaaatagttgtcacgctcattttaagaaactctttaattaaacagtacatttaaccggcaaccattagcaaattcttccccttttgttcatctttttcccctttttacatcttttcctataatgcccaaaactaaaagttaatgtctccaaagttaaatttaatttataatggagtgactatttactgaccattttaaaagtcattctacttctttttattctgtgccacaaaccactagatttataatatttatgtaccatttaaggcacaaattttatagaattaagttggtaacacagaagacaaaaggacgtattttctaccgttatccctcaatcttaaacaggaaaataaaaagactgaacaaatttgagttttaactaatcacatacacatttagaaatcaatttaatttaaaaggcccgcagttgtttttcaaggtaaatttcctgctttaatcaacgatttctttttgaaacaagcggatgttaagagtttggtaagccgagcgtactttctaagcaatgtacgtaatggaaaagataacagtaaatgtgtatgtggttatacagactagataatctacaaactcctttcaaaaatggacacattagaagactccatgactcaataatcaccactttggtaaaagtgaaaactttccacatccatatgccttccctttcccattattacaaggaaatcctgaaaggaaggctctgagtcatcatatctcaggggtcagatctcaggggtatttccttctaaacacaccctactggaaacgtttctccctcaggtccaacttctccaggaaaaagctcaaagcgaacaacctctccccacccccttccaaaaaagtcaaggcttcgcccaataaacaaacacttccttcctcctttcaaatccaggactttccgaataacccaaaagaagggcgattaagcacagccctagaaacgccgagcactgggaggaaccgtggccagaggctctttcttatgtcgagatcttatcgaggagaaaacaaggatcgagagacggtcccaggaagaaccccagagctggggcgggggctgaaggcgttcacccagccgggcctccgggctctgccagccccagccccagccccagccccagccccagcccgggcaggaacccgaaacgcgcggggtcgcggcaggaagagcgcgctgctcccgcaaacttgcccccccagccagcagggcgcagggaggggcgcggagccccctgaggagagggcgtcgccgctgcctcgcgaaaacggctgcgaccaggatgcagtctgtgaagtggcccagggaccgtcacacctctgccccaagtccccgcgcccgggacctggcaccggcgtccctccttgcccccttggcctctcacctagcccacaaggaaccgctcgccgccgccgcctccggtcactggcacggacttctgaggcccgagtgtaagagagcggtgcgcgcccgaggaccgcccccgaggcgcgtcatggcaccgcccccgccttcagcccgcgcagtcgcacggcgccgggtcgggtgatcccgtccccaaggtaacggggcggtaggggtaaagaggcctgggtgtgggtcgttcctgcagctccaggtatccggcaaagtggggcggttcatgccgcccgctgtccgctgcccgctgcccagcggttatgctcccagtcttctccgctcttcggctgttcgtgcccgcgggccccgtgccacccactcactactgtgtgcatcgcagctcacggtcgcttggttctcgtcgcctccaattcaaagaggtctcgggagcccctgttccctcttgggatgccttcgacttccaccacttgctgccctagtctcactctccgcttgctgtacctctccactataggctcagaaacgttcctctcacgaccccttctcaactcctgctttatttttctgttggaaatttggatgttgggggtggggggcgtattactctgtccgcctaagctaatattccttcgctattgagagttaggtgtggtgctgcgcaaaagtaattgcttcccagtaaaaaaacataacgatcatttcttgagggctgattttgtgccagccatagctctacgaacttaatgtatagtcttatttggtcttcacatcagtctataaagacatcccattacagacaaagaaactgaggcacagtttacccaagagtaatcatagttaccacggaatactgtagagtccttgacaaaatagcatttacaagcagtttatttctagctaaattagtgccagaataatttaatatatggcaaaactaataaaaatctgagtgtaaaagaggtgacaactaaagatgaaaactttgctctcagtaaggttatagttaggctgatgaaatggacatttaaaaataattacaaggtagattgggaaggaagaaataaaactttttgctttcagatgagatggttatctaacatagaaaatccggaaaaaattgacactcctcgcctaaaaaaacagaatgaaaagcaattatagcaagtttgcatgagcaagtttaaaacaggctcattctaagccaaaatgcttgggaccagaaatgtttccaattttggattttttttttttttgcttttgtaatatttgcattatatacttatgggtttaccatccctactccaaaactcaaaatgttccagtgaacatttcccttggtcctcatgtcagcactcaaaaagtttcatattttagagtagttcatattttggatttctgtactaggaatagtcgacctgcatacatggtctgttgttttcttatataccatcaataaacaattggtatttgaaattaaaaacaataaccactgacattagcaccaaaataaaatgaaatatttaggtataaatctaacaaaatatgtaaaaggtttatacaagaaaaactacaaaattctaaataaaaaaaacttccaatgagaaaaactacaaagttcaaaggagatctaaataaatttaaagatattccattttcatggataggagtacttgatatttaactgtcagttctgcccaacttaatctatagatttgatacaatcaaatcaaatcaatcaaaatcccagcaagttattttgtggatattaactgattctcaagtttatatggaaaaatgaaagaccagaagagccaaaccaataccaaaggagaggaacaaagtcagaggcctaacagtaccttagttcaggctgttgtaacaaattgccatagattgggtggcttaaacgacagaaatttatttctcacatctctgaagtctgagaagcccaaaatcaagttgctggcacatctggaaatctggtgagggctcacttttgagtgtgcagatggcattcttcccattgtatccccacatggcagaaaacaagacagataaagcacattctcttctatctattcttattagggcattcatttcattacgagggctcaactctcatgagctaattatctctca

SEQ ID NO: 587862 - DNA, 4001 bp, Homo sapiens
acgctcttaatgtcaggacattctagatttcagtgttccactgtctcaatgttggcttgatgcaagacctaaaatatgtccatcttttaaccctgtcttggcagatgcttactagatttctaagagcttgtcagcctgagttacctcccttccccagttgaagtttagggtgcctgctgggtacccacacaggcaatgaggtctagagattaaagtttgggttggaattccagatatatcactgattttccctgcaactttggtagaaatgatttaatctcttgtgcctcagtttcctcctctaaaaagggagtttctaatagtgcataggaatacttaccacacagaggagctgtgagaattaaaccagtttatataggtaaagttttaaggagcattatgtggtcactactagcttgtgtgaaaccttcgaacaaattagaaaaaaaaaaaaaaaaaggcattgccctgcacaaagtcctctgcggggtgcaaggggttggggagggggtgcaagaggagctgtttggatttcaacacctgccagcttacatgtctccccctctgctcctcaatccccataataatgtggcacagccataaaacatggaggcctttctagaacagtgccaggcacagaatgacagcaaaataattaatggctagaacttccactggtcctgttaagcatatgaattaataatccctggctatatcaattaaatatggttatagtatacttacaaacaagagtgaatgtacggttccattttactgcaaagactttcctagaatgttacggagcgtatacaatttaatctggcagaagtcttctaggtgtccctatctcgcggcctacccaatccaaacaggcgccctcggcttcccataccagtgcgcggcagcaagtcggctctggtgagggcacccggacgaaacgggagggcagacagactgacaatcacagcttgggttgaaaggggtgatatgggggttgatatccacccggaaggtggatgcactgagcagcagagagcagggaacctgggcagaacggaccgaagaagagggtccggggaggcatcctgccctctgctccgggtggggagggaggctggcagctcacccccgggggcgaggggtctgcgttagccgtagccacgggagcccgggcttctgggacgctcagccgtgcgctacccggtgcagctgctttctcaccagctcgcgggtgggtcctgccgcggctcggcgacccgcgcccccttgcgagcgacccagcgtgaaaccagcccaaagggcggcctcgcccgacccccgccagcgcgacctcctccgggagccagcacccaggaccgacgacctcggcaacttacccaggacactctccctagctgtccgcggagaagccggcctcgtctgccccaggcacccgagtccctggctcggagctcagtcaggttcaggtgtttatccaggcgccgcccaagtccaagggcgggactgccgcggcagcgccaggggtggggccggccgtagccccagtgcgcgacgtgggcagcactcccatcttctttttctggacctgcagatttaagaagctggaaattcggtggtggaaactggatgcgtgcgccggatttctcttaggcttaacgtttcaatgcctaggctgtaccctagattattagatgggaatttctgggttggtaggggcctaggcattagctagaaaagtttcccaggtatttgcaaggcacaaccccgaggttgggaaccctggaattagagaacagagcagtataggcgtccacgggggaggggccaggtcgtgtgtctggagcctgcagtgcggggagttctccagcagcatctgactgctccacatgggatcttaagtcaacagcttccttgccccttggaggtaaaggatgtgggcgtgggctcggaagtccccgggaagtgggtggggtgcaggcaggggcaggagtgggtgcggcgctggcaggcggcctaggagaagagggcgaggaaatttgttctaacaagatgaagccgagaaatgaggctagcgtaagagtcaccaggcactctgacccaatcaagatatattaagcatctgggtgtacagcgatccagaagataacagcgatgatatatctgtcaagaaaaaaaaaaaggaaaaacattcattaataaatcaataaaagagttaatataagcacaagacaccactgagatgctaataatagagggtgaacttttctgggggcaatgaggggcagaaatgacaataaattatgggatgttgaaagaaaaacaggggagtcatgatgagattgggtttgaaatttatcccggggctgagtaggacaggaaaagtggtgaggggtcgaagagcagccttagccagcccatatctgggacaggtctggagtagaggaactgcacatttgttctttatttgggtgacagaagaaacaggcaggtcgtataagcttggaaaagtaggtgcaggggaaaccctcgactgtcttttcagtacttaagaggttacttgtgtgctttaggcagcagcagcgagctgtggcaagctatgcgaggcgtgtgggaaggtgagtgggtaaatgtgcgtgcattggtttcaagtcagccgtcaccacacagcgacactgctgtgtggggctctggggagttgcagggcttctgagggagaagggagacacattcataaacagtgcgggtgatagacatgcaccccaggtgcttccagagtccacaaccagcctgcaggaggagaggcagttggactcaaagggccttccagaatgggctaaggtgtggaggtgagcagcacctgggagtgagagtggactgaggcagagagacgtcgggtaatgggcccttgatggtgcagcctgcctgcaagagttcagatgagtggacactgggaaacaccagcctcctattatcttcatggcttctctgagcagaatcctaggctgtcactcttctttctggtcagaagccctgggtggacctcaagaaagaaatttggagcattattagaaatctcatcagtacaaaagatgagagtgagtagtgggggatgcaccggtgacgcagtgaaagaagccagaggccctgctggttggaaagggtcctgctttgacttgatgtgggggaaactcagaggactgaccataatcctgaaagctgggaaaggatttctaaagggtctcttttggcaaaggctaggaatggacagtttatgatagaacatgtgtcatgggctaataaacatgaaaaagtggtttaatcttattctcaatttctttgatcttagggccaaagagatgcatatgaaaacatttcttaccttacaaattgaaagtttttttttttttttaaaagaatgccttcatatgggggtataaattatacatttctggaaaacaaatatgtttcaggaattagaaagggatatatcctctgacccaattccacctttatctttaccaaatacccaggtattgtctgtggcctttcaggaagggaaactgggtcactgagagtcagggatgggaaagagactttccactccactgaatcatgtgaagtagtacctttttaggaaacaagtatattaatcaaaataaattgatctttaattcctaagaagtatgtgccgatggagtactctacagccatctttataaaatcatgtttttcaagggtatgaagtacacttcacagaatatgagtttaaaaaacacagtacaagactaaatatatttgctatgattctaatttctatgaaaattttatgtacatgcattagaaacactggaagagagttcatcaacatcttaacactttttgtaatatagtagtggaatgttggttgaatttatttctttgtatctttttgtattttccaaattttccattatgtgtatatctttatctcataataaaaatgtttctgtggccacacatac

SEQ ID NO: 587863 - DNA, 4001 bp, Homo sapiens
gacactttaaggtgagctaagtgtaggcagtctttctcccccaccctaaaggccctcctcaaaaagccctcaggaagcctgcgtctgtgctaagcgcagctggggtacagctccccaatccctgaccctctccacacctcagagcctaaacttcgcttctaaagaattctgggttgaatttacttctatagaagtcaggtctgtgatgtgtatattttatctttatatctatttcattttatttgacttcccaggatttttttttcttccccctcaagaattgctctttaaacataagggggttttgagaggaacctcgggccggtccctcaggctgttaggaaagtctgcattttgcagagctgctctccccgggaggagatgaacaatgagctaattacatttttatctttctaatgagctgaggatttgtgtaaatgagaaaagcagggggtacgctagagggagggagaaaagactttccacccccagccctccgagggcagagctggtacctggaaggggtggagaaacagaagtccccacggttcctaaactttctcagccagttttgcagcaatcccaaggctacttgactgaatgaccagtgaaggaaagggcttggttttattttttaaatctttgtcgaacctatgaaaataaacaaaagctgctccaagcattctctcggcctttctgaactttctacgctttgggtttttgttttttcctcccgtctcagaggttaaaaacttcgatagggactcggagtcctcctagaggagagggaagctcccctgttatttaaagcgcaaggctttgtttcaggtatgggaaaggcgaagttggatcccaggaagagcggctccggggaccacagcgagtccctgcgaggccaaggcgcagagctgccgctcccgggccagccccgccgtgcacctgggtcgcgaggggcgctgagcgatacctgggacagaccagacgcgcttaggaatcacgtgcacagcatgcgagcaacctcgggccctcagtccccagcaccgggacccagcggcgggcgggcgtagggtggcgcgggttctcctgcagctccggccgggggatggagggggcggctcgcgcacgtgggaggaggcagccttaccttggggcttggaggcttcggtggcattgggcggcgtcatggcgatgcagacgtccccctcggggaacttgtcacacttaagcatctcgggccagtagaagccgaagaactgcatgaccggctcgcacgagtcgcgcacggcctcgcagagccagcgacacgggtagatgggccggtccaggcagacgggcgcgaagagcgagcagaggaagacctgggtgccggcgtggcagttcttgttgagcaggggcacccagctgctggcctgctgcttcacctccgccatggtctcgtgctccagcaggttgggcagcaccatcttcttgtagcccacgttgtggcacagccgcaggtccgcggggatgtccacgcactgaggtggcttggtgtagaagcgcccgctctggtacgggccgatgtccgactggaagctcacgtagtcgtactcgctggccgagcccacggccagaagcgccgcgcccagcgccagcagcacgcccagggctgccccgcggcggcccccctcgctgcgcccgatgcccatgccggctctgcgccctgttctccgcgacgtcggggctgcctccgccgcctccccgcgcgcgtcctgccgcaaacttccagggacctccggggacaaaaggcgcagtccccagcgttgcccggctccgcggccgcaagctgctgcccggtccccccggccagtggcggccctcggcctgcggtcggaggcggcgcgggcggggaggcggcgctgcgggctgggtgcgccccggctcccggaggtgcggcgagcaggaaggcgcggggcggcgggcgcgcggcactgactccggaggctgcagggctggagtgcgcggggctcctacggccgagccctcggagccgccccgcgcagccaatcagctcccggcggggcgagccgcactcgttaccacgtccgtcaccggcgcgggagccaatcgcctccctcgcgagcgggttcggtttactagaaccagacgcggctcaacaccccttaaaaaacaaaaccaaaaatacataaataaaagggggaggaggaaagagacaaggggagaaaaagaaggggaatggatcacggcgtggggtggagagagaccagggcggacgctgtaattaactcgcattggcttgcagagaagcggggagcctggatcatacttgcaaacccatgaaattatgaagactttttttttttgagacagtttcgctcttgttgcctaagctggagtgcaatggcgctatctccgctgactgcaacctccgcctcccgggttcaagcgattctcctgcctcagcctcccgagtagctgggattacagccgcgtgccaccatgcccccgctaattttttgtatttttagtagagacggggtttcaccatgttagccaggctggtctcgaactcctgacctcaggtgatgctcctgccttggcctcccaaactttttttttctttttctttacactgcttcctaatttcaaccaacagccctttagactagcggctcctctcctcggttctctagctgcggtgcagacaggtggtttcccaactaacaggggttcaggaaggctgaagcgagggaggtctgcttgtaaatacccagtgggcctggctgggctccctggaaggcgaggcgaaggcgcagttggagctgtttgctgtgagcagcacctctccaggtggggccgcccatggtggccctcaacactggggcagtgggtggactttgcccggtgtggcggcaggaagagctgctagcaacggtattagctctgggaggacacttttttaaatatataatatatatttaaatagaaaaaccctactcaagtcctagcccgggcgacagcacatctgtgtgtttgtggtgtggaaagccaaaacattaaaaacacatgtgcacttatcagcgtggctggtgtaaataccaagtccatcactcaggcacacatgctaaggttagacccagtccaggaacttcaagttaaaatcaagggtccccactagggcagacgccaagaggacggtatcagcacaacagctcggcccccaggaacagaagtctctctgccaccttctacctcgaattcctgagaattcttcgtaggtttcaaacattcccctgagagggagggttaagctctggagagctgggagtgagacccggactatcccgggacagaagaccacagcaaatagttcatgaagttcctggagtctccatatcttctgtccctaagtgcgggtggagagaggctgatatattcatagcccagtctgagcgcacaccccatgtggcaaaggggtcacagatcttagcgctccacagagacactatagggcgcgctgccttgcccgccagcttgtttgtaaagctctagggagcttgctttggactctgcaaacctaatttcttgatggacagattccaagtgaaatgactagagtttgtgaagaagcagggctgttttcttaaagcattcgtgcccgtacagacacggtgattccacggtgcacacaggaggcttctgcagatggatgacttctctgtcatttcgtggccaatggaagatgccttgacactcaaaaggtgacatggaggctggaaggaaaacacagagaagagagagcaagatcgggatggccaagggttaatcccaagacaattggtgaggccggcctgtggagctgaggaagacattcctcacagagaataagaccgcaggagacccggcaactgtgtctcaattcaaggggcatttagagaaaaatgctgtttggtagggggtctttttgtctcctagggccaggccctccacctcaagccaaa

SEQ ID NO: 587864 - DNA, 4001 bp, Homo sapiens
ggggcagtcagctggcagccaatgaggaacagtgctttacaggtgacaaatagccaccattcggacactcctcccagcagccctgggagggagacagcccactcttttcacccacacacacacacctggaagttgtggacttttctagtgagagcctcaagactggggatgctctctggagctatcttcatgatgtagcagcaggtgccaggggctggcttgtaggcgatcagcagctaggcacagaatgctggagatcattcgggggtccctgccctgctctctccctgacccaggtccttagccacctccctctaggttgggcacgggagtcatactagaatctggggctcaggcaaaaaaggtctggaggagagggagagatggatgtggatgaagtggcccagctgggtggctctagcagagccttgtcattggtcccagggtcaggaggtctgggcatacccacctgctggtagtcatacaccacgaggccagtggagccgatggagaaggtggcagtggtaaccaggtgctcactcagggccaggcgttgctgggcttccggcgccccaatgctcatctccagaacctggggaaagggcatggagccacctggtcttcccctttcctactcagccagtggtacccatccccatactcaggcctctgtactcaaatgcgcttccctctttcccaagagttcagggaggctgagtggaaccaggtgctggagggagctggctgtcctgctgcggggcaggggccttgtggaaaagcctgagctgggttgctgcctggttcgtgcctctttccttctagctgtgccccttgcctcctcccctccactccccttggacagtttcctatcgcccatcccacctagccccgctgtctggcatgtcctgtgcccactgctgtgcatcccacacctctcaccatctccgtgtgtttctggctcatgtggagacccatgagcagggctcccacaatcaccacgacgatgaggaccaccaccaccaccacgataagaaggcgtttcaggtgcactgggcagcagggaatgccaaatcggccccggggagctgcggagtagtcctgacacggtggggcaggcaaggagacaggcatgaggtcatgaggctgtcccctcttctccctatacaagctgaacaccctcccacggctgcctagggctggacagccgatgcgatggatggacagggaagggctgaggagatcagagaaggcttcttggaggaggtggcctggattctaacaaacccatagacacatagaagcttagaagcagggtctagttttgagggacccaagagagcctgcttcacctgtctctccctgctgcttcccccagccatggtcagcccctctctctccccaagtgatcacctccatgcggtgatacagagtctccctccttcctggaatgccttcctccttctccaccgggcgagctcctccttattctggctccagctcgtatgtggtttttctctgagaagtgtcccctgacttctgaagtttctcatggcttctgactcagggctgtctacggacagccctttctacggacccctatagtggctcttggcccacaaacagctccccaagggtccctggcttagtggtcttggtgtccccatcctgacttatcacagtcctaggttagttgagtgaatggatctggataaggaaacaggccagggaggatagaggaggcagggcccatcacacacatgtgcgcgcgcacacatacatacacacacgcaaccacactcaccggcgggctctccatcaggacctctttgctgcccacatccatcttgctgcaggtgctatgctctcctctcctcctctcccaggtgtgaccagggtcttatatgtgtccgtagggagaggggacagaggtgaaggaccaagccccctgtgtgccagccaagcccttggctttgaagcctgtttgttcctggccctccagaaccgaagcccagataagccccctgtgagagcccccaagggcccttggccctggcacatgagtcctcttggccccagcaagagcaaacctgggtgagttgagcaaacttgccctcgggccatctgcacttctcaccatgggtgtcttcctggcgtgcctgccttccttgctggcacctgcccctgctgccctgtggctttcctttttcttctaccaccctgaacctttcaggtggccaagggtctgaccatcatatttcccagcagaatttctagatacatagggatgcgctccaggaagagggttctggaggcagcacctgtagactctgagaggactctgcccaaggcaggaggtgctttgacatcagttttcggggtttcataaatgtgcatttccctgcaaggaccagttccaacttcaagtactctttcccttaccttgcctcctcccacatatctggtaccaacctcaaacttgcccccagtgattattttcctaattctggaaactctgtccccactggtggcaagctcttactcatgtgcagtgcttccttctttgctctgggcttgtctgtcaattgcaggctgtgctgatggcagattccaggtctgacactgctttcttctgcccggacagccctgaacagggctggctctggtcactggtgggctcccagtctccccatcctcgaatcagctcactcaccctgtggtctacactctacccctctagactcccctttctgcatcctctgatcctaaatttgccctgagaataatactcacccaaatacgatcagctttgaggactgtctccttctcttttctctgtctttcctagtgccttcccaaagccatctctatgtatttacgaggtcaaatctgccaatgactttgggctggctcaccctttctctcaggttccctttcactccttgggccaggtggtctctaaagtcccttcacctctaaactcaggtgactgtggcagagtccaggcctgggctcgctcccttaacctcctatccttttgttttgttttgttttgttttgttgtgagacagggtctcactttatcacccaggctggcatgcagtagcgagatcactgctcactgcagcgttgacctcctggactccggtgatcctcacacctcagcatcccaagtagctgggactaccagtgcatgccattgtgcccagctaatttttgcttgttttatagagatgagttttcaccatgttgcccaggctggtctcgaactcctgggctcaagtgatctcggcctcctaaagtgctaggattacaggtgtgagccaccatgcccaaccagcctcctgtcctttaacatgccaccccagttcctgtcccctgccccagccccctcccacctgggccctgcccttcggtcatgagctggcaggttcccctgtccccctctccatctggagggccttcagccccaaggttgcataacagcatggcatctgaactgagagcccctgagaagcgcagggaggaagaaagggagggaagtgtttgctcccaccaccctcctcacccccttgctgcccctttaaatatttgcctaagactccagcagccagagagtgtcctaggacagtgaaaggaggggaggggtgccgggaggagggggagcccacagaagcatcctctcagctcggcctcagctgtgtgcaggtgccagatgtgggagacagctcgcctgcagtgcccacccctgccctcccccagggcccttactcccgcccccatcatcctggcaacattgggattgatcggctgactcacgagtactgggcctgagccaggtgggcagctggccagcgggagagccaagcactgcaggcatctcggggtccctgtgggcatctcggggggccatgttgttctcacgtgggacttgttcttagcaggcactgtgggtggggtttgccgccatcgctgggtgctgggagagggatctctttctttga

SEQ ID NO: 587865 - DNA, 4001 bp, Homo sapiens
tgggctcctgcgtgccccctggccagggcacaggacaggctgcagacagaggctttggagctctgcaggggattttgcagcctgcctagcttgtcggataaacccatttccttgacatttcagggcaaacctctattcgtcgtttctccagcgggtgggggggtgcctaaacattctcactgatcaaagaagccagaatccatctgaacctctgaaatagtagaacgtaccaaatgcctaggggtaaagaagggtggaggatttcaataaaagaggtgcttccagtgtcgccccctttcccgctttttcgtttacggtgagcgggacatttaaagtattttgtggtttgttggttttttaaagtttttatttattgtgtgtatataaatatatatatttttttttcttgaagggaagcaggcagaggtgcccataggcagaggggcgcgttgtcaccccggatgctccctccgggcaggccctcacggccaagcaggggaccccagagggagagggcgcggcgcggggaacccgcggagcggcggggggctccaggctggtgggagaccgtgtgcggccggagcctccgcagatgccgcccctaccagcccggctcccgcctccccgccccctgcccgagtccccggacctgctcccgcgcctggggctagggcaggctagccgtccccggcagcgggggtacctctccagcccctgcactgcaactgcgggaggaaacactgcccgcgggcggtgggagggaaaaggggtctcacgaagttctgggataaaaacgggctgtcgttgcagatgcctctgtcacgcgaatctccgagcggaaatgcactgtccccgtgccgggctggggcacaggcgggatcggagccgggaagaggaggcaaagtggcggcgcagctcggacaactttgctgggaaagcaggcgacagcgggcagagctggtgccgctgccccccccggggagacgagccggcaagaggcgcagggtctgcaccccaaatgctgccgtcacggaccaggaggaggacggggtggccgctggcgggaggagcaggcggggagggcgcccagcccgggagtgcagcctggctcgggagaaccaccctccgtgtcctcggccccagcaggggcgcctgcgcccgggtgcgcgtccccccaacgccccctcgtcgtcccgcgggaccaccaactactccgcgccgctggaggagccgcgggaaggagaggggagagcagggagcgccgagaagcggccgcgaagcccgcccggacccgcacgtaccttgagctcctcaatgtccaggttcgttgatctgtccatggagcgcaactaaacgaagtggagaggaaccgggcgagtggcacccaaaaacaatctagtcttttagtttccagcttaaactcagctttatcctcctccaagccccggcagctcctctcagtctcattctccgtggtcacgccgcctccaccgggttaaaaataaggaaaataaataaataataatgataattcactttattttacttcctcaaagatttagtgacaggtgatctctaccgcggtgcaacacagctgagtcgattgaaacaggggccaaaagaaaaaaggaaaaaaaaatccactctatttaagattatttcttcttctgcaataagcttagaacccagcgaattgctgcatcccgagaaaaaaagctgcttccctggtcagcatcatgcggcaaatttcaagcaaatgtgttcaaactgaagagaagagtgtatgataaaaggcttcctccgtcaggcttactctggtaggtaatttagctccagtcccaggcattagcaatgatcagtttccccggcaagataacagaatccccgaagtcctgcatagacttaaaaaatgtcttgtagctgagaggtattttctcagtggggaaaagaagataatcaagtcagaagggaacgttctcctttgaaggttatgctaaaagagttgagggaataggaggtggatccaacggagagaaaaagagggagagaaagagagagggagagaaaaattttcctcctgcttcgctgttttactggccttcaccaccaggtgactgacttcgcttctctcttcccacagccaacactaaggggatttctctcatctgtcaaaaagcaacatttcctctccagacaaatactatcgctgggtcttaaagcctgccctgtgtccggaatccactaggtgacaatcattttaattcattgcgtacattgcttcatcttcctgcagatctgggaggaacatgcttgtgtgtatcacccacatgtatttaaatatactcacttcagatctctgctgctttcagcatcagattttttaatttaaaaaagacttttatagaaagtgacagataagaatattaaaggaaatttcctggaacgatgcttcttatgataaagcagtcttttattagaaaattgttctttacatagattctgacaggtcagtgcatttaacttgtaggttgtagatttggggaaagggctcgttttcttcatttaaatgtctcagtgtaaaacttgacttttgaagcgttttaaagactcttgttttattatgacacataaactattgagacttaaagatgtttacagatttggaaacagagctgtataaatacttttgtttcaaaaaaaaagtgtttctttttttaggatttaatatgcacattccagtctcatggtctctctctaacatcatctccgtcctctgcctccctgaattccagccacctagtctattggtccacctgccagtactggctctttaattcccattcttgccccctcgttaaggacagctgtctctccccctagttctttatagttttaacacttctgcttctgactaaagtcacctgagcagagaaaaatttttctcaggtgagtctgtcagatattctcctttatcctcttgtcgtagcagcattcttaatttaccattatttaatgtatgctgttattatccgtttgtttgtttgactcctccaatagactataaactcttgaaggcatgttctggacggttcttattcaccaaatgtcccaagagccaagcagctaataagcacacaaatgtgcatggaacagataaatgtgtggaaagaaacctttacagttaatattctaatgtctgaaaccctgatgactcccctcctcccctcaccggcaccaatggagcacatcccagtttttctccttctactttgcagctaagcctggagggctcagctttctcatggaggatgtccatttcattagtttaagcctagtctattccatgcacttgcctaagctatctttctttcaaactttgacttctgactacagcttttaagattaacatcaagtagccaaaagtccataatgagtagggccaaacatcagattctcaaaataaacttcatgtgcttataagacataattattttgcataatatatgatgaaaaataataaaggttcaggctgagagtagatgaacttatataagacttttaactctaaaaaagagcttctcttctagaaagtatcaacaattcaacatgaacaaagataactactaggatgatgcaaaagtaatggcagtttttgccactgaaagtaatggcagaaaacacaataacttttgcaccaacctaatacataggcttttgaaagtcaagtctttccatatgaaagaatttgaaattccctgtcaactagtcattgcctaactttagaaaattgaataaaacaagcaaatttattttgaacatattagcaaactgatattatttaaggtaagttttcaatttgcagttgtgaaaatgtagttcaaggaaggtatccatagaaaaatgttgatgtttaaatattattcacaaagggaaaactgcagtttcttaatatgacatattatagttgaaagaaaaaatgatattgttcttaattttatgtg

SEQ ID NO: 587866 - DNA, 4001 bp, Homo sapiens
ttgtaactgtttttagtgaccctagaagaaagctggtaaaatccaagcttcaaaattggaaacaggagtactggctgggtattagataatattaaggaattactgctaatattctgaagtgtggggccaggcatggtggcttatgcctataatcccagcactatgggaggctgaggcagatggaccacttgagcctaggagtttgagaccaggaacttaagaccagcctgggcaagacagcaagatcctatctccaccaaaaaacaaaaacaaaaacaaaaaaacgccaaataagccaagcatggtggcatgtacctctagtcttagattcctaggaggctgagacaggaggatcacttgagcctgggaggtggagattgcagttagccgagatcgcaacactgcactccagcctgagcaacactgagactgtctcaaaaaaaaataaataaataaaataaaaattaaaaactaaaaaaataggccaggcgcggtggctcacgcctataatctcagcactttgggaggctgaggcaggtggatcacttgaggtcaggagttagagaccagactagccaacatggtgaaacctcgtctctactaaaaatacaaagattagttgggcatggcagtatgtacctatagccccagcttcttgggagggtgaggcaggagaattgcttgaaccctggaggcagaaggtgcagtgagctgagatccagcctgagtgacagaaaagaaaaattagcggtgcctcacgcctataatctcagcactttggaaggccgaggtgggcagatcacaaggtcaagagatcgagaccatcctggccaacgtggtgaaacccatctctactaaaaatacaaaaattagctgggcatggtggtgggtgcctgtaatcccagctactcaggaggctgaggcaggagaatcgcttgaaccagggagtcagagattgcagtgagctgagatcgcaccactacactccagcctggacgacagagagagactccatctcaaaaaaaaaaaaaaaaaaaaaaaaaattaagtgtgataatggtattgtggttatgtttttcagaaagactttatctttgaaaggtatttattgaaatgatgtgatatctgggtttgctttaaaatcatagggaagggggtcagtgtgagggaggtgaaataagattggtcaggagttgatggttgctgaagttcatattgaagggtattgggtgcatgcaattcactttgcaattattgctacttgtatatatatttaaaatgatcaactaagaaaatttaaaacttttttttaaaaaagcttcattttttgtctgccctacacagtctgcaaatcacaggaggaaattctgggggactggattaatgattcttagcctaaagggacagagagaaaggagagcagctacagcgaatcccaggcaggagccatctcagggcaaactgacaggaagctatcctgcaggtttcttgctggaacagccctccctggctgccagccagtcaccaagtgttcaaacaggagcagcccctgtaaaaataccacgagtgttagtcagcctcacctgcgagacttcggcactcaggttggcctctgtccacacatcagaggcctcggagctcatcatggtgggcttcacggcaattgtgggcttggagtaaggtgagctgttcacaccttcatcttccaggcggcagttctcaggcctgggaggcaggcgcggtggagggggcaggctgcccgctctgggctggggagggccggccaccagctggtggtcgctccgcaggcagaagcagttcttgcaggacccgggtttccagatgtgctccacaaagtcactgcacgcagacattttcaggctctcggggttcaggcagagggtctggtgcatcttgagccgacagggtgctggttcatcttgcgcccggctctctggtgcagttttgtgggattcagaggtgggtcacagagcggcttcctagaaaggcaggacagtttcctgattagagatttgccatgccagacaatgggtgcattatcaattagagtctcactatttgatcagggagaaggaggagaaaaaggtaaagattaggatcccatttattttgggaccctcgcccatttgtcacaaggctcttaaacattctctggtggtgtggccttatcagaagctgtaaaaactaaacatagccttgttgctttaaaggagtaaataaaagacatttcggtcccctaaaatcctgggtggggagtcccctaaaatcctgggaggttttgggcagttatgggaagaaatcacgtagggtttaagatgagaagctggtacgtcatccatgtattccctgacaccggggcctagagtctgggacgctgacccacagaaacaagaactgtcaagcagtacagcaaataaaaacaatggcttttggaaaataatgtttgaccaagaactgtgtgagaggggaggcagctttaggccctgaaaggtgcattgtaatccacacttccaaccaggtggagaaaggaatggttgggaaacgggagaagtggggtgctggcctgtcctctagaccttatgcagagtctggcatcttgagaaatatcccttgcttaatatacattacttgaccgtgtgctgctgaggtccacaatgctgggtgttataggccaaaggggcaaaccagtagtaagacaaattcatggtcaaaggtggctggatagatgataagagagagaagagattaacgaagagctatttccaagtgatggctctggagagaaggcaattggcttgctcaaaaaattcattgcttcttagagtaaaactgcaagtaacagtttgcaccatggtcccttgtaaattcaccactgagaaggagctcaaagagttgcagccattaaccaattaccttgaaatcattccatcaggtagctgttgtcccaattttacaggtggggaaactatggcaaacacaagaacttggaccagcccatagacacgggagagtttgcccattctagaaacagaagccaactttgcaggcggctcctccctgcagtggtgatttgcgcattgctcctggctcttcttagcctatttaaaataaactgacttcccataaggagaatgttcaagagcaaaatcttccttaagaacataagggtgaataggttctcattaaatagggaccattttgccttagggttttctctccactttcctcccataaggatctgccttaagtttgataatctctaaactgtcaacaggactaaccaggtggaatgagccgggtaccccaaaaatcattccagagtgtttgtgggaagtgctctcttttatctccacactcatagacaggggtgttcattcaacaagtgctgaagctacgtgtgcctcttttccctccaaagtgaaaaatgggttgaggccaggcgcggtggctcacgcctgtaatcccagcactttgggaggccgaggcaggacgatcgcttgagcccaggagtttgagaccagcctgggtaacacagagacactctgtctttacaaagataataattatttaaaaaaactatccaggtgtagccatgcatgcctgtggtcccagctacttgggaggctgaggtaggaggactgcctgagcccaggaggtcaaggctgcagtgagccatgatcacaccactgcactccagcctgggtgactagagtgagaccctgtctaaaaaaacaaaaaaaaagttaagaataaagcccactgcatctttaagctaaataaatcctctgaaataaaagaaaagtatcttttagcagttattgttagggtctcacaggtccttttctttaagaagactgttagctaggttcttctcctcctccaaatacacccaagtagcaggttccttctttgccaagttctccagaagaggtcactgggcttcaacaagcggaggaaatagccaggttttgtctttctct

SEQ ID NO: 587867 - DNA, 4001 bp, Homo sapiens
tgtctatcttagtcaccacattgggtctctaatggtgcacatttgaagagggcatgttattctgaaaaaatattctctgcatatctgcaaatcacaaaaggtacacctatgaggctgacctaccaattcaatgtttccaagagcaaatagcagtaaaattacaaaacgttatttgttatgttgatgtgtgcaaacaaaaatgttctattttatagtacatttcaagttcaatctgaccctcatatctaaactatgtcatataaataatgtcatataaacagtgtcgaacagatcaggaacaaagctcttttcaaaaacaaaagtaggctccatgcagtggcagttaaagaaggggaagttctggtgtctccagagttagccgatgggcacaacggcagttgaaagagaccatgttacacaagtcattcaggttctggccaacatctgctttgaacaggtcgcattcccaggagctccaggctcccttaccccagggaaatgctggggtggtggcttgtcttacagaagtggtagccaaggggaccagaaggcacacccggtgctaaaacatgcctaaaacttcctctaatgtttacagctcttccaatgacatttggggaactaaagtatggatagcctcttcattgctagaaccgctataatatgataagttaagaatttgatttaatatttataaagaacttagaaagagcccagcgcatagtaagggctatgtaagtgtttggtaaataaaaaaaggcacctcccagattggctgggtgaagtctcaatctggtgagaagggagagaatcaaaatacacaacagtctatttttcactttgacaaaagatttagaaattacagtgctctgtatttattttgcacccaagtgcacactaagtagtctctggtgcaggactgaaattctactcatggttcagaagtcactgtgcacaactcaatgaaagcgttttaagtttcaagagatgattcctttctcttttctctttccaagtaacgatgactaaaaatgacagaatctaaaaatctcaaagcacttcttgtgggtacattccaaagctaaaactgtgagaattaatagggccagattcacttgaagagacgtaagggttcaaattacagagaacttaaaagacgcaacgtattaaggtcttttactacagatccgctgacaacaggttaaacgattccatccaccccactctggcggctgccccctccccgaccctcgcaggtgacctgcacccactttcgacctcagatagggtctccctgctcggcgttcccagttcctccaggctcggcggctgcgtgggggttaacaaggtccagccaccgacgccccttgggcgtttaggaatctcgaggcaggatctgaattcacctcgtggaaacaaagaccacaaactctccgggagccgggggctgggcggaggtacggctttttccgaggacaggcagcggccgaggcccgggcagccctcgccccgccccgtctcctcccgccccgggccgccgtcggagtcccgggcgcgcggaccctcccgccggccccgcacctacctggccccgcggtgctgctcccggcgcggcgggcgcggagccgaacgcactgcgcttcctccttcccggcagggccgccgggcgccggcgtttcctccttgacgcgtcacggccgctggcggctcctcccgcggagcgcgcgggaggccgaggacagccggggaaggcgccggatcccagcagagcggcgcgagcggcgggccgggggcagcccgtgcggggaggggctgcaggctgcgtcccgctcaggcctccgaggaaacccgcgctcctctctcttccccgaggacccccgcgaaaggccgggccacggtgcaccgtctgcccccgtcacgcgctgtgcaaagttcaagaggacacagtgggtcctgtctggagtcacagactctggtgtttccctctgctccgcccgcagtggccgctaccctggggcccaagaccggcgcgggccagagcgccggggcccaacagagatgacctggtgtgtgcagggatcaggaccccccgggtgggcccgtggtgttgggggggttggcttggtgtaaactggaaactcagaggagtgaattaaatatccaaataattgagaacaactgtgattcatttagcattatttggacagttttccacttttgtcattagcagagttacggcccttgtgtttataaacagtcgagaactttcacaaattggcagatcctgtgtgcagagaaatttcctttccacacatctttttagatctactgactcttttttttattcccattaatctccaagtcagctgagtgcacactttacagctccttattactcattcttgaattacagaagctgcgttttagatctgtttatctcttttaacagatagagaagctgagtggagaactaagaattacatggttcaatggatgtggagtcaagtggttaagattttgaagtagagtgggttgttttcttcgtcccacaacactactgtaatttaggtcttatcagatatcacttgaagatagactcagacaagtacttaaagattcccatgtgcatatcatgccttagattttgagacaatgatttgtactttagatcatatgattccagagaatttgccacaaatctatgaacaaataaactgccaaaggttattagaggaactgggatctatgtgtgacttccctaaattcagaagacatttcctcatgttttaaaatgatattcaaagatttagccccacaagtatgggttaggacattcatttttaatgtcaataaccacaatgtggcctctctttaaaaagtggattgtgaatccaaatactttttgtacttcagtaatcctacagaactttctaaacagtagttttcagaaatgaatataagaatgcagtagatacaaaacaatacattgccggtggtcctttatatgttttactgtggtccacaaagcaatccacatacattagaggagttcttcccttgtaacaaaatcaacaagtgatgagtgtatctcttaattaaagccatattcacagtgctgaagatttctcagacaaaaggaagttctgtgtcaataaactccaagtggaataacatcattctcactttagagacaaatacctggctatcaccacatcttgactttttaaaaaaataaacatctgggaaccattacatttctagataaatttgtcctattgtgaagaacacacacacacacacacacacacacacacacacacacacacacagagatcacctcccacaaacattttatgtattttctttttttttttgagacgagacggtctcactgtgttgcccaggctgggttcatttgatcaacagacaacatgttaggcattttgcctttacaatctgagagctgcaatttaatagctagattttgcaaaaagctagaggaggtaaatatattcacaaactactaaggactttttcactgtaattaaattagtttttttttttttttttttttttgagatggagtctcacttttgttgcccaggctggagtgcaatggcacaatctcaggtcattccaacctcctccaacttccggtttcaagcgattctcctgcgtcagcctcccgagtagctgtgattacaggtgcctgccaccacgcccagctaatgttttgtatctttagtagagacagattttcgccatgttggccaggatggtcttgaacgcctgacctcaggtgagccacccgccttggcctcccaaagtgctgggattacaggcgtgagccaccatgcccagtctaaaattggttttaagggcaaattttaaggctgatcactttgttgttgttgttgttgttgttttggtttttttttttttttttgagacagggtctcactctgtcacccagactggagtgcagtggcgtgatctcggct

SEQ ID NO: 587868 - DNA, 4001 bp, Homo sapiens
gtgagctatacaaaaagttggggaagagtcagcaactaacaaaacagtagctcaaaataatttcactccacaatgcttttgaacttagcagccacattgtgacattatctctttgggacccagtcctacttccttgggtgagcattcagggttccacttcctgactcctacccaatcaagaaaacttcgccaataaaacagcgataaaaaaactgcctagtaggtcaatttgtttatactggctgtttacattccctacctgggagaagagggctgcattttaaaaggacaaaaccaaagcacattagaacatgtttgtacaaagcttaagaagacaatcatcttgttctcaaagcaataattaatgtagcaactttgagacttgtgatttaaatcaaaggtactactgaagaatgattatgaatcatgcaattaagctaccaagcaggatagtgctggaaaggaaagccattcacagaaccataaaactgtcaaagataaagatagtaactatcatcaaaactagaaataacatcatcatttgattttatactttgttgatcagcagagctgaattctagcctaagctctgccatttattgattctgagtctttggcctcatccttatctgtaaagaccagctggtctgatttttcagattcctttcaattctgagattccctgcagcaagctatggttcctatgatgtttatttatgtattgggggtgctctggtttacttagttttgcaataatagtacaaataagcatccacccaaaatagcacaacttaaaagttctgtataaagcgatataaactgcttttaaacaaacccgcctgaacttggtgcttaaaatgaggctacattcaccttaaaggcgctgcctcttttttgatccctgttttggaacagccttcgagactgaagtttctgtggatgggatttggaacaaggtggatgatcacatcaggtaacacccctagtgaaagaaaagtaagagaccttttcttgtggaactcggtctaagaaaactgttccaaaggaatccccaagcatttctagcaacagctctgaggaaagaatatacgtaggttttccggtgatgacaattcttgagattaatgcccatctgaatgcataacaaagaaaacagccaaagtttattgtggactatgagccaggtattaactcatttaatcttcaaaaactgctgtatggttagaactatcattatccccattttacatacgctaaaactaaggcatagaaaagttaggcaaattgcccaagttttcgcagttaataagtagattcaaaaccatgattttagctccgaagtctgcgtgcttcatctccaagatacactccctacgtaacccctgctgtccatgtttaagtaacagtcccgtttctactacacctttcttacaaactgaataacacaaagtaaaagtaaagccccaccgcaagctcactatcgggtttctcctcctgtcctgaaccacaaactatattttaaaggatatacaaacttgacagtacctggggcttctcgacatttagagggggtgtgtgtggaacaactcaaacgttttctgtctcggaccaagtgcagtgaatgagtgccgcgaagtcgcagcacgcccgggtgtggagcccgcctctcctctcaggggttcacaggaggggccgcccgcgcgccccgccccgcgctcgtgatgggcgcggaaatggcaccggggcccgtcacaccacacctgcctcccgcgcccccggggtccctccacctggcccgcgcagtgccggggctgttctccgccaagggttcctcgcgcaagctcgatgagccacacgcttaccttcgggcacccacccccggcgcatggcgaatgggaagcgccgccactgctgcgccacactcggccgggacctgcgccgcgccaccagctcccagcggcgccagctgcgctccctgcgggggccaaacctgcaggccccgccccctgcggcaggccccgccctcaccaatcaccaccggccacgcccgaatatggctcggtcagccccgccctcggagctcttcggccacacccccgaaggagctgccggtggggtgcagccccagggccttaattaagtaaataagcgggggaggaaaggcgggaagccagcatttgggagacagaaaacgagaggacccccgcggggaaggtgaagagagccttgggcgggggcaaggaatgagaaggcactctccccaggttcccgctaaagtgtagatctcaaaacaaccgcgctcattcaagacactggcataatctcattttcctcgggcggggtaggagtcacacacgaattcagggctccaggcgtgagacgtcattaggaatgggattcagaggagcaaagaaacgaagcaattcctttactagtctccaccacacatcctttacttcaaaaattggggagtcggctcccagtaagaatcctcaccccgagcttaaattgttaatcaatctcgttcccttcaaacagctcaggcgcatcacgagagagcagacgcggccgggtttggcatgaatgtccgtagtgtgctactctaaggtttgcgtctgcgtgtacagataaaggaaaaccagaatcctcgaaacgacttgttttaactattaatgcatctgagtctggacagtgaaaaacggctggaagcatcaagccaataaccgagtagggcgcagttcctacagtcccagctactccatgggctgagtcaggaagatcacttgagcccaggagttccaggccagcctggacctcatagcaagaccctgtttctaaaataaaaataatgtaactaatgaatatggcagggaaacaaagggctcactttgccagcaagcaggattgacatacggtaacctttattacaaaaatttcagaaaataatgccaagaggccagcctagctctgtagccttaagggaagtcacaatatctgaagtcctcaatttgcttatcagtaaaacgaggggatttagcctggtgacctcatgggctctaaatgccctctcatactctaaagtttgtcctgccaggctcaactcataggagaggggaaaggatgcagggaagtattgtctagtcaggagccactcagagaaattgggaatttttagaaaaagcttcagggatctccggcatcactcattcaacctctcccttacaactttcctgtttgtaataataatagtacaccagtccccgacacatacccttatcaacagtttcccttttctttttttgaccaacagtctgaaaaaattaaatggaaaattctagaaataaacgagttttaaatggtgtgctgttctgagcagtgtgataaaatctcacgctatcccactccatctaccctcaatgtgaagcctccctctgtccagtttgtccatgctgcagatgctacccacccgctagtctcttagtaggcatctccattatcacgtcagctgtagaggtgtcacagtgcttgtgttcaaggaacccttattttacttcatgatagccccaaagtgcaagagtcgtgatgctgacatattgttataattgttgtattttattaatagttatggtagttaatctcttactgtgcctaatttagagagtaaatgttattgtaggcatgtatatataggaaaaaacatagtttagatggggtccagtactatctgcagtttcagggaaccactgggagttttagaaggtatccccttggataagggggtaatactgtatcattcttgccctaactcaaaacctttgactcttccctctcagtcctcacgtttggtcaccaggtccttggctttctcctttagagtcttcaatgactcttccattttcactgccatctctgtataaagaacagattcaaagaactcagggtgtttgatctgatcctaacctacatttcccacctaatctccaactcactctcttgtgtac

SEQ ID NO: 587869 - DNA, 4001 bp, Homo sapiens
gtgctgtcacctcacctccttgggactcagtttcctcatctgtgaaacgaggactggttcagtctgtgacttctaatgtgtgggtatctgacataatctactgtgaagcgaaggagcctggtggagccagggtagaagaaatagaaatcaggaaattaactaactagggctttcctactttcactccctgacaaggaagtaatcattgctgatactgattcaaactcagaggactttcccatactatatcaagggcagcaaatctccggttattcaagatccaacaaaggaatagctcagctaacacagcccctttcttaaaagagagaaatgataagcaacaagcccacacctgctatttattctgaacaccaattgctaaaaggtcagagaatccgttgttttccatgataccatagatttggcctgattctcacaccttcacactgttctacaatacaactgtcttttgaataactctgagacctaaacaaaatacaattttaaaaggccttagatacaggctaaatcataaaaatagtaggcgggcacagtggttctacatgtaatcccaacactttgggaggtggacatgggtggattgctggagctcaggagttcaagacctgcttgggcaacatggcaaaactccgtctctacataaagtataaaaattagccaggcgtggtggcccgcacctatagtcccacctacttgggaggttgaggtggggggatctcttgagttggagagtttgaggctacagtgagccgagatcgcaccactgcaccacagcctgggtgacagaaggagaccctgtctcaaaaattaaaaacattaggtcggtgcaaaagttattgtgttttacatggccaaaaaaaaagtaactgcggttttttttacgtaaaaaccgcaattacttttgcaccgacctaataaaataaaaaataaataaaagtattgtggtatggacagtgtaactataacattaacaatacagtttgaattctaattcttttaaaacagccagctctgtggtccaactttgttttcttattgaaactttatcttattcatctaccagcaaaagggctgtttttgaggatgaaacaaattaccagagatgacagcagtttgtaaatatatactattcttcagaaatttgagattactgtacacacagatttagtatacatagagaattccactcatatgccaaatctatgcccctgtatgctttccacttatttattcactattttaaaataatcgtacccaagtcgttgtttctattaaaccagcaatcaaacgaaagcctttggagcgatgaggagcatctgtttgaaagggggaggtgccacgcttgctgcttctctaagctccctgggaagggagagacaactcagaaaacctacaaactgtagctccttccggtgcccgcgtgacccccgagtccaggagcgggcaggggcgccgcttggctgagcgcactgggcacccggtctgggtctgggccagccccgccgctgcagcccgagggaggcggcgctgcactggcctccgcgcgctcccagaccccacgtgggggcgcccctgggtgccggtgcgcggggaacgtgctgcgggggtgctgcgccagctgccaccgtttcccgggacttccctcctggaagatttccatgcgcaagtcgaggacgtgctcctgctaggagtctagaaactctaggccagcccggaccctcccggggcctgcactccccgcgggtggaagcacgcgccgcgtgtccctgccggattccagaacttccccgaaggtcctcagccccggcagaccctctccctcgaagttcccccgccaccccctgcaagcccccaggccccggggaccgccgctcacctagccagcggctccagacaccggacaccggacaccggacaccggacacccgccgcggccgctctcgccgcccaaccccgcacctgagcccgccccgggcgccgcgaaggggtggaggcgggggtgaggcttccgcccgcccgctctggcccctgcgcctcccatgcacccatgcaacctccgaggaaattcccttccccctactcccaccccacgcacactctccccaaagcctcgccccacccccagcacctaccagtgctgggcgcccctgggcagggtggctcgatcacccgccacatccacttggccgccagaagccgtcggggaagggagggagggaaaggcagaggcgtcccaagcggcgcaggcgggctgagcaaatactccggcccggacgcaaaacagctcttgtagccgtcccgcccgcgccgccccgccgcgcccacatgccggggtgactggcggggcgcaatcgcggccccacccgggcgcctggaggctctccagggccactcgtcggcgaggctgcgtggcctgcgcatctcgggccgcctggcccgcgcgctgtccccgagctgcggtagtccggggtaggcttgtcctctcctctcttagttcatgagacagggatctgcagtctgtgatctcttggggactgcaggacttagattaaatctgcagatctgggcctttccacgtttcagagctcggggttccttgctaggtgtagggtaggagggtgcgcaggccccacttgttcactctgcttgggtgctgcaggccaaggcgactctggagctttttttttttttcttttgttgacattaagtaaatgatcaaactctttggcacttgtcggtacacgtgtggctttgtaggacaagatgaaggaaggaaaaggctggaaggaaggagaccgcagtcaacacagacaggtggagaaaatgaaagaaaactgggggaaaagttaagatgctgaaaggagtcttgaggattgcaacaagaacaggttggcttggtgcctgaagacgtcagggaggagctggcagtccacagttagaggaaatcttggaggaaaattgagcagaagcacagtggaaaggcatttccactggagggcattttccatcctagaggagcatgtggaagaaaaccgcctgctttggtgaaccccagattttgtgtattgggagagatgtaataaacagtaaacaccagtagtcctctccacggactacctgacctctttaggagcctgacctgctggattcaaacacaaaatggcatttccctgcctctccaaactgcagaagctgtgcagagttacatcaagcctcggggcaggcggcattgtcaggaaataagacccagctatttaggaacaattccaggaatcccatcagggaggaatttctggtgtaaggcttagttcctactgcagtttaaatgatagcatatggggtgctttaggctggagtgggattggcccctggaaagctgctatgacgaggtcagaatgaatcctagccctgcatggatgcatcagttgaaccatacagggtggtttatcagttaggaaaaatcccacaggacactgtgacagcctaccttcctcacacccagtctctctccaggtcctggcaagtccttccttataacagctttatcactgtgctactaacctctgtacctcactttcctcctctagataaagagtgtctgcctcggtaagttgtcaagagggttaaatgagatgctacatgcaaagagattagaagagctcttggcatgtggtgagtgttcaaacacattcactcagatcagttcatatcacattaaggtactggaattccacattcctgccatctcaccctaggctgtgggttctgcccaccatgccacctaccttccaagtcattcccagggatcctatcctcctggtattcacatccttgcatagctccctgccactttgtaaaggttggtatgcttgaccaatagaacccggcagaagtgatgatggtctgccacttcagagattaggtaaggaaacaccttggtgcttctatcttgaaataatattgacagcccaaaggaacgc

SEQ ID NO: 587870 - DNA, 4001 bp, Homo sapiens
catgataccatagatttggcctgattctcacaccttcacactgttctacaatacaactgtcttttgaataactctgagacctaaacaaaatacaattttaaaaggccttagatacaggctaaatcataaaaatagtaggcgggcacagtggttctacatgtaatcccaacactttgggaggtggacatgggtggattgctggagctcaggagttcaagacctgcttgggcaacatggcaaaactccgtctctacataaagtataaaaattagccaggcgtggtggcccgcacctatagtcccacctacttgggaggttgaggtggggggatctcttgagttggagagtttgaggctacagtgagccgagatcgcaccactgcaccacagcctgggtgacagaaggagaccctgtctcaaaaattaaaaacattaggtcggtgcaaaagttattgtgttttacatggccaaaaaaaaagtaactgcggttttttttacgtaaaaaccgcaattacttttgcaccgacctaataaaataaaaaataaataaaagtattgtggtatggacagtgtaactataacattaacaatacagtttgaattctaattcttttaaaacagccagctctgtggtccaactttgttttcttattgaaactttatcttattcatctaccagcaaaagggctgtttttgaggatgaaacaaattaccagagatgacagcagtttgtaaatatatactattcttcagaaatttgagattactgtacacacagatttagtatacatagagaattccactcatatgccaaatctatgcccctgtatgctttccacttatttattcactattttaaaataatcgtacccaagtcgttgtttctattaaaccagcaatcaaacgaaagcctttggagcgatgaggagcatctgtttgaaagggggaggtgccacgcttgctgcttctctaagctccctgggaagggagagacaactcagaaaacctacaaactgtagctccttccggtgcccgcgtgacccccgagtccaggagcgggcaggggcgccgcttggctgagcgcactgggcacccggtctgggtctgggccagccccgccgctgcagcccgagggaggcggcgctgcactggcctccgcgcgctcccagaccccacgtgggggcgcccctgggtgccggtgcgcggggaacgtgctgcgggggtgctgcgccagctgccaccgtttcccgggacttccctcctggaagatttccatgcgcaagtcgaggacgtgctcctgctaggagtctagaaactctaggccagcccggaccctcccggggcctgcactccccgcgggtggaagcacgcgccgcgtgtccctgccggattccagaacttccccgaaggtcctcagccccggcagaccctctccctcgaagttcccccgccaccccctgcaagcccccaggccccggggaccgccgctcacctagccagcggctccagacaccggacaccggacaccggacaccggacacccgccgcggccgctctcgccgcccaaccccgcacctgagcccgccccgggcgccgcgaaggggtggaggcgggggtgaggcttccgcccgcccgctctggcccctgcgcctcccatgcacccatgcaacctccgaggaaattcccttccccctactcccaccccacgcacactctccccaaagcctcgccccacccccagcacctaccagtgctgggcgcccctgggcagggtggctcgatcacccgccacatccacttggccgccagaagccgtcggggaagggagggagggaaaggcagaggcgtcccaagcggcgcaggcgggctgagcaaatactccggcccggacgcaaaacagctcttgtagccgtcccgcccgcgccgccccgccgcgcccacatgccggggtgactggcggggcgcaatcgcggccccacccgggcgcctggaggctctccagggccactcgtcggcgaggctgcgtggcctgcgcatctcgggccgcctggcccgcgcgctgtccccgagctgcggtagtccggggtaggcttgtcctctcctctcttagttcatgagacagggatctgcagtctgtgatctcttggggactgcaggacttagattaaatctgcagatctgggcctttccacgtttcagagctcggggttccttgctaggtgtagggtaggagggtgcgcaggccccacttgttcactctgcttgggtgctgcaggccaaggcgactctggagctttttttttttttcttttgttgacattaagtaaatgatcaaactctttggcacttgtcggtacacgtgtggctttgtaggacaagatgaaggaaggaaaaggctggaaggaaggagaccgcagtcaacacagacaggtggagaaaatgaaagaaaactgggggaaaagttaagatgctgaaaggagtcttgaggattgcaacaagaacaggttggcttggtgcctgaagacgtcagggaggagctggcagtccacagttagaggaaatcttggaggaaaattgagcagaagcacagtggaaaggcatttccactggagggcattttccatcctagaggagcatgtggaagaaaaccgcctgctttggtgaaccccagattttgtgtattgggagagatgtaataaacagtaaacaccagtagtcctctccacggactacctgacctctttaggagcctgacctgctggattcaaacacaaaatggcatttccctgcctctccaaactgcagaagctgtgcagagttacatcaagcctcggggcaggcggcattgtcaggaaataagacccagctatttaggaacaattccaggaatcccatcagggaggaatttctggtgtaaggcttagttcctactgcagtttaaatgatagcatatggggtgctttaggctggagtgggattggcccctggaaagctgctatgacgaggtcagaatgaatcctagccctgcatggatgcatcagttgaaccatacagggtggtttatcagttaggaaaaatcccacaggacactgtgacagcctaccttcctcacacccagtctctctccaggtcctggcaagtccttccttataacagctttatcactgtgctactaacctctgtacctcactttcctcctctagataaagagtgtctgcctcggtaagttgtcaagagggttaaatgagatgctacatgcaaagagattagaagagctcttggcatgtggtgagtgttcaaacacattcactcagatcagttcatatcacattaaggtactggaattccacattcctgccatctcaccctaggctgtgggttctgcccaccatgccacctaccttccaagtcattcccagggatcctatcctcctggtattcacatccttgcatagctccctgccactttgtaaaggttggtatgcttgaccaatagaacccggcagaagtgatgatggtctgccacttcagagattaggtaaggaaacaccttggtgcttctatcttgaaataatattgacagcccaaaggaacgcacgctgtacacaaataatgcaaacaactcagaacccagactctcttcccttttctctcatctgcccatttccatccttcttgtctcgtggctctttcctatatttgccatgaactcttcttcttctcttatttttatagtttcttctccatcctcttcacttggtctcccctctcctctatcaccttctctttttgtttcctttctgctgactcctggaatttcctcttttaattggcatggtctggaagagaaaaggtagatgtttttcccttaatttcaaaagtagacaattcgaatttttttttttttttttttttttgagatggagtttcactctttttgcccaggcttggagtgcagtgatgcaatcttggttcactgcaacctcggcctcctgagttcaa

SEQ ID NO: 587871 - DNA, 4001 bp, Homo sapiens
ctcccaagcagccatgaaactcagctaattccatcttcttttttttttttttttgagatggagtcttgctctgtcacccaggctggagtgcagtggcaagatctcagctcactgcaacctctgcctccgggttcaagtgattctcctgcctcagcctccccaagtagctgggactacaggcacacgccaccacgcctggctaatttttgtatttttagtagagacagggtttcaccttgctgaccaggctggtctcaaactcctgacatcaggtgatcacccacctcggcctcccaaagtgctggaattacaggcgtgagccaccccacccggccactaattccatcttctaagcatctctagaaacatccttctccccaaccctatctgcaccaacccttgccactgcagaactctgtcttaagcaggaggtatctgagtctgtcactctcccactcctgtcactctcctgctgctcttgggatgatgtcttctcacacaggtcctgaccctgcctgctctgcctcttcatgcttgcctctcatccttcctgagggttaaggaagtgcaggctgaggttccagggcttcctggtggaggctgcaacttgtgctggctggggcctcagatggtgtaggagactgactccagcagccactccaagtactccaagctactccaggctccacctactccctcctggaagccttcccagacatccagcagtggggaaggtggatccaacttccccaaccaggactggggggccaaggctattccaaattgtaattgtatccattacagggcactgaccattctgtccttccacggtggcacctcggactaggactgcccaccgctgagcttcctgagggttgaggaagtgcaggctgagggttccaggccctcctggtggaggctgtagctcgtgctgggtggggcctcggatggtgtaggaaactgactccaggggccactccaaattaacctgagaagagggagagtccaggctcagggcgtccccccgccctacatcgcacgaggagcaaagaaatacaaggtaacatttatagaccatttacacggtcctaagccctgtacgcctatcatcaaatcctcacaatagccctgtaaagtaggtccaggtaggtcccagtaggtccgagcgtcacccccatttcacggacgagaaaacagaagcaaagaaacataactgcttaagggcacccaggtggcaagcggaggggcctaactttgggctccgtgccctgcccgggccaagaggactgaccgcgcgccctccgcccccactcaccgccccaggtcccgcgcccagcagctccagccggaagcgcccaggccgctcagggtccgcgctcagctgcagcctccgcagctgtgcctcggcgtctggcccggcgcccagcggcctcaccgcggcgtgcacagccaagagcactgcggcggagcccaagtccgaggccgccgccgccgccccgcccgctggcggcgccatctccggtccggccgggtcccacccctccgagcgcgcttccgtgggatcgggccgctgagccccctccgccggtcggaaacacgggccgcgaacctggggttccgggcgcgcccagagcgtcgggcctgggacggcgccgagtggtgcactctggccaagcctgccccgctggctttgcccacaaatggacacggcccgagggtctccggacaccggctgggcgaggctggcggcgtgtacgaggctggggcagggcggccgaggcgctcacgttagagctggtctttgggggcgaagggtcagggggcgaagcaccggccacaactgaaggcggacgcggcctcttcgccccaggggctcggcggacgtagatgcatccagcgtgcgactatcccagcgcctaacggcagctggacttcgctcccgggacctccaatgggctgccaccttcgcccgcagaccccagcccccgccacgcccacacgtcgcactaggttggcccgcgcctcactggttacggggtcgacccccctagggggcggagctagagaggccacggccaatgaacgccgggggtaagcgggttagtacgacgagaagagtgacagacaggctccataaccagtagacgtagaaggcagaactgagtggcgggtacggcacccgatggctattcgagctctcgatctcggagactggagcgggccattcagaggcgcggggccgggcccggcggacgcttgttgttgtccggccgggggaggcggaggtcgctcgctcgctcgctcggctcgctgactcgccggagcgctctgtggcggtcggcggcaggtcggtcgcgagagcgggctctgtggaagggggcgaggctatgtcgcggtggcagcccggatgggccggcagggccgggagtaacgggacgtcgccgcggagcttcttcccccggatacagtgcggcccgagcggaggccgcggcgccgccctccgatcttgaagagcccgcgctgcgcggagcccgcccccgcctgcgcaccggcaccgacgcggagcgacccagcccagccagacccggcccggcgcggcctgatctaacccagccaggcaggtgggtgtccgccctgcgtcccgcgccgtctgcgtacccggaaccacagcccccagcaggcctcgcgcggcgcgctgcctcctgggatttgtagttccaccgcggcttggctggtgcccgacgtggcccaggcgggcgctgcctggtgactgcagcgccccagcggggccgagggaccgccctcctaggcgtctggagaaactaggcaatttttccgggtagagtggaggaacctgtagttttcctctccccgggccagaaagtagccaaaacgaaagagcgcccgcccaggtgaccgcagggcccggagtcccaggtgtcctggttcctaaccgggatgcagcctcttaccttggctgaggagcccagccagcctgagggagactgcaggagtcacgtcccgttgcggactcaagagttacccccatggtggctggagctcttttggagtgggcgtggagatggggaatgggaatgttgagcaacaatctcagccagcagccccagggtgagcagggtccccggtggtctagtctagtcccagaactcgcgtgttctgcagggggtatggctgacctggagcctggacttaccaccctcaggtaaaacaggatctctgtcacctctcctggccgggcagagaggggagctcctgatgtgcagcctggacagaggccagactcagcttgttcctagcggctccacttagtgggtaggagggctgaaggcagggccccaaggggccagatagatacccatggtctggtctctcactccccaggcaatactagcccctctggagcacggagctccttccccaaagacatgaagctattggagaactcgagctttgaagccatcaactcacagctgactgtggagactggagatgcccacatcattggcaggtgaggcaggctgggggggctggcatctcggaggtcacactgccgcgcccttcagtggaacctgggggaagcatgcttcatggttctctctgcatcctataggattgagagctactcatgtaagatggcaggagacgacaaacacatgttcaagcagttctgccaggagggccagccccacgtgctggaggcactttctccaccccagacttcaggactgagccccagcaggtgagccatggtggggcctacctggggctgggggttgaggggaggtgatgggcccagctgatggttctgtctgtgcagactcagcaaaagccaaggcggtgaggaggagggccccctcagtgacaagtgcagccgcaagaccctcttctacctgattgccacgctcaatgagtccttcaggcctgactatgacttcagcacagcccgcagccatgagttcagccgggagcccagccttagc

SEQ ID NO: 587872 - DNA, 4001 bp, Homo sapiens
attgcagggcaggagtggggagggtggcgggtggcaggctctacccattaccctatctgtgataaacactaggtcagggatgcgctatcaccaccttacccccaccatacgcaagcatcacctagagagatcctcaggattctaccccacacagaactgcaagagggcacagtggacaaccaagtggaaactgagttatgagctatgctcccaccctcccaacagtgaggaaactcctctggacttcaacccaatgtgcccttgtattgccctcccttgcctcagcccactcccaacctgaatttagagttgggcttgtgcatttctctgtttgccccaagaaggctccatggcacctgggtccaaccaccatcagccaaggaggacctgaagatggcaggttctggagggcctcaatctcagccatgccttttactccatcctctgtcctttgatacccacccagcccctcctgccccatctggggctgagaaacaggacatatcaattgcagtaaattgccacatccacctaaacagggtgtccagcatgtttttgtaacaccaacacctgtttgtttagtcatgctgggccaggtgtttcagcataaaatacaaattgaattcctcccctcagaagggcttgcagtcagatgataacagacaaggcaaacaactgaaacaccattgatacatactatatggagagatggacatctattccaagacctcaggaggtggagatcaggtgccattgggccccatagcagcactgtcagctggagtgacacaatggccaggaactgaccaggaccccgctcccttggtcatgtgtcaacacagcagggagagtgtcctgggtgtccttggattgcaatcacgagcatccaagttacccagagtctgagcctcagtttccctatctgtgaagttgggagatgattagtaaatatcctcataaagatgttcaaaaattcaaatacacaacaatatctggaaaatagtttggcttcaataaatgttcgttcttttcccttaattttttaattttaatattaagattagtgtccaaagctgttatcccttcttcagataattatacacagaaagcaggaatacaaagaacgtccaatctctgaaccacctcagctgacctgagaccaattttccaaattgtagtaaacacaaatgcatgctctctactcatgccaacgctgcataagtatcagctggatcccagtccacaaacacatgcagtgcagcttcccagggaagtcacggagggacaggagtggagcctcttaccccaagtcctgccccctggagctactcaccaccagcagagacccacccattttcttcagaccaaagacggagggtgggtacaggatccatcaagtccctctgaagaccctcccccacataccaccccaggccacctatggcccacccagggggtcccaatgacagcaaagttagcaacctaccggtggagcatcagggctgcctgagatgttctccattcgcagcaaatgatcttattttctgaagtagcagctttctattgaaattcttcatcagtcgctgtcatggggaatttctcccccttttctctttctttctaactggtgaaattgacagtctgcctacattatccaggcattcatttgcatgatcaaaagcagatttgttccaagatgcaatgttctgccttcccttccaagcacaggcatctccaaggaaggcgagaaaaatcagaaacagagcgcctccgctgtgcccctaagcttggccaggagttggcctcgtctgggagcaggtggagtgggggccctgtgggtagcagtagggggagggcagcccatgtgggagttggaaagcagcacctggcagcccgaggcgctggcacgagccccagcacaggaatatccagtctttggtgacagattatagtaagaggagtatgcaggagtttccagtgtgtgtgtgatttcctgaaaggaggcactgctgccttaaatccccagcactcagggacgggagggtgttagggtctgaacccagggcatcgcggggacctggattcagaaaaatgggtcacaattcttagctttagccacacgatgtaggagagttgctgaactggtctgagctgcagtttctttagccttcaaatggacacagtgagagccaccctgtctgtctcttgcagtgttataagaagcgaaagaggtatctcccaacacccagagagccctgtaggtctcatggctctaggatgcccttgcacactgtaaaccctccaccctggagctatagccccacattacccctcacagctgacgcttacacgtcacgttgtctaattctccccaggggccctgtgagctgggattatggttcagagaaagctgaggatcagaaggactgacttgtcccccccaaaatattaaaatattgtatttcatgactgcattgttataaggatgaatgtaaaccaggctggattcattattacattttcattattattatattttttcttctgattttaaaagaaattagaaagaaaagacttttgtgagttcctaaaagtgcagtgagcccttggccctgagcaagctgtgcttgatggagaagtaagtccttgtcccttaacaccataaggagcagtgaagtcaggagtcattcaagcattaacccatgcagcatctctccaacatagattattcagaggcttctgtgcgctggactctctctaggctttagagggcacagttgtaacctaaacagataaagcttctgactcggagagttcatgttctcatgaaaggacacagatgatgtaagtaaataaagaatttcagatcttagaaatgccctgaagaacactgaagtggggccattgcagaggaggcgatggaatggggcaattactttaggggcagtcagagaaggcttttcggaggaggtgacttctggactgaggcctgagcaatggggagccagcgatggggattgaggtacagagtgggtgcaaaggccctggggcaggagtggtcctggctgtttgggggtcacagggaggtcagtgctaggagatccagtggccagtggagggactgggaggagaggaagtcagagggatgaagaagaccagttatgagatctttcaggccatcagaaaagtgactttattctccttgcagtgggcagttactggaatgtttcaagctaataatagaaggtgattatattgatccactgttttaaaaaggaacatttctggcagctatatggaaaattgactaaggagatgtgtgacccaggaagtagagatcagattgggctctattgtggaaatccaggggttgagctagtaacttaaattagggttgcagacatggtcacagtaaaaaatgatcagatttgggatatatctcgcgttggcagctgactatatgagttgggaattcagtagagaggtcagggctgtagatacagctttggaagaaaaccaagaaaatgcggtatcacaatagccaagaaaagaaagcatttccaaaaggaagcaaaagtcaaatgtcacagagtcaagagagatgagggcagagattgggctcttgtaggtcatgggagaccttgatgagggccatttcagtggagtaacgggaaggaaaggctgattggaataggctgggggaagaggggaagtgaggacatggtcacattgcttcccaaacccaccctgtctccactgaatgatgctctccactggatgcaaacggccacccaggattcacagagcactttgctcattcaccagctgaccccactgacttcaccaagctctgctccatgacaggaattgtgtcatgtccatttggaatcctcagttcctactaggttggtcttcaattcatgtccctctaatgaacaaaggagtgttgtgtctccatctacctcagagctctagagaattctggagcatttgtgtattca

SEQ ID NO: 587873 - DNA, 4001 bp, Homo sapiens
tctctatgtctgttctagaggtgacctcccacccacataatggaacaaaatcaacttatttcatgacaatttgcattgaaaagttgaaggcaaatgagcaagccttggagactgatgttttcatgaggttcgctcaagcatgctgccccctctgccccaggctgagaggtgacgacccaagatgggttcggtgggtgggtgcctccccagcctgcctgggctcagggccctgcggtgtcagttttctagcagtggttatgaccagaggaggaggctgtggccaaagccagtttggagagggtgagaaagagcccggcattctcctgacagcagcagcagctcagccaccctgcacgttgcacgctgttctgagtgtcgcatgggagatagagggctgctgtcctgagagcacatgctctgttccaccttgtcatctggttccacctccttggtcctggggaatattctttttgtttatccctcttgcatttggcttgagaaggagagttacttcactagataaataagagcactaggattgttctgcatctgacttgaaaggggtgtggggtggctgggtcttggcatgctggcttgggggcattggaggccatcagaccacacaagctgggcctgtccattttggaagcagtgagaaggctcctttgtgagggagccacagaagtcatgaaatgtgcagtacctggaggcagcgcaggaacctggctcagtccacttccctgtcaggctcggcagacagggcagccatctgcgccagtgaactccgcccagggcggtgctgcaggggctgctgggaaccatgtgtggtcacccctgcgaggaaatgggacaccaggccccaaatgctaccatgtaaggtgggaagcagaagtgttccaaggtgccccctggcttccctaaccgtccctttcccaagaccccacaatatgagaattatggactaggaatctgaggaaataaaggtcaggccattagaaggggccagcatagctgagtccacagcatggtggatttgatgttcagccttttccctttgttcactggtgttccctcccaggcctctgaccagttgctgagggactctttgtagctttgggagtctaaccaaacctgacatctctccaaaaagctgactttggtcatcactgattaacctgcaatattaggctcttcccccgagaatgcttgtcaccttgcaatcccaccaatgggacataaggtttcctttgttttcaggaagatgtcacaggatggtgcctagcttagaaaagtaacacagatccagctcttgcggggctaagtataaggatgatattatattatgggctgccagagtttggtaaacaggagtctaggtttcagaattggatgggcctggattggaaatttaacagcaaatgcccagtgatgtggatcccattccctttgtgaggctcagtctccctatctggaaaataaagtgattaaaccagctgatcttggagatccatctcaaaatgccaaagatttgacacccttcaggtgcgccgagcacccaattcttttcgtcttttaattatgaagtatttgaaccacaaacaaaactagagagacagatataatgagcccttcggtacccattgccccatttaagtagttaccggcatccaccaccgcccagtctttaccacaggctcttgtagcacagactcaagcatctcaccagagaagccagacttaccctccgggttgggcaggggcctctcggcaggcgcaggggtggatttcatgctgtttcccatttctttctttttccctggggccgctggtgatgcccagagcctgtggtataggagacagacggggaaagtcaaccgtgccctgagccctccaagtggagaatgacccagtttagagagcatcgtgcatcatttttctggcagcttgcttcttgaaaggcggctgtttatatgtgaagatgagattggtgaagattggttacttttgcgcagctcaagttcttttatcaagggaatgacagaaaaaccacagagagggaagttgctagcaaatgctgttggtggcaaaagtttccattcctccgcacccttgctgaggatggtaagcagccacagcagggtttgtgtgagaaaccaagcagcatttcaggtggcccagaaagtatctccactcaggggccctcaccatcaactctgtgtgccaggaatttggagtacaggagttgtgtgtctgtacaaccaaaggcatgaggagaaggtactttctgctgctactttttgtcatccttttgagtttgtcagcatgctttaacaaaggatgaaagaggaaaacttcataacaactctgtggactggctgcatgctgctgaagccctttcacatcaactgttacttttgatcattgtaaagtccttgcatcatgcttaagcccattgtgcagtgagggaaactgagtctcagaaggggtaagtgacttgtatgaggtcacatggcaagtaattgtagaactgagatttgaaccactgatgctaaatctctgggttgctccataacggttttcaagttaaccacccaggcttaaattctggctgtgtacttacaagctagatgacttcgggcaagtcattaaccttttctgtttttgtttttttgagacgcagtctcactctgtcgcctaggttggagtgcaatggcacgatctcggctcactgcaaccctgcctcccgggttcaagcgattctcctgcctcagccttccaagtagctgggattacaggcacacatgccacacccagctaatttttgtatttttagtagagatggggtttcaccatgttgccaggctgatcttggactcctgatctcaggtgatctacctgccttggcctcccaatgtggtgggattacaagcataagcctccatgcctggccaagtcattaacctttttctgactgttttggggaacactaattgaacagtgttgggttatggtcacaaaattaactgagataaagcatgggaaccactttgaacgtggcgtggcatagaatacatgttagttattactctgtttactgattgtccttaatgataaaatttccaagtctggaccttcatacaaatattttggaaagggacatagattatcagagaatagggttttagggaagccacgttccctctggatggtggaagcacagagaggaaggccacattcataaatagagctctgcctgctttgtggggtcaaagagaagagacggaacagggtccccccatcggcctccagcccaaatggaaactaatctcccacctacctgtgtctgcagctcaggatcaaaccttatgaagggcacaaaagtcagcccatccaactcccaccctggccttgagtcctgtctccatgccctatgtgtacaggttctggaaagaagtacactctcagagcaaggccctccccgggttgagggaggtctgcactgctccataatttaagggaaggggtggtgtgaggtgagactcctactatattaagaaacaaggaacaccaaaatgagagttgtttaaaagtccgtatatcttagacatttacatgaacaacttgtcacttactgctcaagctaatgcatagtaatattccgaagacaatgaccaggctcgcaaaagctataaactcatagtgcaccacagaagggttggctagaacgggcagcatgtttaaagtgaagcgcaaatcccatcctttttggatcctgttgatctttgtgactagaaaagaggatgcccttgcaaatttgaggctcgggcccttctttcttcatgcttgcccctaccctcctcacaaaccagaaaaacatgcgcacccaaaatcccagggcctctgaccctggtaggaactttctagcagctgggcaggttctaacagcaacacctgcagtccaggagggcagggatacattggccttgtctccattcctgagc

SEQ ID NO: 587874 - DNA, 4001 bp, Homo sapiens
aaagtgatagcactgagaattgagaagagcactggcaattgaattacaggctgtttctgtaggaaatacattcactataaagaaagaaagaaagaagacagaagagagatgaggttgaagagctgaccctgtgttgtggggtaaacagtaatgcctttggtgggttaacatggaagacaggagaaagcttagctctgagggcagagatgccacatttactttaaaacatacttattttgatgtgctaatgaaatttacaaattcattcaccgagtgagaatttgtcaaatgtctgctatctgggtgttccttcttttaatacttaggatatatcataatcactaaataagttttctattgctctgtctcatttaggagaccactgaaagtatcatattgacatcatagcctataaaacattctcaaaccaacacagttgcaaagttgtctccttcctctgaacttctgtattatcatctccaccactcattgagtacttagcatatacgaatgtgtgtgtgtgtgtgtgtgtgtgtgtgtatatatatatatgtattctctaccccccaatgtcagatttttaattacattataagtggcttaagagcaggtatcattatagttattcttttactctcccacagtgccctacccagagtaggaattcagtaatgctttaattgttagattaggaaatttcttttccttttatcttgtaagaaaaagatacatcttttcttagccttgtaaactagaatgatcagtaacatttcacatccagaacacatggctactgtaaaaggagccacagaagctaaattggccttggactgtggaaaagacagctgaataacggcaagagctaagaaactatttaacatcccactttcaatagcaacagttttacaaacaggaagaggcagcgtacaaactttagcaaaggagtacccaaacagcaaacccaaagcaggaactaagagacccaacagaatcacctctagattatctgtttttaagaacactaatcccactgtgaaagtcaaataaattcctacgaacattaaaataaaactcagaggtctaattattctctctaagaagcttgctttttcaggtattctatgcttgatgactattccaattgatactggcacaagtatgaaaaggagtgttgacacaattttagaaacaggaatatggaatgtacctgacaaccctaatatcctactgtatatataagaattgacaggcatcatgatcagagccaataatgttgatgtgcaagtcatcaaaatggccaatgtgaaatctccatctagaagcagagcaaagagatagcccccaccccctcctgggcacgtgcaggtcattacaactccaaaagcttgcgcctcaggcaatgccacaatctgagacaaaagaaacccgcaaaatggcatcagaaaaaactgtgtaactgccccaagaattactggcaaaggtctcttccatactgtttgaaacagctgtaattcaatcttacaaccaaatgcacacttattcaatagtattagtggtaaaataagcattaggatatttctatcaatatgcattggtgcctggagtagactgtctttttgtttgagcactttgactttcacattcttgatttcttcaatgagtctttcttgcctaccttcagaatcccagagttgaatagtcacatttgtttctccttcttcatcagtcaccagatttatggtaaagtttgtagcatctgatgagatcttcttggccacattcaccatttgtagtattttaggatcttctattttcacaaagaggtggctggaattaggccgtttattttcgtagcttgaacttacaaggatggtttcttcagtctttgtgaaaaatagtatttcagtcttctctatattcagaaaactgagcgatgacatccttgcttcttctatagtcacaagcaacaaaagtagaacaataaaaagttttctaatcattttgaaagctgaaataaatcatatatgcaaaatcgtttttaaaaaatgaaagaacattcttcatgcaggtgttccagtgacagtctgagggtgagttagataacagttgtttttgtaggatcaaagtccagtaggagggactgctgtacttttaaacaaatatatagccatctaagcagcaacacaaccggtttaacttgtgattaagacaattaaaaagtcatggcatttaacagattcgatttatcacaacagaaatctaatctcttcctcttgatttcctcatttctgcttatgcgaaaaaaaaaagcctcctatttacttgaatttaaagcttagtgtcatcattcgttagttatttcttgctaaaaaaaaaaaaattaaaagcagtcaggatcaagaaatctgtaacagacactgaggaaacctagagttcagtgttaccattttgttcaatcaagtcgaagtcaaatcaatattcactgaatgtctctttgcctagggcatggaattgggagctggccatcccataatgattaagccagatgcagtcgctgctctcctggagcttagtggggtgacccaatatcacaagttagaaaactgcagagcccagacactggccttggcagcatcccttggctgctaatagttttcctgcatctctgaaggatgatttaatctgtcaagcaaaaactgacactgttttttgtatacctaagtaggaaaaaaaattcctgaatggttaccagataacttggggacatagggaaagtaggtagctggtgccacggccaaaggtacaggctggttaagggaccacagctactggacacttggaccctgacacgatggggcaatggaaagacactggcattgattctaatcttttattccttgtttgtaacactactctctgttcacagttaggggcaagggcattcaattgacccaatttggtcatatcccttggttgccaggaatgagaaaaagcatcaggctttttggatttcaacccatagactcacacacttgtatatttcccacacaaggggtgggtgtcctgatgctaagcagcaaaccaaccagccgaccaaccaaccaaccaaacgtttactattaagcctacagatgtagtagtctctgaacacatgaccatttcagcagctctttcatgtaatcatgatgcaatgtgttcaaggtaatgccaatttgtattaagtattttagatcatttgttcctcaaaaatgtgaaacctttttgtcattttaacgagttttataaaagtataccatttatgtcggttaatctttcaaatgcagtagaccttaggtctcataaattttattaatatgtaccacattaagaaaaacaagatccgctgtaccaatggtgaggatagggaatgggactgttcattgatatttcagttaaaatttccctattttaactgacaaaaacaaaacaaaaaacaaaaatgtcataaaacctaagttatctttagttatgtgaccaaatatcttgactcataacttttgttgcctaggtcgaagatgtgagtatatcagtttttctttccccttaggactctttctgcaacccttttagttcttcggtttctccaggccctttcatttgaaaaccgtgaagaacaaagcctgacaaatctaggaaaactttgataatctatcattcatctatataagtgttcttctaaattttcatggaaaatatgtattataaaaaagtgtgtatgaatttcaattttttttttgcaccagaataaactttttgtaacatgtctgaacaggatctagtgagggacactaactatgataagacatttagaaaagagctcttttatcagagaaacataaattctgctaaaattgaaggaagaacacacatcaaatttatggtgaggtttgggtggaagaatggtgaaatcattgatgcttcacataaaggttatggagacaataccccaaggagatctgcag

SEQ ID NO: 587875 - DNA, 4001 bp, Homo sapiens
gccttcctggtaagcatcgcttactagctatttatgtctggatttatatctagccattaatttcccttgaatttaatggctaggtataaatccagataaaaatagatgctctacagatcacttaaccctgtgtttttcaaacatccgacatttatttgcctatcaccttgatggtttatgtcatatctaaggactacctgtactatcatttacttcatctttttcctctagatccactcttttaaaatattgagatactgccaggtatggtgggatgtgcctggagtctcagttacttgggaggctgaggtgggaggatatcttgagcccaggagtttgagtccagcctggactacatagcaagacccctaactctcaaaaaatttttaaaaccaacatagatattgatatcatgtttcaaaaagttattttatgtggcatgcaaaaaaagtatgacctttgttctaggtgctaccccaaaatatttcatgtggcacagtgtcacttgggctgcccactgagaaacactgatgtagaccaaccttcatctcatagacaagaaatccgagcctctgaaggttaggagatttgtttggggttgcacagttagtgtcaaactgggatgaaatcccacgcttttcaacttgccagcttatcctctaccatgttcccttgctctgtggttctagaagcacgctcattcttttgtttgagctacaaacccctgatcagaaagatgccttcatctgtgaaaataaaatattgactttcatgattagttctctattcaggatttcatatcattagtcagcattaagtcacagtaccttgtcaaacttcaagtaataagagtttctggggagaatttcattttctttgacgtggcttctgttgtggtatcaacaatatcactcatttaaattttaaaatagattaccatcatgaaatctatcaggccctaaaaattgtatactctttgacttagtaactctactacaaggaacccatcctacaaaagaaaaaaggtcagagatgcagccaaagacttatactcaaaatgatcaattgcagaattatttttcttagtgaaaaaagtcaaacatgttaatggtggattattaagcggctcttaaaaattatattttcaaataattttaatgatacagaaaatactattactataacgttaagtaaaaaagggaaattaaactgtgttttcaactttatctcaattgtctaaatataaatatatgggcacatttttgagagagtagagagatactcaaatgccagttatttataatcaatgacttcagttatcttctgtgtatttctaaatattcaataatgagctacttttgtaattaaagaagtaaataattttaaatgattatcactgaaattcaatagtcagcctcaggtgttgggagtaccccaaacactgaggtactctgttctaagcccagggctggaagaaccctctcactactacatattaacgtgaccaaggtcctaagtgaaccaaattctcagttaagttttaaccagtaaatgcatgcaattacttaagatccttcatttctctatataaaggaggtatttctgaatacaaattgacttaggatatgtatggataagaataaaagacaagccatggaaaattaaaaaacatagtgagtgaagtaagtactacaaagagagagaaacacacacacccaaatcccaaaacaaaaacaaacaaaaccaggaatttgccaacaaatcaatagtaaactttacttaacagtcaaaatcctctgacagagacacaaatcacaaggaaagattaaatttgtccggagagagaaaaatcttaccttggagcccatgttggtgtgaggcactcagtgaggtattggcagctgttagcaagacagcagggacactgttctctgaacgtggatgtgctgttggatttattgcctcctgttatctgaggattctgtgtatgtgtgtgtgtgtgtgcctttgtccacaaagatttaattgcaacctccaacagggttcattcagacccttagctccctgcgtcaaaggcaggaaggcagggctggagaggataaagagagggcagatattagcctaagcaaagaggcactggactgtactgttttgcatctgtgcttatctatcatcgaactctttaactcttgcctgggtctgaatacaaattggaagccaagatggaaccagtgtgcagttcctgttccttgctacttagtcaaagtggctccatgtaccccaattagcttcctggaaagaaacaatgtatgttgttctcaagccataaaaacccaacatctgtggcctctgtaaaggcttagattatgcactgtgtcttcacatctcaatactggctcagtgcctgatacatggtagcatccaataaatatttcttgcatggatgactggatggttaactacaggagaaagtgcagttccttgtgggatcttgagaggctctaatgatctatattattctgacattaaaccattggtggctcaaagaacataagcaatttatgaaaaagcaaatacactttacgagcaagagcagtgcagagatttcctatttgtggaactggtgggcccctcctaattgtgggaattaactagggaactttcgatttaacgctaaaaaaaaagaaaatagttttttaattttattttttttatttttgagacagagtctcgctatgtcacccaggctagagtgcagtggcatgatcttggctcactgcaacctccaccacctgggttcaagcaatcctctaatctcaacctcctgagtagctgggattacaggtgcatgccaccatgctcagctaatttttgtattttcagtagagacagggtttcaccatgttggccaggctggtctcgaagtcctgacctcaagtgatcctcctgccttggcctctcaaagtgctggaattacagacgcgagccacagcgcgcggcctagatggaaacagttttaaaatgtaaacctagagcgagaaatagggataggaaacaaagacatcagcagaatgtattcatcgctatagtttgctgctgtaacaaattactacaatctggtggcttaaaacaacacgtatttagtatcttgcagttctggaggtcagaagtccaaaatacatcacaccgggttaaaatgaatgtgtcggcagggctgcattccttctggagattctgggggatggttgtttccttgccttttccagcttccagagatctcctgcatttcttggctcctagccacttttaccctcaaagctagcagcaatgcatattcaactctccctctgactctgagccttctgcctccctctttcacttgtaaggactcacgggatgaccctgggcccacccagatattccaagatcacctccccatctcaagatccttaatcatatctgcaaagtcccttttaccataggggactaccaaggcaacatactcacaggttccaggattaggaggtggacatctctggggtgccactgtccactccctacagggagcatggcacactgccccccacttacatgcagggcctgtggcctgagcctctagggaatgagggggttagggccaaaagatggaggaactgtattaataaagatatttgcaagactctgggcataaggcagtatcctttttggagtccaggtgacaattctgccaccatgccctccaccctaagtacagtgttagaactctgagggttgacagcctccggcatagtgtacctgtgtccaatagagggcgctagagggagagggcttgggtagagcagcctcacaggaatgttccgagacagcacctaactggggatgccccccaaaaattgggaaatcatgattttgggaaattgagggcctgggaaagcaggtatagactaagaatcatcacatgttgggcaataataagaataacagcaacaataacagtagct

SEQ ID NO: 587876 - DNA, 4001 bp, Homo sapiens
gtttatgcgcattttagcaactcatcataaagcacatgcttcctagtagtagaaaaacctacagaaacgtctgtgaaattaaacaatggataaattcgaatcagcttttctcttttgcaggactaagaactacaataggtcaagtgaatactggtgtgaaaactaatacccaactacagtgtacctttaaaaatgctccactgagattctgatggtgccttattaacaattagaagtaagaagtaatagcaataagtcagaattttttggataaaaatatatattatgaaggattaccggagcaaaaccccttttactgctgaagatgacattagaggcttctgttatcattataattcatctgggcagcaaatttctcttcagctcaataaaaactaagtatgaagtaagtttctttctaaaaatagcccaagaactcagtactactttcctttcttacactcttttcctactaaatggaacactgaagtatttcctttcattgttgacactttatgtcatttgcatttaaaatcagacaatacataataacaaagaagtctttaactaaatcttttcaaaatgggaaaatggctttcacaatactaactgtggacctgcctccttccttgctctagagatgacaggcatagatagctggtgagcacctatcctatcgcctaggagaactgttttattaataacaatattcctaaagctgatacatttacttgctaattgataaagaaattcctgcctggttctctgctgtaagcaaactgtttggcttgaggtcagtccacattgaaaacacacttctaaataagcaagatgattcaaatttaatttaaaatattcaatatcaaaatcttttgttttcttcagtacaaatttaagttggtaataatgtgttagatgaactgcagttaaggttacagaatcccatggcctttggttacttttgataactaactcagtctaaaagaggatgctttaaattattctctaaaaccttcttcctaaattaattttttaaagtgcttctctttaggcatatatgggtttattttttaagcacaaaatcccccttaaaaggataaaaaactgtccatctatacattcaagaaaattacatttgacactccattatttctacaaaataaacttgtagcacagagtataacaggaattaactttcaacatttttttctcaagaattaggttaccatagtagaaaacaaagctcaatgacacaatacaatgtttctgtatttacagaaaccatatccattaatcaaatattttaacataaaataataatctacagattgcttttgcaaaaataagtaagaatcgaaaactttttcttgggcaaattgaataaggcagatttattgcagtaggagacatttaaagaaaaaccttttgccacctctcttagctttctctaacgtaccaacctgaaagcttccagttttcccaagagataaacattactatgacggtaacattaggaagatttaaggagaaaagaacaaagagaagtcttaaaattccacccagtacttacaagtagtttccaagaaaactgagccacaattcttcagaagactgctctcctgatcacaaacacaatctgaagtctaaaatagatatcctaccacattaggccgagaagtcacatttcagcttgctaacttctacttttacaactcatagaactaaccccggctaaaattaactgcagccaagcagcaggcaggaacacgctgatttgcatcatgtgtgccgggatttattcactaggacaacatcggtgtcctcttaatgggaaatgcggccaaggggcgtgccctggtgaacaatacatagcatcatgattatgctaattactgaattcagtccaataatactaacttcttttaagttgtttttgcaagtactgacaaagagaaggagtaagctttttcccaacaggcattcacttgatttttaagcacattcaaatcagaccaaactttggcaacaaggtggcagtgctgtgtgctcttcacaagcaaaagcaaagcaaaaggacattctgtccgattatttaaacagcgtgattagatgcagcactacgtgaaattaaatagacacagaatatacatatcagtaagtctatccaccagaatcctgaaataaaagctttttctttctctataatgaactgattgcagggacttgctttctggctctgcctcctcctgcacctcccaaggagtcgctatgaagacacagattcagtaataaatcacaactgagaataaacatctcaaatatttgcaaaggcattgtccttggcaagaagcattttaaggtggatttaactccttggctagaaaaattgtcctctgtaggtgactgaccatctacaaagcatgttggaactcaagttaacaggtaaagaccccaaacatacagctgacacttaaaagaaaatcagaacatgaaaaactttctctcgaaaatataagtacaacttataacaaagacacaaaaccgcttagtatctactcaagacggtttgggactagtttgctttagactaagttctgatgacatattttgctcttattgaacactctatgaaagatatcaaagcactttacaaacatcaatcaaatctccaagcatctttgggagatgtcattttcctctttttttttttttcccacagacaggtaaaagacagggtaattccatttcaacgacttcaaccaaccctggatcaccccatctcctcctgagacctttataacatcttccgtattaaccacttacctataatcctatagaccttttcagagccatttgttttcctcattttaaaatgtcatatgttagtttggacttcaggagattcactctacttaacacccagatgccaggcctgaaccccaggggcttaaaaagccctccttgactctctcttgcagacaggtatcctgcaacatggatccctaaaacatggcgatgccctcaggaggcactgtccatctgcagcctgctgcccaaagcacaaaccggttgatcttcattggtgtgagttggacatcaccagcacaatctccctcctgttgtttacaaacactgctggctgctgatctgagattgcatcccctcggcctaacctgaggctctgtgccagcacctgccccacctctgcaagagggtggctggtatgcattccccttcactccaacccagagtcatgggaggcaggcatttcctgctctgtgctgaaaggagagaagtcagcactcatcaaagatggctagctgctaatgaacagaattattctcaataatccactgcaaactcactccagaagtcttaatgccaaaaaggaccttgtaaggctatttttgacacgatattctcatcctattatgtcatagttcaggacaaaagtctctaagccaaaatattatttctgccctaaaccagaaagtaagaaaaagcaaatacaccaagtgcatttctgcatcagagtttgtattggaaaggagcaatctgatgtatgatggatcctacatccattcattggaaggcaggggcccctgagcaatgctccggttcctcacatgtcagatatgcctagtatgactctgctgtttcaacagcagccacacctgttccacagtggaagaaccaaagcattccaaataaaagagtctcctccaatttacattagtcattctgctgcttccttttcattagtgaaactacttgagtcaacagtgcttttgttctaggtatacttatgacagtagataaaaatctgtatcagagtaccttgaaaagcagagtaaattcttcccatttgttctcattaatttttggtggtagaggagggacagggaaggcggtgacctatgggatctttagttcaacgaatccatgaaattaaagaaaattactatgtttatgaatgtccactaatgaatgaacccagatac

SEQ ID NO: 587877 - DNA, 4001 bp, Homo sapiens
acaaatctttcacaactagctacaatgtaaataacatccttaacatttaaatgcccagtaaaactgtgctagactcatcaacaaagtaatagccagtccactgttttttatttttttagtttggtattggaaaattagccttgtttcattatgtttgtttacccttaattaggaatgtcacttagaaattaaatatggaaagagggggccatttaagaaaggaccattagggctttctcaatatttacctttttccaatgtcctagcatagcctgttcactgggtgacaatgttatataatagaaactctgataaataagagacacggggctttggaaactattcagcacctaaataaagggactaattgtacttctatgaatttttaaagccatcttccaacttgaaaaacacattaatttactctatgggtaacattttatattgccaacactcttattttacaaaggcataaacaagcatttaatgcacacgtttgcccggcgcggtggctcacgcctgtaatcccagcactttgggaggccgaggcgggcggaacacctgaggtctggagttcgagaccagcctagccaacatggtgaaactccgtctctactaaaaatacaaaacttagctgggcgtggtggcgggcgcctgtaatcccagctacctgggaggctaaggaaggagaatcgcttgaacccgggaggcggaggttgcagtgagccaagacagtgccattgcactccagcctgaacgagagcaaaaccccgtctcaaaaaaaacaaaacaataacaataatgtacacgtttcacatttggacacactgaaatcaaactcacgtattcaaatttttttagattaagttacataaagcatgcacaccatttggcacaggcccggcaaacaatcagtactcaacatcacctgttattttcctgattttccaactttagagtcaaactaaatgttatagaattatatgtatgattatgtatatacaatatatataaatacatataaataccgtaaattaagctagtatgttattgcgtaaagtaatggtcttaccctagacgaaggtgagtttaattgtaacagatgaaacaaagaatagaaaacttgttaagaagtgttcaatgtaagctctcatctctgcagggtttcatgtgacttataattaccagtcagctggtcctagagaacttaatcaaaatgtatagtaaagacgaactacgtggaccagtggccatttatctgcaaggtggcaccagccactgacatctgatcacttccatactgatgctgaaatcctatgcaaattcattacttaggtcaagctgggaaacacttctgtcaagtcactacacaattaaataaaaatacccaaaagggacttacactgacaatgctatagcatcctggccatatccagttttgaaaacactacggtgtcagccacgcaccatttaggacggggagaatggaaagccagtttggagaacagacgctttcttaagagtacacgtgaatatgaaaagggactctatgctctcaagaccaaaaaagaaatcctctgcgccgcccggctacattgcgcctggtgggacaatgtacacgacccctcccccgccgagtcccaccccaagcgcgcacagcggagcaggaggcgcccggcactcgcaggtaatgcccggtccctgccacttccgtcgagttttcgcaaaggcgccgcacggcaagcgacggccaggtccacgtgggccagcaggcgcgggggacgcaacccgccgccgccgcgagccccgccggcgccgaccagccctggcccccacccgcgggagcccgggagtcgggccgggggctcgcgggaggcggcgcgcgcagcccgggcgggggtcgcggcgcggtaggggaaaggagcccggctccactcacgcgcccgggggcggcactggggccgccgctgcgtctctccggctcaaaaaactgaaaaggggaaaggaaaaaaaaaaaaaaaagacctggctcctcgtttcatccggaaaccgaccggccggcaggaaatgacgaaggcagagggcgtccaggtccgctcggtaaccgtttcccgcgcgcccggccccgactccggggtaaagagccccggagcggagcagcgctggccgcgtgccgcctccggagccggcagcgtgagtggccccgcgtccccgcttctcccggtccccggcggggccgcgtcacccggccccgccccgcgccgcccgccccgccccggacgcgggggtaaggggggtggccgcccgcctgccctcggtcccgtgcggtccccgaaactccgagcacccgcccggtcccggcgcggagcccctcggcgtcgcgtggagctgcgagtcgcccgcttccggaagcgcacacgggccagttgcggcggcccatctgccggggcggcgggggctcggcgggagggttgaggctgaatcacgcgcagcctgcgggcggcggaaacgtccctagagcctcgccgccctgggacccgggctgcttcctgggagaggattacattttctccctgctccacttgactttcttccggaaggagcaggtctcgcaggatcggggccaagactggaagagttcaggtttgggagtcgtgtgtataacagccccgcgcctccacgcccaggcctgtgtggctttggacaagttatataaccaccgccgccaccccagtttcttctcctgtaaaatggagctttagtgccgcccagcagggttgttgggataattcagtgactctgtggactgcccagcacctgtgaattgctttcctggatgttgggtgaaggcctgtgagcttgtatgtaccctttggcttcagaataccaagcctttagtgtttcagagggatgagagaaagaaatcccattttttgatgcagaggattttgttgtaagggactctaggaactaagtggttccaatgtgaatttgtatcaaagtaacaaagttctaagtgagagacaaaaatgataacattcaaggcacgatgacaagcggtggtcaattttagaatcacctagacgtgacatcaggaacccaaaatcacgacacagattttaaagcttatgatacagtgacctagtccctagaaaaagtagttctcggctgggcacggtggctcacgcctgtaatcccagcactttgggaggctgaggcgggcggattgcctgagctcaggagttttgagaccagcctgggcagtatagtgagacgacccccaccccacccccgtctttaaaaaaaaaaaaataagaattacccaggcatggtggcacttgcctgtattcccaactacttgggaggctgaggcaggagaatccctcgattctgggacgtcgaggctgcagtgagccgagatcgcaccactgccctccagcctgggtgacagagtgagaccctgtttttgtaaaaaaaaaaaaaaaagtagttctcatcctaaaagtttgtcaatctaaaaccaacccctagttgtaatatattggcaagtttatatactcttgtttacttgagacttaattcagcccatcctagcctctccttactgaaatagttcaagcattacattacaggaaaatgtgaaaaatggtgtcttgctttagattccagaggaaggctgtggtggtatgcagtaagcacgcagcaggtgtatgtgtgtacacttggttacactgtggcatgccggggaggaggggacggggtcatagttcaggctgcctgtgggctgtgggtctgtactgtgactcaggaccagagcactccttactcctggcagccttataaagtcatgccattgatcatgattgaggactgggcgggaaaggcctcccctctgcaaatctttcacaactacactcctaaaaataactcaagtgcatgtgcctggaagcgcagaagagtgacttcatgacataccaatcatgttgtataatataggttgt

SEQ ID NO: 587878 - DNA, 4001 bp, Homo sapiens
cccgggaggcggaggttgcagtgagccaagacagtgccattgcactccagcctgaacgagagcaaaaccccgtctcaaaaaaaacaaaacaataacaataatgtacacgtttcacatttggacacactgaaatcaaactcacgtattcaaatttttttagattaagttacataaagcatgcacaccatttggcacaggcccggcaaacaatcagtactcaacatcacctgttattttcctgattttccaactttagagtcaaactaaatgttatagaattatatgtatgattatgtatatacaatatatataaatacatataaataccgtaaattaagctagtatgttattgcgtaaagtaatggtcttaccctagacgaaggtgagtttaattgtaacagatgaaacaaagaatagaaaacttgttaagaagtgttcaatgtaagctctcatctctgcagggtttcatgtgacttataattaccagtcagctggtcctagagaacttaatcaaaatgtatagtaaagacgaactacgtggaccagtggccatttatctgcaaggtggcaccagccactgacatctgatcacttccatactgatgctgaaatcctatgcaaattcattacttaggtcaagctgggaaacacttctgtcaagtcactacacaattaaataaaaatacccaaaagggacttacactgacaatgctatagcatcctggccatatccagttttgaaaacactacggtgtcagccacgcaccatttaggacggggagaatggaaagccagtttggagaacagacgctttcttaagagtacacgtgaatatgaaaagggactctatgctctcaagaccaaaaaagaaatcctctgcgccgcccggctacattgcgcctggtgggacaatgtacacgacccctcccccgccgagtcccaccccaagcgcgcacagcggagcaggaggcgcccggcactcgcaggtaatgcccggtccctgccacttccgtcgagttttcgcaaaggcgccgcacggcaagcgacggccaggtccacgtgggccagcaggcgcgggggacgcaacccgccgccgccgcgagccccgccggcgccgaccagccctggcccccacccgcgggagcccgggagtcgggccgggggctcgcgggaggcggcgcgcgcagcccgggcgggggtcgcggcgcggtaggggaaaggagcccggctccactcacgcgcccgggggcggcactggggccgccgctgcgtctctccggctcaaaaaactgaaaaggggaaaggaaaaaaaaaaaaaaaagacctggctcctcgtttcatccggaaaccgaccggccggcaggaaatgacgaaggcagagggcgtccaggtccgctcggtaaccgtttcccgcgcgcccggccccgactccggggtaaagagccccggagcggagcagcgctggccgcgtgccgcctccggagccggcagcgtgagtggccccgcgtccccgcttctcccggtccccggcggggccgcgtcacccggccccgccccgcgccgcccgccccgccccggacgcgggggtaaggggggtggccgcccgcctgccctcggtcccgtgcggtccccgaaactccgagcacccgcccggtcccggcgcggagcccctcggcgtcgcgtggagctgcgagtcgcccgcttccggaagcgcacacgggccagttgcggcggcccatctgccggggcggcgggggctcggcgggagggttgaggctgaatcacgcgcagcctgcgggcggcggaaacgtccctagagcctcgccgccctgggacccgggctgcttcctgggagaggattacattttctccctgctccacttgactttcttccggaaggagcaggtctcgcaggatcggggccaagactggaagagttcaggtttgggagtcgtgtgtataacagccccgcgcctccacgcccaggcctgtgtggctttggacaagttatataaccaccgccgccaccccagtttcttctcctgtaaaatggagctttagtgccgcccagcagggttgttgggataattcagtgactctgtggactgcccagcacctgtgaattgctttcctggatgttgggtgaaggcctgtgagcttgtatgtaccctttggcttcagaataccaagcctttagtgtttcagagggatgagagaaagaaatcccattttttgatgcagaggattttgttgtaagggactctaggaactaagtggttccaatgtgaatttgtatcaaagtaacaaagttctaagtgagagacaaaaatgataacattcaaggcacgatgacaagcggtggtcaattttagaatcacctagacgtgacatcaggaacccaaaatcacgacacagattttaaagcttatgatacagtgacctagtccctagaaaaagtagttctcggctgggcacggtggctcacgcctgtaatcccagcactttgggaggctgaggcgggcggattgcctgagctcaggagttttgagaccagcctgggcagtatagtgagacgacccccaccccacccccgtctttaaaaaaaaaaaaataagaattacccaggcatggtggcacttgcctgtattcccaactacttgggaggctgaggcaggagaatccctcgattctgggacgtcgaggctgcagtgagccgagatcgcaccactgccctccagcctgggtgacagagtgagaccctgtttttgtaaaaaaaaaaaaaaaagtagttctcatcctaaaagtttgtcaatctaaaaccaacccctagttgtaatatattggcaagtttatatactcttgtttacttgagacttaattcagcccatcctagcctctccttactgaaatagttcaagcattacattacaggaaaatgtgaaaaatggtgtcttgctttagattccagaggaaggctgtggtggtatgcagtaagcacgcagcaggtgtatgtgtgtacacttggttacactgtggcatgccggggaggaggggacggggtcatagttcaggctgcctgtgggctgtgggtctgtactgtgactcaggaccagagcactccttactcctggcagccttataaagtcatgccattgatcatgattgaggactgggcgggaaaggcctcccctctgcaaatctttcacaactacactcctaaaaataactcaagtgcatgtgcctggaagcgcagaagagtgacttcatgacataccaatcatgttgtataatataggttgtataattcacgttaaaattttaccgttctatgtcagcagtaattagaaattttttcctaagtgtaattaaagacctgcatatttggggcaggaggaagtagcgcttttgagtaggaatataccatttactgagtggcacatgaacagaatcttgtgaaaaattaaagtaagaaattaacctggttctgatccattttgtcattagaaaataggaaacattttttaatttgtcagataaatgacacccgtgaaatgttctagtggccagtgctgtatggttccccgtttcttgcctaatttgttaataactctcaatcctgaaagctgcctcccttgctgcataattgtcctgggccttctgcagcatctcaaatcagacacataaagtcatcttttttttgccaaacacggtggtggtggttgctattttacactttggcaccaacgaagtttgagattccataaattataaagacagttatagtgtctgggcttccaaaagtttccatgtctaaagtaggctgattacttactataaaccataaagttacattcagaggaactctggaatttagttttgaggaataagaattgaaactctcaatatgtcaaataccggccgggcgcggtggctcacgcttgtaatcccagcactttgggaggccgaggtgggcggatcatgaggtcaggagatcgagacca

SEQ ID NO: 587879 - DNA, 4001 bp, Homo sapiens
tccaatgttcaaaccattgtataacaggtacttatagaggtaatacggtgaggggttaagtgccagagggttccagagttagattacctgggtttaaatcccagatccatctttacaaacttgtgacttgggcaagttagtcaacttctgttatcctcatctgtatagcagatatcataaactcacaggattgttcctgtgaatagatttacaggataataaatgagataatgcatctaaagcatagttcactgccttgctcctagtaaatactcgataaagattacttgtcaataacataattatttgtgcatgcatcataaaacttcatgacattatatgtctttgtggtgttttttctagagataatactccataattttcgatgattttccttcatagaacgggttcttgcttcctctccagctgtcaaaatattagcccttctatgggaaaccccaagccccaatcttccactgaaccttaaagatacacatggccatcagtaatgtagaattttcttaacggtttacctgtatttatattttgtttttgtatttcttgattttatgttgtctagaattaccttttatatgactaagtctaacgcctacaattaaattctaagttccctgaaggcaagaactttattagatacttctgtagcccatacagcagtctacaaatattaagagaatataaatcaagtgaactgaattgcctaatgctaaaataaacaacttctgtagatttaattctcaaggctgaacttaacttgtaataactttatttggaaactattttctgcaatttcagttatcaaagatcatctttgaaactctttccagactttagtgttgagtttaacttctaaaatgctttgttaatttcaacatactcaattcatctaatacacttaaaatagtatttcgattctagctattttttcacagaaacttgtaccattctacaaatgccaaaaaacaaacattcaagagaattctattctaaatctactcccaaccattcgctgaagattacgccctatcccaatactagtcgagctgccaaaccacgtgggtatgctaagatttcaaagttcctccaagagtgaatgatttgcacgtgtgaggactaaaccttaaaatgtgacaatcccttctttattttacaaatcaggctttgaatcccatcttctctgccaatgaggatgttttttctcagacttctctacatacatgccccctctcttagtcttgaggagcggggaagatcgcaggccgacccctccaccaagcaccatttcctcaaatctagttcaggttagccaacgcggacagcaacgctcccttcaacgctcctcctccccctagaacggaaaagacggaggagatccagttcgggctgacagtgagaggatgcagcccggtgtctgggcgggctcttaccggcgaagcggatcttcacgaggtcgagcggatgcagcgcaaggttggataagacgccgccgctcacgcccgctatcaggttctcataccggacgtggcggaataccgtgctccacgccgacgacccggacgccgactggccctggcccgtcataggctcggggcccgtcgacaccacggcgcccagggccgcggaggtgggacgcgatgcagtggccgccaccgtggcgacggtcgccccttgtgagcgcaaccccacctccgggaccaacgagaggactcttatgcccaaggcgcgtgagcgaagccggagactctagtactgagggggcaagaacggggcacagacactacgtcacgccggcggaaagcgcgatggaggggaggtcccagcctctcccgagtctccgccctgcctcgcccacaaatgctccagcccacggacgcggaagcgactgcacagctaaagaaccgccccttgctaacgtttgccggcaaaactacggagcggcgcaggatccagttgagccagcaggccgccgctccgcgagtcacgtgactggaagtagtctgggaaaagcggaagtcgcctgtgggaggaggtggcggtgggcggaactcctagcggacacctcgtggagtccggccggaagagcaaccgagatgaaggtgaagatgctgagccggaatccggacaattatgtccgcgaaaccaagttggacttacagagaggtaagataagttggtagggagaaagggacggtttccgcaagtcgttgggtctagcctcggctttcgcggagtaaagccgggggaggctggcactctggtctggttctttctcagttacctttcgctaaggcaaactttgtgcttacggagtcgctgcggaactggatggatagcaagtaaagtctgttcaagtcctttttctaagaatttcctctagtggtgagtgggaaacagttgtctatagtggagaaaaattccagctgctgctctgggattgtcttcaggttcctattactgaaaagtggacttgaatgagccaaactcgtgggttgaagggctgagagttaaacaggcttttaaaaccttcctactgctcttcttgccgctttactacttcacattagttgtggatgttggaagagacaaagatgaatttaaaagcatcagttttctcttaccatcccttaagaagtttgatgaaagaatggttaaatgaaattaatttatccttcctggtctgttcccccgttaacatgctaaccacttataaattgtactttgtgatacctaaatgacaagggaccaaccatgcgtaagcagattgttctaaataaagagaataacaggagcaaaggtcttcaggcaggaatgaacctaaggcatagaaagaagggctgtgtcattagtttgaatgaggagtaagcgagatgagatgaggcgaaaacagtatttcactattttggttgagtaggagatattatcaacatgtgtgtgagcattgctaataagtctctgctcaaaagatgtttacagtttgtcacaaggcagtaatgtttctaaaatataaattagatttgtcacttggatttggcatcgttcccagtccttgaatctctggtcccaccttccttgccactttagtcagtcactacgtttcccacaagtggtttagtattcacccttgcaaatctcagtgcgtttcagtcatcttttttaaggcctcctgtggcacacacccttacccagtttagccgctttctctggaagactttcaccgaacagtaatctgttcctgcttacctcctgcatgagccccgcccccttcagcacccgtcttctgtgattctatcacttcttcacagtgtttatcacattgtctcatgattattattttggttaatagtctttcccatcagacttagcctccaaaaaggggaagaatcatgttcgtgtatgcactgttaagacagcacctagcacatagttgctttaataaatgtcagtttctccatctataaagattcatttttgcctacatgaagagatttagaaacaaaatgatctatcttgttggggtttttaaacttctgttgaaattattaaaatgctaattttagttgtaggaacagctgctgacatcagagtagatagaaattttctagacttcaaaaataatctttgcaaaactgatggatgagactgaaaattaaatatattaaataaacgtggccaattatggacattatcattttgggtatgctttctttgtgaagtacaggcattctgcactttgcacagtaccatattaactgaaccagtcccactctttaagaggtttacagtgattgaaatcacatctgttaaccacgaaactttgcaaagtggggaattgattccagtatgcaacccgtcccgttaatacagtacagtgcgaaagtgagtactgcttgaattttttttataatagtagccattaaaaccaaacattgaattaagctgaaattagaacctttaaatctatcacagtgttgaatcaagat

SEQ ID NO: 587880 - DNA, 4001 bp, Homo sapiens
ttatttctaatcctaaaaataagctaaaatgatgctctaaagtgaactcactgtggggttcccgaatagaacattcatctcaagacaccagtaggactagggcctgctcagataacacctccctgctcctaactttccccagactctgcccagggcagttgagacaacagcttcaatcatggagaattttattacatttgagggattctttcccatacaaatgccacctggtatcagtccagtgtctttcctggagatgagaaccattcctctaactccccactgggacactggagggacatatgggtgatggctcaggcttaggtccagcagcaccttggaagcccatgtctttcctcactggacttctgcctgtccagacactgactgctggctccaagcgagctccccggagccgggaaaaccctctgagttatactttctggccttcatacctgctcatgcaggaccagcatcagcaacaagataaagctgctgggggtgcctctgtgggacctgccttgcaaaataattgccacctagagaggcctccgaatcctccaaagcacactgcagctgcagccagaggataggaggtggtgtaggagcctgggcaaggtaatcggttcgcctctctgcgcctcagtttcttcatctgttaacccccagggctgttgcatgaattaggcgagttatgcctataaaagtgcaacgtgtaacagtcaatactggcattacttcctgcactactctatcctggccctggggtgttctgggcaggctgacagagggcaggtctcagtctaccaggcaaaacgcacctagtaacgctgcctctttacagaaatgcagttaaaactaccggggcaagtgacagacagggtttaaaggaaactgagtgcctctcacacaatccacagcaagggctgtaaggcacaagcccacccacctccccgcaagcaaaaggagaaggcaaacgtcattgcctcccggcggctcggcgacccaaagtcgggggaagaagtgcaggaaccctcagaaaggggatcccacgggccgctgtcgaaccggtaaagagctgccactagtcgagagaagacttgccggccccaagttcccgaaataacccggggagcagcagccacacaccaagtcccgagggcgcgcggccgggccagggccacacgtttctcagctccagcgtggtgagggcttcccctgcggggagctccctcggaaaccgcgcacgtgtgggcggccccagccagcccgaacggccagcgtggtaagactgtgcagagcttcagcgatcgcgtcccccgggagcccagtcgccgccgaagccagcggtgctcgccactccgcctcccccgcctcagcgccgccagcagccggggccgggcacgcggctggagcagcgggcggtgcggggcgaggaccgggcaccctcgcggggtcggcggaaggcgcggcgcccaggctgcgcgcagctgctcctggggcgaccccggccagccgcggtcctggggagagctcggtttcgggacgctgccccgaggctgccggcgcgcgggatgcaaatgcgcgcgcgcgctccttctccgctcgttgcgtccccgaagtctccccgcgcctcaccttcaccgagtccaccgggtacatgaccgagtgctccaggatcccggccatcgctcctgctgtcatgtgggtggacacggaggcgctagtcggcaggttctcgtagtcctccgacccggtggcgtccttgccgccgccgccatctcggctgtccccatccatcctccgcgccaccgcctggctgcccacgctcccgctgcgcagctccatccgccagctcggcggggcgcaggaggctgcaggaggtgggcagggagggggaggggcgcaaaacttcacttcttaaagtgggagccacctccccggggccgcggcgcctgacgccatggcgggctggggtggagcgcagcggccagagacaccaatcgccgggaaccaagaggccggcggccgccgcgccattggtgtgcgggacagtggggacccgcctccctgtgtgacgtcaccgtcccgtgcacatttccaagcaaccggacgggggcgagaggagacgtggggtggcccggaaagttgtactatcttgaggatgggctggtccgcgaggggcaggggaggtcattggggaggggccgcagtggggtatgcccagagctggaggcatgggtgacagtgtctcggggaaaatccgtccccgtggcgggtgggtttgcaaacagaatcgctcagtgagctttggcattcctaaggcctgaattcaaacctcaggggcccgttctagactgctttgttggagagacccccattcattcgaaattgtttctctcaacctaaatacataatgcagagctaaatgtgttcctcttgttctcaccgagagaccgaacccaccctgccctggaccgagcaaggctataaggagtgaccaggagggagcccctctgagtaggcacctccaggaaattttctttgggtttgataggcccataaggtctgtagaggcctgatctcacagttaggagtgtgaactggctgagagtaaaatcttacagccttgcccctgcctgtcttaagactgtggtcacctagttcttaaagtcgtcctaagctggcctcttcaataaagtgtaacccaggctgttttaatattgttttgctccagtctggggaaaaagggagaaatcagaaagtaggggagggacctgtctgcctctggaagtgtccgtctaaattgcgtgttccagggcttaagatgacttgggctgatcaacttgtaggcaccagggcctccctgccttatctagacaaggcttctcgtcaggaaagctggatcctgagatatgaaagggtggggaagaccctgaagaggctgagcctactctctgccctcaccgtgatcagcatcccaagcagctcttagggatttgagatacagtaatgtgagcatgggtagaggtcaatagaggcgtcaggaccaagagcactgtttgcctagttttggtagctgcagatagtagctggcaagctgagtgctaaggatgtgataagtaaaaacaggctctgtgtttttacttagccatctctgtaatggctagagaaaactctacttttgtcaaaggtcgtttttaagaaatactgatcagaagctgttgatccttatttttaagtggatgccctttaagcattaagtctgtaagaacccactgccccacttctgggaatgtaacaaaaacccaaatacacaggaagctcttcttcaaagcattccttagagcagtaaatcattggaaacaacctaaatggtcaaccagaagggaatggctaaggaaattatgatgtgtgcataatattagtgaaatattatgcagcctttacaagtggaatttacattacacgacatggacgatgattataatgtaatgttaggtgaaaaaaacaaaacgaaattctataaccattgcattcacaaagatgtaaatgtgctcaggaaaagaatcgcatggttactgtgctagtgatggaggcttataggcaactgctttgactttatttttcagactttaaataatacttttattatttctgtaatttaaaaataaaaaaccattctttttaggaaatatataccatatttacacatacatacacacatctatatatagaagtatatatgtatagaatatagatatgtgcatatgtataagatatatagataggatatagaatatacacatatgtacatatataaaatatgttgatttgtgtatataaatatatatagatatatgtgtatatataaatgtatttttttacttagcctctcagcattcatatccatgtgtatatataaaatatatatacattttatgtataaatatgtacattttatatatataaattttatattttatgtatgttttatataa

SEQ ID NO: 587881 - DNA, 4001 bp, Homo sapiens
atgttttcactctgtttcaactctggaaacaaggaacttatgaacggcatttaaattttttttaactgctaacatctagtaatatatattcaaatctcaattttctttatcaatctttaaatattttaagcatccttaaatttatttagcatgattaacaagctgtatacacttattctaattccattgtgatatacttttttactatcatatacttactagatattattagcttaatgattttaataacgctagaatccatggtttttataaagcaaaacaattttcctttaaaaattttttcttcttataattttctgacactcccatggcttttgcctatcaatgtatctacacatataagtctacattttgagttattttcccttagtgctttgaaaatagtatgccattgttttttctggcatctattactgtcactgagaaatctgatgtcagttcattgctgctgctttgtaggtgatctctcttttcttaacatttcatctttagctctcaatagttcaactttggtggtatatagttttaccaaaatgtgtctatgtatggatttgttcttgtttgttctgcttggaactcaatgtgctttttcaatctgaaattgtcttctttcaatatttgaacattttctgccattagctagaacattcaaagggtgtagatcctagctaatgggtttctcttttaaccattatgtttttaatccatgctatattcttatgccattatgttgctgtttttataatgccctgacatatttaattcataaaaatgtattctcttttaatttttaaagtgaaattatatagatatcaaatctccttattttcctactcttgcttccaagcttgtttcctcagtgatgattgatgttaacctgtgtgtgtgtgtgtgtgtgtgtgtgtgtgtgtctgtgtgtgtgtgtgtctgtgtttaaaatcctgtaagaaagttctatctatctgacctgaatggtcagtggttctattttcttactctgcaagtcaacagaaggaaagcctcatctctctttcacatgacagtgtttcaaatatacaaagatagctattgggagtaatggtatcatcatcaatcaataaatttatttgcactttctcttatgattcaaaatgaaattgtgcatgttctagtgcaggaaaaaagagacagaaggtggtatcaggaggtgtcaggtaagctaaagtcctaattctattatttgatagatttgaaatttgtgaacaaactacttaactttgcttagtcttagttacctcaactgtgaatagagacaatgaaaaccaagtcacaaagttaatatgagggccagaaactctattacttaaatgtcaccccctgggaaatttaccttttagcctccaccaaagtcgttgttggttctgtctatgactccatagtatgggtatataatgctttatgacaatgcttctaacgttacattttaatagtctgtgatctcctcaatagcatgaactgcatcttattcatctttggatccagagagcttagcatagtaccttgcatatagtaagaactcagtaaagatgttgaaagaaaaaaatatgtaaaaagcattttgtaagtggaaaagcactaccattacccatcttctagttgtttaaaacctttcatatctcctcttcttggcttactcattcccttaacatgatggaatagataaggttcatcatgcagtaacaaaattctattaaaaattctactaattttttaaagtagcagtacctaatcacagcattaaactcttcctgaattggtgtacaagacagactaattttacatcctccttactagctctttccacagcctacaaccatgcacatatcttcccattttcaaaatttttcttcaagccttcctcacgtccaaagaatattctatagcactcctaccttttacagctacattgcttggagattagtcaagacttgctggcttcacttccgtattcttaccaggcttttttatttatttatttatttatttatttatttattgagacatagtttcactcttgttgccaggctgcagtgcaagtgcaatggcgtgatctcggctcactacaacctctgcctgctggcttcaagtgcttctcctgcctcctcagtctcccgagtagctgggattacaggtgcccaccaccatgtctggctaatttttttgtgtttttagtagagacgaggtttcaccatgttggtcaggctggtctcaaattcctgacctcaggtgatccgcccgcctcggcctcgcagaatgctgggattacaggcatgagccaccacgcctggccccatcaggcttcttatcgatgcaacctgcttccagccctgccacttaatgacacaaaggacaccaccttcctcttttgatttttcagtgctgtttcttctcctcagccctggatctgtcaacttggtgtctttagtcagctcattcttgagcccatattagagtaagagagcagccaaaattttcttatgcccagagaatagtgtagaagtggttgaaagagaaccagcaaacaaaagggacttcaacatcagaacaagaagacacagggtacatggaagaagaagcatgaccaatgggaagtagacactaccacggagcttcgatctagataggaagatcacacaccagaggatgcccacatgaaacaggacattggcagaacatatggctcctacctcctaataccatgacactacttaaaaactccaagaattagataatataggcagaaaggaagggaaggaaattctaagtgatcaagataaaatctgaaatgacttaggaaatcctaaaattaccacataagccttgaattaactaggtaaactttccagtagaatggggcccaaataaaagctaagttcagtggaagaaaaagcaagaaagccctgtttattgtgcatctgtgttttatagctgaagaatttgtgccactctccctgttttgcccttctgtccctgaatgtttcttttcattctcatttgctgactcctgcttttgccaccttttaataatattgccctccaaggttctgtccttctggtcttctcaccctactgagtagatctccttaggtaatcttcattcccagggcttcgagtgtctcacttatataaacaatttttaaatccacatcaccaggtctagcctctctttgtcaagcaaaaatgtcatcataccccactacttcaacaactctaagtagctgttacgggctaaactgtgtcacccaaaaatccatatgtcttaaaccccagtatctccgaatgtcactgtatttggagatagggtctttaaagtgttacttaggttaaaatgaagtcaaataaagtgagctctaatccaatatgactgacatccttatgagaagaggaaatttggacacagacatgtaccaaaggaagaccatgtgaagacacaggaaagagccagccatgtagaggccgaaaagagaggctgcaggagaagccaacccctcctggcaccttgctctcagacttctagcctccagaattgttaataaatcaattcctgttgtgtaagccacccagtctgtgatactttgttatacagccctagcaacttatacactagcttttgaaattaagctcaaacttcacataaaagagtcactgtaacccacactgctgttttctccaacttcatctctcatacctcaccttccgtgacttcactgtacacattgtgcaatttatatttgcacaatattaactctgcacaggcaactgcctagcctgaaatgcttatccactagttctttatctattctaaatgcctccctagccttcaaagcacatttctaagaaatgcctcttaaagtaacttaacatttattatggattcgccaaacacaatcactgtggtaggcaccagggttaaaccagggactatcccatttactggagat

SEQ ID NO: 587882 - DNA, 4001 bp, Homo sapiens
ccctcaaaatctatacccaaataaaagccatataattaactactgaaacttatacataaatagtatcactaatgatacaccatagataactttatcttatcctcaaattgtcttattaacttgatattttccaaaggtaaaaaaagaaattatttttaaaaacataattctctttcattttacattaaattaaagcaaaataaatttatagcatgctgaaactatctggttaaaaaaaaaattcatcacttaagttttcaaagtacattggtattgtttcatttggaatttaaaactgaataaaagcaagtccaaaaatgcccaaagctgttatttactttgcatttttctgaaagattactatgcatttctattggcaaaatggtcattaaaaatataagactattcagtaaaatggaatcctataaagtatgacagtattatggatcttaaagtcactagtgcagatgttcctaattataccaaaaacacaaatacacaaaccagtttgttccagctacagaataatttaattaaaagagtgcttataatttaacagtgtaaataatagttaaagccaaggaggtagtgaaactgcaaggaaatataagcctgcagtgtctatgccaaggaaactgctctaaattctcaaggttcagaaattagttcctttccttgctacaggtagaaaattatttgaattagccaagaactgcaatggatatatctttaaggcaaacaaatacacacacatgcacactaggtcggtagcttttgccaatagaaacacctatctaaatccagaatatcatttagtctgttttggggaaagttaaaatcagacttctcaccagtttaaatatcttactgagaaatagatgtagtaggtaatgtgatacagaagtaaatcagcatagacagtaaaacataagctctcaggacacacaggattctctttgcaaataccaatcttggcaaagagcctcctttatgtacagaaagctttgttccttgtttatagcaactctcaaggctacaacaggtaattgtgtgctgctaattaggttccaaaacgattgtgttcaagccaggagtattttatagcttgattcagtgaaagtaggcaactatatccataagatcatgttataaaaactcacactcccataattactaatctttcactctaaaacagtgtgaattttaacagtgaaaaaatgtaatgtcattcaaaagtttattcaatgcttaatagctatcaaaatacagaggaaaaaagacaattaggaaaactcttctccaaatatatccaatatgcttgtttccccacagctaatatccatttatttagctaaattgtttattctaggtcatagtattattccaaggaagcaaagtgacatctactctgcataatacaggaaactcaaatgcaatacattaccttgggtcacctgttgaactgccaacattatcccagacacagtgtctggaagcaagttttctttcagattgtaatgtggtgcccaatccaaaatgggcagtcgccttctacaccactgtataatgtcttcacactggggggtatgcatcttgctccaaagcatgcttttctttttcctctttgctcctgtcatttttcagatttcttcttgtagaagtaaacttctctaaacaagaaaaaaaatcattgcagaacacctcctttcaatgccaagctccaattcgtctgtggtttacaatgtcaaagctgcccagaaaataagtaaataaaagagagagagagagagagattaacagaagcacttcaatatatgcagctgtctttttatgatacagctaattattctagatttaaaaactatagattaaaaccttgaattcttatctgaaggagaagtagttcctgttcatgtaatatttttttctggtcttggaaaagtaatgggttcagtgttaagttggtctacagctctctcgccagtaattccccttatattcactgtagtcttatgtttttggctgcaatcccaatggttaatgaggtagttctgggcgtgtgttggaagtgggctgggctatgctaatgaaaccaggaaatatccagctagtccagtctctctctacaagctgtgcaaaatcataaaactgccagagggatctattgtgcaaaatatattcagagaatccagccctatttctttgagagctatatattttcaacattatcagatgactgccagttctacaaaattcagaaacataacagggcattgctaaaggtccttaccatttttattccctggcagatgaggttttcattcatacagaaacattcagatagctactgcccagtctgggaaaggagtaactagttctcataaacaaactgaaatttcatctcatgggctaagagaataagtatcacaatgagcacatatttgtgacaggagatcttccctgtctctgaaactgttcattcagttttctctgatggtttctctaagtcctataattcattctactgtaactgaaatttactgaggaatgttatatggttcaaactattgtttgaagtatccttagctttttttatggtgctgccttctttttgtataacttttgggggtaggtgttctctttttaataaggggtgttacattttataatagaacagactgtcaaagatttttattttatgatcattttgcttagcctccaaaagaaaaagaaaaacttaaatctatgaactgtgccattggaattaaaccaaaaaggcaacatactaactaaaattgtgtagccaaggaaaagaataccatgtatatagtttgctgagtcctttttaatgcccatttgtttggagaatagaaatctgatttctggaagcctttataataacaaagtacttggatccctcctgctgcactttttccctttgtttttaaattaaagtgaagagttgctctccatcttctaaagatgacatctctagctttgtgtctgtgcaaaaatacctttctttttaaatccaacgaagagacgcagcggggtgggggggaatttatttatacttacaaaatagaaactgctttgtttgtccaactgtttttacattatattaaatttctaaaccattcaatagttcaggtttggggcctgtagagagagccccatttagagaccaagttgtagcattttaatcctatcctcttggtatgagagatgaactcaccaaataattgtaaattcatgcttgaaacattacattggttttccttcacaaaaagcaatctttacttttgttttatatactccatttattatatacgcaaagaaattcagaagctatacatacactgattatgtattacctttataataaaaataaacacaagattttttttcaaatcctatctaggtcataaattctaacgtatgttaacaatatgagaaaaataattgaaagcttaactgaaatcaccaatcaacatctatcatttgtgtaatttcaatcatttttaaatttgtgttaaattccataacaaaaaattcacatgaacaggattttatgaattgaaggtaaatagaagtacctaaatcatatagcaccagcaattgttctaaaacatttcaagaccaagagagggtagaaattaacaaaatagttctgaaatctctcaatttaaaaatttcttaaaattagaatgaatctttcctaaaaatcttttttgaagcttaaatctggaattccaattccagatgttttttttcaatttccatgtgcatacatattatttaaaacatgtcaaaccagagcatggatcatgcctatttataatcagcaatgccagaaagaaagaaaaacattatgaggaaatttattcacacacataagattctcagagtaacttgaacagcctgcaaaattcaagaatgctaagtgtattcattcaaaagtttcaatgactaaaagtagcttacagttcaacagtatgtac

SEQ ID NO: 587883 - DNA, 4001 bp, Homo sapiens
tgaaccccaaagcatggcttgtgaggcctgtcatgatatgtccacctctgtcaaccacttcagccacacttcttaacaccttcattctttcttctaagcaccaactatattgagctttctttactccctaatacagatgatgactttgctcacctctagcaccttctatgagctgttgtttctctctaggattgctacctgctcctcctcccaaccttctcttggctatgctccaaaacgccttctctcttgtaccacatccaaggtaagtttgcttcctattcactcccttagcactcaactttcccctaagacagcatctaccacatgtatcataatatcttattgaattatctgttccccaccctgccatctagactacaagcaacatgagagcccaatcccatcttttcaggtttattgtcctacgctcagcatccagaaagatgcttattttaaaactgatgctcaacacatacctagaacagtggctggcaccccgtagacacaacaaaaatgttgaatgaatgacaggaagagagagcaaatttgcactgttagattcatgctgttcaataaagttaacccaaggcaaaattataaaaatacaaggaatcaccaaaaaattggaagatgggatttgggctctcatgttgcttgtagtctagacggcggggtggggaacagataattcaataaggtattacgatacatgtggtagatgctgtcataggggaaacttgagtgctaagggagtaaataggaagcaaacttacatcggatgtgctacaagagagaaggcgttttggagcatagccaagagaaggttgggaggaggagcagatagcaatccttgccaggggccagggacaaatggtgttaatttcagtatttttctactcttctttttaaacaagcttcccttgtttaattgctcactaagcacactttaaataaagctcaaccttttggtatcaccacctaggttaattcacactaatgagttggtaacaacattgtttcaaattaaaaccattagcaggagatgcccatgcttaacccaaagaatcttaaagatgattatgagttcgatgccttactctacaagtttctacaaatgagaaaattgaagcccagagacatcaatgactcaccaggtatcacaaagcaaattcagctcaaagctgggtcttcagattcccaacactgcattccctccaggaagtaacatctcttacttagggagagagacatcctgggaagacagcatgagggtgatatttccaaagttagacaggcaggctttcttgatgcttcttaaaattcaatagcctcacggcacacctacttcagctggttactgtaagattaacgagctatcagctatggcagcacctggtaaattataaactggaaagcagttggtaaactgtaaggtacctggtaaactgtaaaccgtaaagtccagtaaaatactggtggatttcagaggacattgtcctctgaccctgacaatcccaccttaaaatcttgagatatttcttagcatgaaaagtcccagactgaatcctgcagaagtttagagcaactagtaccctcagtaccaatttggaagcagtaattatagaaattcaattcaggctgttttctgacagtttgctaaacctccctggtataaaaatttaagagctgataaacagtttactattttgctgccagttcagtcctgagacgccttaggaaaatatttcatccccactgcttccagttgccaaaaaacaaaatggcttctctgacagaatcagataggtagtaggtctcctaggcattagaacatccttaatgagggtgagcattgggaaatgttttcaataattagaacatttaccgcaggattctagagtctccacagggttcaggagaggattcttctccaacaagccttccttcagtatgcattaactgatctcctattgagaggtgacagcatgctggcagccctcgcagcccttgctcgctctcagcgcctcctcggcctcggcgtccgctctgggcatgctcgagaagcccttcagcccgacactgcgctctgggggcccctctctgggctggccaatgcgggagccagctccctctgcttgtggggaggtgtggagggagtggcgcgggcgggaacctgggctgcgcgcggcgctcgcgggccagcgcgagttccgggtgggcgtgggccccgcgggccccgcactcggagccgccggccggcccgggcagtgaggggcttagcacccgggctagcagctgcggagggtgcgccgggttccccagcagtgccggcactgcgctcgaattctcgccaggcctcagctgcctccccgcggcgcagggctggggaactgcagcccgccatgcccgagcctcctcccaacccccgcggtgggctcctgcgacgccagagcctccccgacgagcgccgccccctgctccgcggcgcccggttccgtccaccgcccaagggctgaggattgccggcgcagggcgcgcgagactggcgggcagctccgcctgctgccagtgcaggatccactaggtgaagccagctgggctccttagtctagtggggacttggcgaacctttatgtctagctaagggattgtaaatacaccaatcagcactttgtgtctaactcaaggtttgtaaaacacaccagtcagcactctgtatcttggtaatctggtggggacttggagaacctttatgtctagctaaaggattgtaaacacaccaatcagcaccgtgagtctagatcaaggtttgtaaacgcaccaatcagtgctctgtgtctagctaatctagtagggacttagagaacttttgtgtgtagcccagggattgtaaacgcaccaatcagcaccctgtcaaaacggaccaatcagctctctgcaaaatggaccaatcagcaggatgagggtggggccagataagggaataaaagcaggctgccagagccagcagtggctaccggctctgctctctttcaattgtgtggaagttttgttcttttgtcctttacaataaatcttgctgctgctcactctttgggtttgcattgcctttatgagctgtaacactcactgcaaaggtctgcagcttcactcctgaggccagcaagactacgaacccatcagaaggaagaaactctgaacgtgtccgaacatcagaaggaacaaactctggacgcaccgtcttcaagaaatgtaacactcactgtgagggtccgtggcttcattcttagtcagtgagaccaagaacccaccaaattctggacacactattgcatagaattcatcctcgccaaaggcatatgtgaaacatttaagcaacgtaatgatgtctctgaagtcctgtgccgatagtttccaatgatatgtacagttgccatcagagatgcactatcacaaacctttgtggcaggaggttttgggggattaagttatcagttagggtgctttcaggtgcaagaaactgaataccccaataaaagtgcctcaaacaattggattttattattgttattgtctcacagaacaagactagccataggtaggcagttgcagggtggggtcagaagctcattgatgtcattgaagacactgcttttcatctttctgtcctgtcatcttcaaagtgccgctatatttcccacctaggtcacagggtggctgcagcataggcaagctttacaattgcatgtgaaaatacctggaagaaagaaaaaaagagatagggaggaagacaccttattttctctcttcatgtaaggggaaaaaattgtttctcagaaaccccccagtaaacttccctttatgttttatcagacacaactggattcaaaagccatcttgaactgcaagagggactgggaaaagtgaagctatcatctctgtccctatcttggaattgggcacttccaacaggcaagaaggatgagcaaaacacttgt

SEQ ID NO: 587884 - DNA, 4001 bp, Homo sapiens
taacctcagcctcacgcaatatacccaggtaaaaagaatctgcacatataccccctgaatctaaaataaaaattgacattataaataaataaataaataaaattcttctttgtcataataggaagacataatgtctaaaatctataaaacaaagatgcttactcacattatctagaaggtaaaagaattggaagtggccaggcccggtggctcatgcctgtcatcctagcactttgggaggccaaggtgggcgggtcacttgatgttaggagttcaaaaccagcctggccaacatggtgaaaccccatctctactttttttctctaagaaaacaaaaaagttagccagatgtggtggtgagcacctgtaatcccagctactcgggaggctgaggcaggagaatcgcttgaacccggaaggcggagtttgcagagagcagaaatcatgcctctgcactccagtctgggtgacagagggagactctgtctcggaaaaaaaaaaattggaagtagtttcctttggggtgaggggccatgatgccttcaagggactgataatttttgtgtaagacttttagaattatttaattatttgtatattatgtgcaagtattgctataataaaagttaaattttaaaatatttttcaatggtttacccaggctcttaggatacagtctgaaccccaaagcatggcttgtgaggcctgtcatgatatgtccacctctgtcaaccacttcagccacacttcttaacaccttcattctttcttctaagcaccaactatattgagctttctttactccctaatacagatgatgactttgctcacctctagcaccttctatgagctgttgtttctctctaggattgctacctgctcctcctcccaaccttctcttggctatgctccaaaacgccttctctcttgtaccacatccaaggtaagtttgcttcctattcactcccttagcactcaactttcccctaagacagcatctaccacatgtatcataatatcttattgaattatctgttccccaccctgccatctagactacaagcaacatgagagcccaatcccatcttttcaggtttattgtcctacgctcagcatccagaaagatgcttattttaaaactgatgctcaacacatacctagaacagtggctggcaccccgtagacacaacaaaaatgttgaatgaatgacaggaagagagagcaaatttgcactgttagattcatgctgttcaataaagttaacccaaggcaaaattataaaaatacaaggaatcaccaaaaaattggaagatgggatttgggctctcatgttgcttgtagtctagacggcggggtggggaacagataattcaataaggtattacgatacatgtggtagatgctgtcataggggaaacttgagtgctaagggagtaaataggaagcaaacttacatcggatgtgctacaagagagaaggcgttttggagcatagccaagagaaggttgggaggaggagcagatagcaatccttgccaggggccagggacaaatggtgttaatttcagtatttttctactcttctttttaaacaagcttcccttgtttaattgctcactaagcacactttaaataaagctcaaccttttggtatcaccacctaggttaattcacactaatgagttggtaacaacattgtttcaaattaaaaccattagcaggagatgcccatgcttaacccaaagaatcttaaagatgattatgagttcgatgccttactctacaagtttctacaaatgagaaaattgaagcccagagacatcaatgactcaccaggtatcacaaagcaaattcagctcaaagctgggtcttcagattcccaacactgcattccctccaggaagtaacatctcttacttagggagagagacatcctgggaagacagcatgagggtgatatttccaaagttagacaggcaggctttcttgatgcttcttaaaattcaatagcctcacggcacacctacttcagctggttactgtaagattaacgagctatcagctatggcagcacctggtaaattataaactggaaagcagttggtaaactgtaaggtacctggtaaactgtaaaccgtaaagtccagtaaaatactggtggatttcagaggacattgtcctctgaccctgacaatcccaccttaaaatcttgagatatttcttagcatgaaaagtcccagactgaatcctgcagaagtttagagcaactagtaccctcagtaccaatttggaagcagtaattatagaaattcaattcaggctgttttctgacagtttgctaaacctccctggtataaaaatttaagagctgataaacagtttactattttgctgccagttcagtcctgagacgccttaggaaaatatttcatccccactgcttccagttgccaaaaaacaaaatggcttctctgacagaatcagataggtagtaggtctcctaggcattagaacatccttaatgagggtgagcattgggaaatgttttcaataattagaacatttaccgcaggattctagagtctccacagggttcaggagaggattcttctccaacaagccttccttcagtatgcattaactgatctcctattgagaggtgacagcatgctggcagccctcgcagcccttgctcgctctcagcgcctcctcggcctcggcgtccgctctgggcatgctcgagaagcccttcagcccgacactgcgctctgggggcccctctctgggctggccaatgcgggagccagctccctctgcttgtggggaggtgtggagggagtggcgcgggcgggaacctgggctgcgcgcggcgctcgcgggccagcgcgagttccgggtgggcgtgggccccgcgggccccgcactcggagccgccggccggcccgggcagtgaggggcttagcacccgggctagcagctgcggagggtgcgccgggttccccagcagtgccggcactgcgctcgaattctcgccaggcctcagctgcctccccgcggcgcagggctggggaactgcagcccgccatgcccgagcctcctcccaacccccgcggtgggctcctgcgacgccagagcctccccgacgagcgccgccccctgctccgcggcgcccggttccgtccaccgcccaagggctgaggattgccggcgcagggcgcgcgagactggcgggcagctccgcctgctgccagtgcaggatccactaggtgaagccagctgggctccttagtctagtggggacttggcgaacctttatgtctagctaagggattgtaaatacaccaatcagcactttgtgtctaactcaaggtttgtaaaacacaccagtcagcactctgtatcttggtaatctggtggggacttggagaacctttatgtctagctaaaggattgtaaacacaccaatcagcaccgtgagtctagatcaaggtttgtaaacgcaccaatcagtgctctgtgtctagctaatctagtagggacttagagaacttttgtgtgtagcccagggattgtaaacgcaccaatcagcaccctgtcaaaacggaccaatcagctctctgcaaaatggaccaatcagcaggatgagggtggggccagataagggaataaaagcaggctgccagagccagcagtggctaccggctctgctctctttcaattgtgtggaagttttgttcttttgtcctttacaataaatcttgctgctgctcactctttgggtttgcattgcctttatgagctgtaacactcactgcaaaggtctgcagcttcactcctgaggccagcaagactacgaacccatcagaaggaagaaactctgaacgtgtccgaacatcagaaggaacaaactctggacgcaccgtcttcaagaaatgtaacactcactgtgagggtccgtggcttcattcttagtcagtgagaccaagaacccaccaaattctg

SEQ ID NO: 587885 - DNA, 4001 bp, Homo sapiens
attaacaagaagggggcctgggtccacagcccagttctgttgtaattagccatctgccctcaagaaacacatttattctgacctcaagaaaggcatttgttctatctggcattcagtttcctacatggtaaaatgagggatcgagataaataatctcttccagatttaatttatttcccttgacaagaaaatacaaatgagtttgacaattcttataaacactgtgtcctgaaaaccatacctatttatggggtgaatgagactttgtaactataagtggttggcttatttgtgcaacaaaatgctaatagtctatgttaataagaagggaaatattgttatttcagtaatgtggagatgctctattgatagtatccatagggttaacaattttttgtccaaaacttctgcctgacttaccacaaggctttgttttttatgttaataacctcaatacatcatatctaatattattttctaagaaaaataattcttctaatgtgagattgctagattctttgttttaagccaagttataaatatcctttttataaaatctctttgctgttactaaaatatttgatgctcccaaacatagtatcactactccttagaatattagtttggctttgtgaaacaaacaagaacattacacgtattattaatgggcaagtattctcttaaattcttcttctaacatcaattcttttcagattttcattagctcatttatattcactgaatgtgttccttttttgaaccccattcagattcaactcctcaaacaaaccaagctcacattcttatgtatgtgaaagtatatttactgtgcaattatcgaagtctgggaaactttccttaaaactattttctatgtaggttatccctaaccctactttaattcctttttatttttagctcttagcctattacttctgagaaagcttcctctgattccaaagtccagttattcttattgaacaccctcaatatgacacaaatacactgttttgtaattgcctagttctaatatgtatttcacattagactaagtttcaagaggacaaagatctgaaactagacatttttttctttctcattataagttctgcacttactacaggtgtgttcaatcaataattgttaaccaagtgaaaaatgaatgaatgtattgcatgtgacactgtgggagacattaaaaagaaatggaatactttgtagaacattaaaatcagctatatttgttataggtatgtatattaataatgatactttataagcatgaaaacaacagctcattttaagatcaatacaaccacaattttgccatgtagctgaagtcttaactttttctaaatataatataataaaatttactatctatcttaaaattgagaataattgagaaaaggaaaagtaaacagattatataggtctattttctggaataaacatgacagatgaaaaacacatcagtaaaatgtgttctttatgcacttaggatatttaaggaatcaaatcaactatataaagtattgcatttttcagaatataaaatacatgtcagtcaacaacttataaaatgttccagagtgcccccaagttgcagagtaaaggcctacaattcagaagcaacaaggtataggaattggatgatattcaacagagaaaattgtgaagcagacacagacatctattacctttctagtgtgaaagcatacatcttggcagctttatcattcacaagatacgttctttcaagaaactccatgacggccaggatgagctgcggctgttgttgtcgttgttgttgaactcactgcccagttttggaagcaaagcagcactgcaattatttatacactttctaaagaaaaaattaaaaggctccagaaattaaaataatgagcttcctacatcagtgttgttggtaggtctgctaaaattacagcctccttgcaatattacctggcttcattgttttcacctacaaaaactgcttttctagggagacttgcaggtagcattacatgaagtgtgtatgtctttcatatgatatctgattcaattgtgctttctaagaggtagaggagctcaagagcttgctacaaattgctgatgtagggttttgaccttcggagcacacgtgggtgagctgcaaatagctaccattcgctacactaaactaattctttctttttctctccctcctcctttttctggactctttatcagcctaaaattatttctttggaatttagttctaagatgacctctaagcagctgtcagaatttacttgtctctcctaggaccattttgggatttcactattgaaagggaggacaagggtcaatagtttctgaaaccagtaatctgaaaacagttcttggtacagcagctttgaaatccttttgattggcaagagaaggacagactctgcttctacgtaaataacagccctccaaaatacaagaaccagagtgagctttgttcttcctggccaaggtaccctctactaaggatcaaggattcacccaaggaaaccctatcaggcatgccagttccagctccgaggaaggaagcctctgagttgctcctgggagacctcacactcctcaactcctaggaatcagcattttacttcatacaaagcactttccttcccaaataagagaaagaactatagccttatggcaagagcctggacaaacagtaggcatttgtgtgtgggcaaaaggtttcaagacctataaagatgtacacaacggtagagaaagagggggttgtgcagactggagaacaggagtaaaccccagaccaccaggttcttgttgccttttccttgtgtgaacactaactttctagtgagaaaactcagagtagttaagtcccagaataacccagtggcccagagtcacgggaagttgcccattatgctgagctgagatctctcacaatggcctaataaaatgaatattgtgctctaaaaggaggatggggttcaatgccaattgtcataggcagtgacaggagaagtcacctttggttcagaatgagactattaggtctcctatcacatctgtggtgtagctgtacctcttattatcttaagatttcaaacactctcatctataacataaattctaaggtcttctcatatgaccccactcttactgatccttaactttgctcacacagtttggagcctctaagaggctctgggggagccttttccttgcaagtgaaggcattgaaatcctgggtctactgttagcagaataaaaaccaatgtattttttctcgtatattcttactcttaaccttacaaagtaatcagttattctgtggaggcgaaagtagaaaaccagaaaagaattactaatccacctgtgtgacacactgccatatgtcacagcttgaatcatttgtgaatagtttctagcacagacaagagaaatagaattcaagtgaatgaatgtcagaaaatgaggaaactactttaaatcagcctgaaattcattaagggtgagtacaaaaaaaagagataagcaatattttcaaatcaggaaggagaatatttggctatagatatcaacaggaaataaacaatctggaagtttgagattcctccatgcgaactttgcctctagtacaaatacggatgtacagatctatttataattgacatacatacatacataattgacatataatttataatgagtgtgaaggatacatgccaggtagttaatgtggattgcctatggggcaagaataaagtgagagtaggatggggttgatgtaggacagggaaaagtgaagatgggaaaagagacaatgagagacccaagcaaaacaacaaaaaatactgctaccccctgtcaaaaatgtatcctatgatctcttctatttgtctataagataaactatataagtcctatgtggtctaatatcagcaattttatatggttcaacttaaatatacatgcacacatatata

SEQ ID NO: 587886 - DNA, 4001 bp, Homo sapiens
tttatgctcctcagagtggataatttcaataatcctatcttcaaatttgctgatcctttcttctgcctgatcaaaaactctacggaaggctgggcgtggtggctaatgcctgcaatcccagcattttgggaggccaaggcgggtggatcacaaggtcaggagtttgagaccagcctggccaacatagtgaaacctcatctctactaaaaatacaaaaattagctgcgtgtggtggcatgcacctgtaatctcagctacttgggaggctgatgtaggagaattgcttgaacccagaaggcggatgttacagtgagctgagatcatgccactgcactccagcctgtgtgacagagcaagattctgtctcagaaaaaaaaaagcaaaaaacaaaaaacaaacaaactctatcgaacccttctagtgaatttctcatctcagttgtcgcacgtttcagctacaaaatttctacctggttcctttctataatttttatatttttattgatattctcattttgttcaaacatcatttctctgatttcatttagttgtcttttaactcttgtgcatatttaagacaattgtttagtctttgtctagtaagtccaaagtctgggattccttaaggatagttcaattaattttattcctgtaaataagccagatttctcatttgtttgcatgctttgtgatatttttattataactgaacatctcaatattataatgtgctatggaagttagactttcactctttcctaggatttattataattattttttttcttttattttttttttgtcttcagtctttgtctttatttatccctgtccctcccaacccccgggctcccaagttctatctcactcctccaccttccctgtcctctcacagctgaggttccgggctgtaatgatggcaatgctgcccagcacaacccctgcccccatgatgtcagaaagtgccacagtctcatggagcatataatactgcagtataagggccacaaccacctcggaatgcaggacagcgcacaccagggcagggtgggccttggtgaccgcatagcccacacatgtgaaggagaccaaggcgaggatcccctctgcccccacacaactccaactcaggaggtcactgggcaacacgggggtctgcagcacaaagaggcctggcacacagcccagcagccccaccaagccagataggaaggccactgttgggaggcaggagggaaagtgcagagaacgatagaccagaagccccagggacagcgccaggcctcccaggaaagcctgcacatagcccagggtggtgtagacacctgtggtcccctcctgtagtgtccagagtccaggtcccagaatgatgattagtcctaggatgctgcccaacagtccacaccactcgtagccaccgagaccctggctctcaaggcagagggtgaggacagcggagcatacggtggaagaacctttgcgaacagtggcagcgttgccagcgggcaccacctgaactgcactgtaggcacatccaatgctgaggacgttgagcagggcacagaagcaggcccagcctcggatgtcaggaggtcccagaagggggtcgccacgcagtttaagtagcagggcaatagggaggtggaagaggcatcgacagatgagcagctccagcgagggcaggttggaaccctggtaagccatacgagaaagggggcccacgaagccagcaggcaggcccccacccagcagggccaccagcaggccattggtggcaccagagggctggcagcgctggtgccagcggaggctgggtggagcggagggcggcgatgggtgtgtggagtcaggcaggttgaagtaggggtgactgccagccatctttccttggactttctcctctcctcctggctcagggagcctgggcccctcagagctccagccattgtgacctcattggagtgcgggtggggttcttccctggaactctcctgaggtggtagcacgcctattttcccgctgagtccaactctgcttcttttctttctttctttctttcttttttttttttttaattgatcattcttgggtgtttctcgcagagggggatttggcagggtcataggacaatagtggagggaaggtcagcagataaacaagtgaacaaaggtctctggttttcctaggcagaggaccctgcggccttccgcagtgtttgtgtccctgggtacttgagattagggagtggtgatgactcttaacgagcatgctgtcttcaagtatctgtttaacaaagcacatcttgcaccgcccttaatccatttaaccctgagtggacacagcacatgccccagagagcacagggctggggtcaaggtcacagatcaacagtatcccaaggcagaagaacccctcccagtacagaacaaaatgaagtctcccatgtctacttctttctacacagacacagcaacaatctgatttctctatcttttccccacctttcccccttttctattccacaaaaccgccatcgtcatcatggcccgttctcaatgagctgttgggtacacctcccagacggggtggtggccgggcagaggggctcctcacttcccagaaggggcagccgggcagaggcgccccccacctccctcccagacggggcagctggccgggtgggggctgaccccccacctccctcccggacagggcggctggccggtggggggctgaccctccacctccctcccggacggggcggctggccaggccgcggctgaccccccacctccctcccggacggggcggctggccgggcgggggctgatccccgacctccctcccggacggggctgctggccgggcgggggctgacctcccacctccctcccggatggggcggctgccaggcggagacgctcctcacttcccagacggggcggctgccgggcggggtgctcctcacttcccagacggggcagctgccaggcggaggggctcctcacttctcagacagggcggccgggcagagacgcttctcacctcccagacggggtcgcagccgggcagaggcgctccccacatctcagatgatgggcagctgggcagagacgctcctcacttcctagacgggatggcggccaggaagaggcgctcctcacttcccagactgggcagccgggcagaggggctcctcacatcccagacgatgggtggccaggcggagacgctcctcccttcccagacggggtggcggccgggcagaggctgcaatctcagcactttgggaggccaaggcaggcggctgggaggtggaggttgtagcgagccgagatcacgccactgcactccagcctgggcaacattgagcactgagtgaaccagactccgtctacaatcccggcacctcaggaggccgaggctggcggatcactcgcggttaggagctggataccagcccggccaacacagcgaaaccctgtctccaccaaaaaaatacgaaaaccagtcaggcgtggcggcgcgagcctgcaatggcaggcactcggcaggctgaggcaggagaatcaggcagggaggttgcagtgagccgagatggcagcagtacagtccagctttggctcggcatcagagggagaccatggaaagagagggagagggaactcctgggctcaagtgatcttcccactccagcttctgagtagcaaggactgcagatgagcaccatcatgcctggctaatttttttattttttgtaaagacaggatcttgttatgtttcccatgctggtctcgaactcctggccctatgtgatcctcctgcctcagccttccagtgattaacacagacatatacaccaatggaacacaatagagtgcacagaaatgaatatgcatatggtcaaataatcttcaacaaagataccaagaccacacaatgggaaaaggacagtctcttcaacaaagtgttgggaaaaactgaatatccatatgcaaataa

SEQ ID NO: 587887 - DNA, 4001 bp, Homo sapiens
taaaatatgataaattaagcaagaacctgcttttggcctggccctttgggaagagacagtatccagaggacccccttccactgtctggtgccctctagtcttacctgcaaaccaaccccagcaagaggaccactagcctatctcctggctaccacacaggtaatggaaaactcacctctctgagcctccaccaggaaaaggaacatgtggcttttaattccagctgctaagttatgattctggacatcccttctcttgctttaccaaggatgtatatccttggggtggctccatggggctctggggtctggacttcgcttttcaggagctgcgtcccgggggatatgcatccaaggatgtatatggacaagttcttgtccatatttaggacttaggttttaagaggtaaggataggccgggcagggtggctcacgcctgtaatcccagcactctggaaggctgaggtgggcggatcacgaggtcaggagatcgagaccatcctggctaacacggtgaaaccccgtctctactaaaaatacaaaaaattagccgggcatggtggcacgcgcctgtagtcccagctactcgggaggctgaggcaggagagtcgcttgaacccgggaggcggaggttgcagtgagccgagatcgcgccactgcactcttgcgtgggcaacagagtgagactccgtctcaaataaaataaaatacaataaaataaaataaaataaaataaaataaaataaaataaaataaaataaaagagggaaggattacggaattgtatatgctgtggttaaggagatctagtctgaccgtggtactgacctgaccctcccaaggtcacagggccagttaagagcagagcagggacagaggccagggctaactcccaggccactcctcagcaggagcacagccgtcccaatggcctggggctcctaggggagagccactaaagacgtaaacccaaaccaggcttgctccaggaagaagggtcaggtcaaagctgctcctaaccccacgcttccattcgggccacaagagagcacttagccactccccaattgtgtccggagtcctcctgtacagccgagccctttaactgtttagagaagcctgtctctggaacccaggccctggcaagcaccagatcctcaaaagtgaacccctagtccagagctgacgaaattttcccggctcaactggacctcaggatcagatgatgaaactgctcggatggcgactttgtcccactgccctcacccaccaagagggggcagcctgaacccgaccacctaacttggtcattaaggaccaaaaatagccagaaagccatcctcgtgggcaagccaggttggagattcgctcagccggaagattgggtacatgtaccttcagaggggagatggaccggcgggggcccggggacgcagctcctgaaaagcaaagtccagaccccagagccccatagagccgccccaagagccgcccctcggattggccacctactgtctgcgttctgcgtccgtgtccgcgcggggaatccgggagcctggctcagccttcggcgcggcgacccacgctctgggcacccttctgcggctctagcatcccgcaccctccaggcggacaggccgcgccttgacctctcccctcgccagcgcggcaccacggccaggtgcagcctccacccagccgtccgggcgtgtgccggtgcccgggagcggcgcccggtcctcggcgcagggctgtccccgcccccacccactgccccagcctggggtgcggggctcctccgccgctgcccatcccgcggcccttggcgtccccgccctcacctggcgctcggaggcggcctcggccccgcgcagcctcaccgcaaggtcccaggcggccggcggcggcagaagcagcttagccggtgcgtccgcgtagacacgcgcgccgacccccctcactgcgtccgggccccggcaccgcgcgcatgcccggctatatacccggcgcgtcagcggccggacccgcccccggcccgccccgctcgccccggggctgccacgtggggccggcaggctggggacctggccagcctgcgccctcctgcgcctcgcggccctggctgtggtcggcgcccgctcccatccttcatccggccgtgactcccgaggacccgcaggctcctcctgcctccggaaacctcccgtgaagacctgctccctgggcgcgggaagctctcaccgcctagcctccaccccacaccccctggaggagagtcctacccactctatttgaatgtgattttaccacttctggttcacccaaaaagcttttctcttccctccccagttcggaaaggtacttcagaaggggacgcgcccttagatggtgtttcttctgcatatttccaccagccaaaagaaccaaaatttcctggtcgagttccaaataaaccatattatattcacttttcagacttgatgccgcaccgcttcccacaatgatcagacgcctaaagaaccctactaacccaaagttgggagaaatgttaatttgggggtgaagaagttccgaggagactcttcctctgtgggacagtcccattgagatgtatatcaggcctgggaaatgtagtcgatttcttgagaaaataaaccaccctttccactcccattgttctgttctgcaggacatcaggacaatttcctctatgagctgaacccgctgccacctgggccttggggggctcggaggaagggctttctagcccaactgtcgcggcttagtactcgagctgatcctagcacagtgactggtccccagacggcactagctgtctctaaatttgcgcagggaagggggcaacatcccactctctgcaggtcttgcggggaggacccccgtgatggcggcgctaaggagaaaaggaaagcagacagtcgctggagccggtagcaagaactcaggagcttgctcttcgccaggccagagggggtcagattcttcatattacttttgaagagtgtagctgggccccgggcgtttctaaaattcaattatcctcaccccgtaattacagtgctgcagtgggtatgggggcagggtgatattcctctcatttattttccaagtgatttcaaagtaatgatatctcttgcagaatttccctcagagccccttcatctttgtaataaccctatttctctcttggttaaactcggtgctttccagacattatgtcatccgtttgggactctcatcccactgcagtgggctgtgagaaaggggccagtccccgccacaccttttgttgaagcactggaaaaggagtgagaagcccacccagagataaagtgaaataagtatgcttccaacacacagagctctgaagggtatgaagcccgtaaacacatatcctaatggagtgttaaatctcttaaaaccaaagctggagagcaatcccatggcttttccaggcaagttgtcaatactgtccacaggagaactaggcacccttcaaggagattgctcggcagagagggggcaggaccagacaccccaccaccgggcctatcatggcgttctcacttgttttcaaccacactaaaggtggagctgtcaaagtccacataggcaagcagagctgataagctatcagtaatccattagggaatacaattaattattaacaaaaggtcttaactctccatatctacccacacacaaaattctttaggcatctcttaaatccttccttgttgctgggtagttctcagtttctcattcctggtgccaggcttggaggcccacttctctctgctctccacttttttttttttttttttttttgagacagagtctctgtagcccaggctggagtgcagtggtgcaatctcggttcactgtaacctccccctcccaggttcaagtggttctcctgccacagcctcctgagtagctgggattacaggagcccgccaccctgcctggctagtatttgt

SEQ ID NO: 587888 - DNA, 4001 bp, Homo sapiens
tgcactggaagggtgggggccaggccttctgcgtgcacccgccatggtggccactgcagagcccagcacagaccaggcaatgtacatccacaggctaagagtcccagagcccaaaattcttactctggcctaaaatacaaggccaatgatgcagctgctccagcccccaagtcctcaggtcagtgagttcctctagcctctgcactggctggccagctgtcagtcaacacctggatcgaatctcccgctcagcactgccctccctcaaggccccagaggccagatgagtaaaatatgataaattaagcaagaacctgcttttggcctggccctttgggaagagacagtatccagaggacccccttccactgtctggtgccctctagtcttacctgcaaaccaaccccagcaagaggaccactagcctatctcctggctaccacacaggtaatggaaaactcacctctctgagcctccaccaggaaaaggaacatgtggcttttaattccagctgctaagttatgattctggacatcccttctcttgctttaccaaggatgtatatccttggggtggctccatggggctctggggtctggacttcgcttttcaggagctgcgtcccgggggatatgcatccaaggatgtatatggacaagttcttgtccatatttaggacttaggttttaagaggtaaggataggccgggcagggtggctcacgcctgtaatcccagcactctggaaggctgaggtgggcggatcacgaggtcaggagatcgagaccatcctggctaacacggtgaaaccccgtctctactaaaaatacaaaaaattagccgggcatggtggcacgcgcctgtagtcccagctactcgggaggctgaggcaggagagtcgcttgaacccgggaggcggaggttgcagtgagccgagatcgcgccactgcactcttgcgtgggcaacagagtgagactccgtctcaaataaaataaaatacaataaaataaaataaaataaaataaaataaaataaaataaaataaaataaaagagggaaggattacggaattgtatatgctgtggttaaggagatctagtctgaccgtggtactgacctgaccctcccaaggtcacagggccagttaagagcagagcagggacagaggccagggctaactcccaggccactcctcagcaggagcacagccgtcccaatggcctggggctcctaggggagagccactaaagacgtaaacccaaaccaggcttgctccaggaagaagggtcaggtcaaagctgctcctaaccccacgcttccattcgggccacaagagagcacttagccactccccaattgtgtccggagtcctcctgtacagccgagccctttaactgtttagagaagcctgtctctggaacccaggccctggcaagcaccagatcctcaaaagtgaacccctagtccagagctgacgaaattttcccggctcaactggacctcaggatcagatgatgaaactgctcggatggcgactttgtcccactgccctcacccaccaagagggggcagcctgaacccgaccacctaacttggtcattaaggaccaaaaatagccagaaagccatcctcgtgggcaagccaggttggagattcgctcagccggaagattgggtacatgtaccttcagaggggagatggaccggcgggggcccggggacgcagctcctgaaaagcaaagtccagaccccagagccccatagagccgccccaagagccgcccctcggattggccacctactgtctgcgttctgcgtccgtgtccgcgcggggaatccgggagcctggctcagccttcggcgcggcgacccacgctctgggcacccttctgcggctctagcatcccgcaccctccaggcggacaggccgcgccttgacctctcccctcgccagcgcggcaccacggccaggtgcagcctccacccagccgtccgggcgtgtgccggtgcccgggagcggcgcccggtcctcggcgcagggctgtccccgcccccacccactgccccagcctggggtgcggggctcctccgccgctgcccatcccgcggcccttggcgtccccgccctcacctggcgctcggaggcggcctcggccccgcgcagcctcaccgcaaggtcccaggcggccggcggcggcagaagcagcttagccggtgcgtccgcgtagacacgcgcgccgacccccctcactgcgtccgggccccggcaccgcgcgcatgcccggctatatacccggcgcgtcagcggccggacccgcccccggcccgccccgctcgccccggggctgccacgtggggccggcaggctggggacctggccagcctgcgccctcctgcgcctcgcggccctggctgtggtcggcgcccgctcccatccttcatccggccgtgactcccgaggacccgcaggctcctcctgcctccggaaacctcccgtgaagacctgctccctgggcgcgggaagctctcaccgcctagcctccaccccacaccccctggaggagagtcctacccactctatttgaatgtgattttaccacttctggttcacccaaaaagcttttctcttccctccccagttcggaaaggtacttcagaaggggacgcgcccttagatggtgtttcttctgcatatttccaccagccaaaagaaccaaaatttcctggtcgagttccaaataaaccatattatattcacttttcagacttgatgccgcaccgcttcccacaatgatcagacgcctaaagaaccctactaacccaaagttgggagaaatgttaatttgggggtgaagaagttccgaggagactcttcctctgtgggacagtcccattgagatgtatatcaggcctgggaaatgtagtcgatttcttgagaaaataaaccaccctttccactcccattgttctgttctgcaggacatcaggacaatttcctctatgagctgaacccgctgccacctgggccttggggggctcggaggaagggctttctagcccaactgtcgcggcttagtactcgagctgatcctagcacagtgactggtccccagacggcactagctgtctctaaatttgcgcagggaagggggcaacatcccactctctgcaggtcttgcggggaggacccccgtgatggcggcgctaaggagaaaaggaaagcagacagtcgctggagccggtagcaagaactcaggagcttgctcttcgccaggccagagggggtcagattcttcatattacttttgaagagtgtagctgggccccgggcgtttctaaaattcaattatcctcaccccgtaattacagtgctgcagtgggtatgggggcagggtgatattcctctcatttattttccaagtgatttcaaagtaatgatatctcttgcagaatttccctcagagccccttcatctttgtaataaccctatttctctcttggttaaactcggtgctttccagacattatgtcatccgtttgggactctcatcccactgcagtgggctgtgagaaaggggccagtccccgccacaccttttgttgaagcactggaaaaggagtgagaagcccacccagagataaagtgaaataagtatgcttccaacacacagagctctgaagggtatgaagcccgtaaacacatatcctaatggagtgttaaatctcttaaaaccaaagctggagagcaatcccatggcttttccaggcaagttgtcaatactgtccacaggagaactaggcacccttcaaggagattgctcggcagagagggggcaggaccagacaccccaccaccgggcctatcatggcgttctcacttgttttcaaccacactaaaggtggagctgtcaaagtccacataggcaagcagagctgataagctatcagtaatccattagggaatacaattaattattaacaaaaggtcttaactctccatatc

SEQ ID NO: 587889 - DNA, 4001 bp, Homo sapiens
tgggcgtggtggcgggtgcctgtaatcccagctactcgggaggctgatgcagaattgcttgaacctgggaggcagaggttgcagtgagccgagatggtgccactgtactccagccggggcgacagagtgaagctctgtctcaaaagaagaaagaaaagaaaaggggaggggaggggagggaaggtcatgtgaagacaaaggcagggattggagtcatactgcccacaaaccaaggaacacctggggccaccagtagccaggaaaggctcatggaacagactgtttcctagagacttcagagagagcattgctctcctgacactttgattcctaactttcagcctccagaactgtgagaataagtttctggttttaaggcactcagtttatggtaggctttgttaaggtagccctaggaggccaccacacaggcactcaggattaacgcctcagagtcagaagaggctggcgtcccaggaaccgtgggctgccacacactctggtctgacgatctccaggtttgctttccatgacagagaaataagccctcggctgtgtaagcagttataggtaagcaagtttgattcctgtttggggacaggtcccacctgctgcccacacacccgggtgaatttccctgaccccactcctcaggcaggcagggtctccatatcaaagagggggcacctgaggctggctgcctgggggtcctgagtgcagctctcctggcttcgaggcaccccgatggggagaaggcagtgccgcaattgtcctttctcagctgagggcccttcccacccagcaaggagagcacagccatgctccaaggacaagagtgtctttactggagttgggactggggcctctataggggcttctggtttctgggctgtaggtttgtgaggtgtgggatcttaagtcaaaggtgggggactagggcagggtatcagaaggtgatgtcatcctcgtacagggacagcagcagcaggacggtccagccgcccagcaggcccacgttgtgcagcaggaagaggagccagggccgcgggtcccgtactttcaacatcgccgggagctgaggagcaagtgggcaccgggtcagcgcccctgctcagctcctctgctcagctcccggcccagagcagcccctcccctcgccatcctgaccatgtcgcagagtgctacgtagaggaacaggccggtggccactgccaggatccaggcctcgctctcctcgctgactccaaccgcgagtgccacgtagagaccagcgaaggccgtgagcgcggaggccaggttcagcagcagtgcttggcgcacggacagccccgcgtgcagcaaggcggcgaagtcccctgcgggcgagtccacattaacagctccgccctcctagctacatgccccgcccacctcctttcggtcccgccctcttaccaccaggccccgcccacctgttcccggtctccccgcccagccgtcagatcccgcccatcaccttccaggccccgccccacctgtttccggtctccccacccagccaggtgcggccccgcccatcttccaggccccgcccacctgttccaggtctcccctcccagccccgtgcggccccgcccatctccttccaggccccgcctgcgctcacccagctcgtgtggcaactcgtggcagaacacggccagcgaggtggccagcccggtcttccaggaggacgcgaaggcggcgcccacggccagcccgtcggcgaagttgtgcacggcgtcgcccagagtgatcatatagggcagtagcctcaactctgcgggcgcagaggcccgtgggttcgcgtggcctgtcgcctaccgccaagccttgggccccacccgcgctccacacaaaccccagatcccccagcccttccggggtcgccccctgggctcacctgggctcagtctcctgggctcagggttcagcagctccgggctctcctccgccacctgggaggagccttgagtaagtcccgcccggaagtggaggaggaacgcggtggggcggggcggggccccagatcaccgcgggaggcggagccgcaggcctggggtggggctgggagtgtgggcgtgggaaggggtcggtgggaggggctccgcgtgggatggggcatctggcgcccactcaccaggtctgcgcgggagccctcgtgggggggcttgggctgccggagctcgctgggtgccagctgcagggacacaccgtggctgtggcccccgtggctatggctgctgtggccgcagggcccgtcctccaggtcctgtgagggtaggtgctcagtgtccaccaggcccccagcacacccacccgccgggtaccttcccaagaagcctgacctccgggtccctgggcagcaggagattgaagaggttctcaaacaggaagaaggcgtagagcccggccagcatagccaggaggcgccaggtgggctgtgggctgaggccctcttcgctgtgtgtatgcagccccagcacctggggagtaggggcgctgggctgggggggaggtcccagggcgcctcccaccaagacccagggagaggggtcaggaggtggggtgggtaaggtccctgggagggcacggcctgggagtccatggtggggaacggagggccagggtcgcgggtttgtgggggcagaccttgggcgtcagatgcaggacagcgtccccagtgactgcacccactgccaggctcaggaaggtctgcaggatgtagtgggtgacccccctgcagccagtgcaggtcagcagcaggaggccaaagaccgcgcagaggcagatgagcagcgtggccagggagccgtacagataccctgggggcgggtgaggcggctgtgagagcttttcttccagactcagcccctgcttcccgggcgctgctcaccagagctgcaggccgtcagtgtgggccaggccctcactcaggctgaccctcctgcctcaaagccccactctcctggcgacgccaccttcccctgtgtctgttgtttctacttccagcccctgctcactctctccatccctcatcctgggcagccactccttccttcctacacgggctccacctctgtgctgccagcacaatgtcggcgtgggcactcactctctgactggctgagctggtcctggacggggggcctggactgggaggtgcaggctccactcagctgctgttggagcagggcagggctcagttgggcccaggcctccggggtcaccccagcctgttccgacagtccatatgcagccatcacgtccctggcactcaggcatacctggggggtggcaggacaggctcaggggcccaagcagaccccggtgaggccccatcttaccccagggcgcagctcaccgtgtcccacacactggagctgttgctggagctgatgaggggcacagggtcccggctgctggctcccctgtgccgatgactgtggtcactgtgggcctccctgcccacccccaggcgctgcatcaaggctgacagctctggcagggagaagagttggcaccgcgagtctgtgtgggctccggccctgccccccagggacgtggaggctggggactcgggggtgcccccctccacagcccagcccaggcctcaccggccagcgtcatagggacctcgctgctgtgctgctggaacacaaagtccacgaagtactgagggctcggcaaggcgtggaagcaagacccgctcctgacatggtccagcagggcagccaggacgccgccagcactgcccggagcccccgcccccaccgcctcctccagcagctgagggatatctacgcaggcctggggaagagggggcctccgcctcagcctttggtgtgaccttctgccatccaccccgctgcccctggatgcatctcccaccccaactacaggatctgcccccaccagccccgcccctccctggagccacagccctccctgccgggcccagctgcttcaggctcccactcagg

SEQ ID NO: 587890 - DNA, 4001 bp, Homo sapiens
ggccctcactcaggctgaccctcctgcctcaaagccccactctcctggcgacgccaccttcccctgtgtctgttgtttctacttccagcccctgctcactctctccatccctcatcctgggcagccactccttccttcctacacgggctccacctctgtgctgccagcacaatgtcggcgtgggcactcactctctgactggctgagctggtcctggacggggggcctggactgggaggtgcaggctccactcagctgctgttggagcagggcagggctcagttgggcccaggcctccggggtcaccccagcctgttccgacagtccatatgcagccatcacgtccctggcactcaggcatacctggggggtggcaggacaggctcaggggcccaagcagaccccggtgaggccccatcttaccccagggcgcagctcaccgtgtcccacacactggagctgttgctggagctgatgaggggcacagggtcccggctgctggctcccctgtgccgatgactgtggtcactgtgggcctccctgcccacccccaggcgctgcatcaaggctgacagctctggcagggagaagagttggcaccgcgagtctgtgtgggctccggccctgccccccagggacgtggaggctggggactcgggggtgcccccctccacagcccagcccaggcctcaccggccagcgtcatagggacctcgctgctgtgctgctggaacacaaagtccacgaagtactgagggctcggcaaggcgtggaagcaagacccgctcctgacatggtccagcagggcagccaggacgccgccagcactgcccggagcccccgcccccaccgcctcctccagcagctgagggatatctacgcaggcctggggaagagggggcctccgcctcagcctttggtgtgaccttctgccatccaccccgctgcccctggatgcatctcccaccccaactacaggatctgcccccaccagccccgcccctccctggagccacagccctccctgccgggcccagctgcttcaggctcccactcaggcctctgggttcctccctcatgaggtccctcccggggctcctacaggctcccaactgcccagtagtgagccccacgttgtgaatccccagccgcaggccgactcctgggcgtctccccaggcccccaggctccccgaaggctttgcagccaggccgggtcccatgggccgtgggaccctcctcacccactcccctggtctgcctggactctccctcaccatcttgggggtctggccggcagcccgggcctgcatcctctgcagcagccagctcaggcccggggtcagggccttggggctctcgagcagggccaggaggtggtctgcatgagaggcccagaggccagcccgagcgtcctcacaggtgccctcggggttgctgaggtacaggacggcggcggcactgaggcgggcgacgtacctggcctccaggaccgggcccgggggcagccctgacccctcaggctcgcccaggcccagggcgtcctccacagacaggcactgtgggcagagacaagtgagcaggggcgctgggcccaccagggaggggagaggcaggcctggccaggggcttccccgagggcctgtttccctttcaagtccaacaacgtccaccatcctctctcaacccctggcgcccttccgtctccccaggcccctgtcctgcttccccaactacaggggtgcacgcagaggggtccccaacagtggtcccccatccccaggggactcccctggagccactgccaatttgatggcagagggccggcagggggagttggccctggggtcctggggagaagagggactgtgtccctggaaaggcctgtctgccctcatgagcaggagggtgggctctggcctgtggggagggtcagggtgcccaggtactgccactagcctcctccgcctcctggagtttgcccagggccctttgctgccggctggcagggcggagctggcgggaagaggccagggctgggggacccgtcgggtggggctgttacctttccacacggcccgttggcgcagtgcacacggtccgccagcgtatttaacaggccgcccagagcctcttgatccagagcgccctggccagaggtgagcaggctcagcagaccagcaggcggggacgccgtcgccgtcaccaccagcacagccagaagcagccccagctccagcgagaccagggacgccatactcagctcccagcgtgctcagtgggtgttgctgtggccaaggcccagtgcttctgggctggctgagggcggctttgctggggttgtccagggccagactggggctgggctaggacccgcccgggctgcatgaggacctctcccaggtattcctgcagagctctgtgattggctgctggagatgcctgggttaaccattccagtggcagatcctccccaacagcctggagccactgcctgtgggggtcgagggctgggccccttcccctggacaggcagcctcggtggtcttttttttttcgagttggagttttgctcttgctgcccaggctggagtgcaatggcgtgatcttggctcacggcaacctccgcctcccgggttcaagtgcttctcctgcctcagcctcccgagtagctgggattacaggcagcgccaccacgcccggttacttttgtatttttagtagagacagtgtttctccatgttggtcaggctggtcttgaactcccaacctcaggtgattcgcccgccttggcctcccaaagtgctgggattaccggcgtggctcaccacgccaggccagcctgggtgggcttctgtcctctgcctgctgccccccaagctgtggggcagggctggggtgtccccttctggctgtccatctgggggctgcctccaagctgggggacacagggcagaggtgcacagatgcccccagagcctgagagctcccaggtccctgcctctgcccctcccaacagaggctgcccagacaccctcggtggcccctgttgggggtggggacatggacctccctcctcctgggtcctgggctgtggtccctgttggggactgcgatggagtcaaagaaactgaaaaggtgcctgctgcatcatgctcccttaggccggagacagccccaggaagctccaacacagacaaacaggaagacggagctgggccctggcagccacctggccgagcttgggtcaggataagattggggcaagaccccagctctagccccgggggcagggaggctgtggctcccagccctgccctctctgtgggctccctctctggcctttgagcctagaggccttatctctaccgtggtggtgatggcaggaagtctgggggaaggggaaggcagatctcagggcagctttgccttctgaagggggagtccagatgccacctcccgcccggtccagccagcctgaccctgagcattgtgggtggggctggggtggggagctgggtgcctgaggcccaaggactctgtcccgccatacacagggtgggacggggcagggcgggcattgagcccagtgtcctggggtcagggtgcttcccctgccggcctcaccccaccaagcggatctcatggtgctcctctggctgggcccacccgcagtggtatccttctgggggcccttaggggagcctgccgggggtgcagatcctgccgggggtgcagagcctgctgggggtgcagatgatttctgggtcccaggaccatgagggggctgctctacacacagcctgaagatgctgcggacccaaactggccctttccctcccacaccaccccaggaccaatgggctggctggaggccacccatgctaaaataggctcaagggcctactttagcttctgggcaaaggtcttggcctgggcctgactctgtggccttcctgagctgcctccccagtaggcctcagtgctgggctacaggcctcc

SEQ ID NO: 587891 - DNA, 4001 bp, Homo sapiens
cctggggggtggcaggacaggctcaggggcccaagcagaccccggtgaggccccatcttaccccagggcgcagctcaccgtgtcccacacactggagctgttgctggagctgatgaggggcacagggtcccggctgctggctcccctgtgccgatgactgtggtcactgtgggcctccctgcccacccccaggcgctgcatcaaggctgacagctctggcagggagaagagttggcaccgcgagtctgtgtgggctccggccctgccccccagggacgtggaggctggggactcgggggtgcccccctccacagcccagcccaggcctcaccggccagcgtcatagggacctcgctgctgtgctgctggaacacaaagtccacgaagtactgagggctcggcaaggcgtggaagcaagacccgctcctgacatggtccagcagggcagccaggacgccgccagcactgcccggagcccccgcccccaccgcctcctccagcagctgagggatatctacgcaggcctggggaagagggggcctccgcctcagcctttggtgtgaccttctgccatccaccccgctgcccctggatgcatctcccaccccaactacaggatctgcccccaccagccccgcccctccctggagccacagccctccctgccgggcccagctgcttcaggctcccactcaggcctctgggttcctccctcatgaggtccctcccggggctcctacaggctcccaactgcccagtagtgagccccacgttgtgaatccccagccgcaggccgactcctgggcgtctccccaggcccccaggctccccgaaggctttgcagccaggccgggtcccatgggccgtgggaccctcctcacccactcccctggtctgcctggactctccctcaccatcttgggggtctggccggcagcccgggcctgcatcctctgcagcagccagctcaggcccggggtcagggccttggggctctcgagcagggccaggaggtggtctgcatgagaggcccagaggccagcccgagcgtcctcacaggtgccctcggggttgctgaggtacaggacggcggcggcactgaggcgggcgacgtacctggcctccaggaccgggcccgggggcagccctgacccctcaggctcgcccaggcccagggcgtcctccacagacaggcactgtgggcagagacaagtgagcaggggcgctgggcccaccagggaggggagaggcaggcctggccaggggcttccccgagggcctgtttccctttcaagtccaacaacgtccaccatcctctctcaacccctggcgcccttccgtctccccaggcccctgtcctgcttccccaactacaggggtgcacgcagaggggtccccaacagtggtcccccatccccaggggactcccctggagccactgccaatttgatggcagagggccggcagggggagttggccctggggtcctggggagaagagggactgtgtccctggaaaggcctgtctgccctcatgagcaggagggtgggctctggcctgtggggagggtcagggtgcccaggtactgccactagcctcctccgcctcctggagtttgcccagggccctttgctgccggctggcagggcggagctggcgggaagaggccagggctgggggacccgtcgggtggggctgttacctttccacacggcccgttggcgcagtgcacacggtccgccagcgtatttaacaggccgcccagagcctcttgatccagagcgccctggccagaggtgagcaggctcagcagaccagcaggcggggacgccgtcgccgtcaccaccagcacagccagaagcagccccagctccagcgagaccagggacgccatactcagctcccagcgtgctcagtgggtgttgctgtggccaaggcccagtgcttctgggctggctgagggcggctttgctggggttgtccagggccagactggggctgggctaggacccgcccgggctgcatgaggacctctcccaggtattcctgcagagctctgtgattggctgctggagatgcctgggttaaccattccagtggcagatcctccccaacagcctggagccactgcctgtgggggtcgagggctgggccccttcccctggacaggcagcctcggtggtcttttttttttcgagttggagttttgctcttgctgcccaggctggagtgcaatggcgtgatcttggctcacggcaacctccgcctcccgggttcaagtgcttctcctgcctcagcctcccgagtagctgggattacaggcagcgccaccacgcccggttacttttgtatttttagtagagacagtgtttctccatgttggtcaggctggtcttgaactcccaacctcaggtgattcgcccgccttggcctcccaaagtgctgggattaccggcgtggctcaccacgccaggccagcctgggtgggcttctgtcctctgcctgctgccccccaagctgtggggcagggctggggtgtccccttctggctgtccatctgggggctgcctccaagctgggggacacagggcagaggtgcacagatgcccccagagcctgagagctcccaggtccctgcctctgcccctcccaacagaggctgcccagacaccctcggtggcccctgttgggggtggggacatggacctccctcctcctgggtcctgggctgtggtccctgttggggactgcgatggagtcaaagaaactgaaaaggtgcctgctgcatcatgctcccttaggccggagacagccccaggaagctccaacacagacaaacaggaagacggagctgggccctggcagccacctggccgagcttgggtcaggataagattggggcaagaccccagctctagccccgggggcagggaggctgtggctcccagccctgccctctctgtgggctccctctctggcctttgagcctagaggccttatctctaccgtggtggtgatggcaggaagtctgggggaaggggaaggcagatctcagggcagctttgccttctgaagggggagtccagatgccacctcccgcccggtccagccagcctgaccctgagcattgtgggtggggctggggtggggagctgggtgcctgaggcccaaggactctgtcccgccatacacagggtgggacggggcagggcgggcattgagcccagtgtcctggggtcagggtgcttcccctgccggcctcaccccaccaagcggatctcatggtgctcctctggctgggcccacccgcagtggtatccttctgggggcccttaggggagcctgccgggggtgcagatcctgccgggggtgcagagcctgctgggggtgcagatgatttctgggtcccaggaccatgagggggctgctctacacacagcctgaagatgctgcggacccaaactggccctttccctcccacaccaccccaggaccaatgggctggctggaggccacccatgctaaaataggctcaagggcctactttagcttctgggcaaaggtcttggcctgggcctgactctgtggccttcctgagctgcctccccagtaggcctcagtgctgggctacaggcctcctccattccctccattcatgtgaccccacccctcccagcagaaactctcttccgtagcccaggagcagctgttgagggtttcacctgcccatgccccagcctaaggccggcttccccagagcagacgggttgcactctcctgcccctcaggcccactctgtcatccaacaagctcactgcaactggcccatcttaaaaacaacaccggctggtcacgctggctcacacctgtaatcccagcgctgtgggaggccggggcggggggatcacttaaagtcaggagtttaagaccagcctgggcaacatggtgaaacccgagctccactaaaaacacaaaaacaaattaaggcaccctgagtggtg

SEQ ID NO: 587892 - DNA, 4001 bp, Homo sapiens
ggagggttgccagggtcgcaggcggcttccctcgggagtggtcacggggtgaaggccgcagacaccatgagcaggtcaggccgaggatggagagacaggccggggggccgggacagggccagcagtgtctgtctcattcttccctccccagtcagcctaaaagtgaattccaggctgcaaggaaagctcaagcccaataggaagtcagcgactccatctcagtccccagcacctgaggcagcacggccacgggacgcctgccgggtgcccacagagccaggctgcaggagtgagtggtcccgagtatcaggggacagcttcctttgttttaagcaccttggcaagaaaaataaacacttttcatcgtatcttcaaaacggccccgggagggcacagctgccgcctccctgcctcgcaggtcctgctctgacgtccccggcggtgagaactcggtctcccccgttcgtagcagggggctgccactgggacggctctgacggggcatttcccagcccggctccaaacacacacaacgctgggcccagtaaataagttttgttttttcccagggaaaagttgaacaacaatggtgagaccaggaaggctctccgttcacaggaaatactgtgtcaccgctcggccgcaggctgtgtgaggtcacgggcgacgctcgggtcacgtgtggcggctcctgttcacagtgccgtgtgtgataaactgggactttctggtgaggggagactggcggggggtggggagggcaaggagtgggaaagtcgcctataaatgtttaacaaaagatccgcaatgggaacaggaacttgcattctttctttcaatggacaaagcttccacatcaagatacgcttgtgtgctgggaccaaatgccacagtgcggcgaaactcgtgagcacaagtcctgcgtgggaaaggcttagcatccttgagtgacctctgatgaatttaagtcaaggaacactgtcaggagccacttctgaagggccccagacaggaaagacactgggccgggggagccgggcccccagggctcgggccacctgcttgcaagaggggaagggccactggcactgggcccccggcactgaggctctgtgctggcgagggccccacagctgcaaggaatgttccagaaccactacagccacaggaagatagggagggggtgaaaagaggggcaagctcaggtgcttttcctgagcctactacaaaccggcccgtcatttagggtggaggggacagcagcaccttgagtgttctcacatgtgccgccttcccactccaacacccacggcccacccagcccctcccggagtgccagccatggctctctgaaccctgtgggagaatctggcattgaagggccggggacaataagttcccgggctttggccttttgtaggagaggaggaattgaaacttgaaacccaggacccagcgcctcatttctagagggtgaggcagagccctgaggggagagctgtgtggagtggagctgttgggtgcccgagaggctgtggctcaccgcaagctttagatggagtgatctgggtggaggcagcagttttgaaattgagcattctaacctttctgaagactccattgatttgacctcagtggactcacaagggtctttggacgggacagccctgaggctgggcttgctttccccatagatgatgctgtccctgccgccctgtgccaggcacctcccagcaactcccagggggccactgtttctcctcttcaacaaggaggggcgcctcaacagcctggctagaggcccctggccagacccaagcaggacgctggcgctccagaaagccagcgggaacattccgcagctgctgtcctgtctcagggccgaccctgtgtccagcttgtgggcacctgtcttcactggcaggcacctgtcttcactggccagctcctcgggcaggcactccccgcagctggagcatgggctcctctctgccctatcagcacagccacccattctcggctctttaaaacagatgttgcaacaagcaaacatctttgtgatgacacagtgatgttatcgtagctgtataaacaaccgtatggcctttggcctgagattccggaagcttcctgaagagcacaaaatgcaggtcaggccatgtcctgcagccctggctaagctcaggggtcaatcagttccagaagccaacagctaccccaggccttggaagagagaaaggaaagttctaattcaatacatcccaaacccatctctggatgtgccgcttcatatctagacctcctctggggtcccctaactcagagaaaaggctctgtcacccaccactcatgctgtcaggaccccgggcaccaacaccacccgccccacagcccacctggcgccaggtgccgctgcctcctcggctgcacatccccgccgtacacttgtctccccatcggctcctcccgcccatgggaccttcgaagacactgctgcctctgcctgaagtactttaccttccccccttacctgacattcaataactgcttagtgcccttaaaagagctgcactctcaggagcagagttttgtgagcatagcaggcttccaactgacccctggttcctccctcatcctccgtaacccacccgccacctgcagtcagagtgaccacctaaaacccactgcttgcacctgccgtggcgtccagggccctcaaagtcctgcctcatgcctgcagcccacaacaccctaccctacccactggctggacagcccatgccagaccgcttccctctccacaccagactccaaccgcccaccccaccctacctcctcttctagaaaacaccaggctcacatcccgctcagaacctcagccacggccactggggagggtccagccagtgccttccccgggtaggggcagctcccctggtgtccaggcactcccttgtcaaggccacaagcttcaaggcagtgggaccatccaggaccgcatcctaggaggctctcaacaagcacgtggcaggtgacggcacccgcagaccacggcctgcacccatggcagagaccctgctgccactccagtgcgtgccaggtgggccctgacaacagacccactgggtgatgagcctgacttccctacctgcacctccctcacagccaaagcctggccaacagcaggggccacaaggcctccaagcagaaatgctcggctctgagcttgcagcccaccccactctggctgcgggactttggagcagcttgggctttgaacgtgctgccctgcatgtaaaggggcacgctgggaaaggtgggcattatggagattaaaggagaacatggtgcgcacagctcagcgctggacactagatccctgcctgcactcccgaggccgtggtgctctgatgacatccatgggcagtgagttcaaaatgctggaaggacaacaccacagcaccattacacgatgataagaaagttctctgcaagtctacttactctcggtaaatgaattacatgtcagaggccgcattagactattttccacaacacagccggcccggtgagtagactcttggaagtaggtttcccagaagctgaagaagcacaggcctctgtttctgcatcaccgactcaaataagacccactgtggctgtcagggctgggccctggaggtctttaaagttaaaggtgctgtcagagcaccccatctcaacaagggagggccgctcctgaagtccccgcccttccatcagaaagcctctcaggacagaaggcagagagggaagcggccgcaaagacccatgggtgccgagggttcccagcacggccaacagggccctgcacactcacaggacagtccttgtattggagacaaacagctgtgccggagaggggtcctgagacagcagctccggtggccacgtgaaggtctgaagccccaagcgtgcccagctccaggatggggtaagcagcgggggaggtagggccctgg

SEQ ID NO: 587893 - DNA, 4001 bp, Homo sapiens
tgttttcatgcccacctgcgtctgtgaatttccgttttcacgcccacctgtgcgtctgtgaatttccgtgttttcacgcccacctgcgtgtctgtgaatttccgtgttttcatgcccacctgcgtctgtgaatttccgttttcacgcccacctgtgcgtctgtgaatttccgtgttttcacgcccacctgcgtgtctgtgaatttccgtgttttcatgcccacctgcccgtgtctgtgaatttctgttttcatatccacctgtgtgtctgtgaattttcgtgttttcatgcccacctgcgtgtctgtgaatttccgtgttttcacgcccacctgtgcgtgtccgcgaatttccgtgttttcacacccacctgtgcgtctgtgaatttccgtgttttcacacccacctgtgtctgtgaatttccgtgttttcacgcccacctgcgagtgtctgtgaatttccgtgttttcacgcccacctgcgagtgtctgtgaatttccgtgttttcacgcccacctgcaagtctatgaatttccgtgttttcatgcccacctgcgggtctgtgaatttccgtgttttcatgcccacctgcgtgtctgtgaatttccgtgttttcatgcccacctgtgtgtctgtgaatttccgtgttttcatgcccacctgcgtgtgtctgtgaatttctgtgttttcatgcccacctgtgcgtctgtgattttccgtgttttcatgcccacctgtgcgtgcctgtgaatttccatgcttttggaaatgcctgtctctgagccatctactgtccacaataaccttggattcaagtcaacagcaacaatgataagatgacagcatcttccagtatctcccacagccaggcactgttctaagcacacctgggaccctcttagggttggtttgcgaatgcaatcactttacacacaaagaatcagagtgtggcacagaagggctcccgaattcgcctgcatgacacagccagtgactgtcagtgctggcgaccctgccctttgcctcgttgttcactgtggcctggcagggacagcgggagaggtgagccccggccgagagccagtacttatcagtgccaattctgccccagatgctgagctaccactttgccaaaactgtaattcaacgtcaacatccgaagatcactcctccccaaacctggctgaaaacaggagacgaaaaccaccatcagggcaggctgaagggagaggagacaaagactccagtgcccggggctctccaggacgcaccatcctctgcctccagaggatcagagccacgcccagtccgctagcactccgctcagcgttcactgcgcacagacggggaggagacttaccaatctgcaacagtattggtgtgaccagagcggtttccatggcgtaacagaactccctgccaaacatcaccgccccgtgcatcacccacaggcgcatggggattcggtctatggacccctcgctgatggtctcgcagttctcggcctctgcgcctccggctttctgcgggtccggcaggggcacggataactcttgaacttgcatagattccgggtcggcattctgcggagccattttcattaccaccaaaaatatatgtatttatctatatattctatctatataaataatgctttcatatatctgtaatgataaattaagacgtcttctctttctgcttctgctgtgttcctcgggcaggtaacacttacattcctctttgcacaagtggctatctcacaacttctcacaacggtatgagacatgcagcaacacagaacgatttttggttggattttaaacatatggcttgctggtttactgtgaattagagttaaaaatccataattgccattcagttaataccagtttcatcattattactgaagaggtgctgaagtgatttttcttgctacagagaggtgggaaggtgatacaaacaggtggtccgctggtaatccccatcgagtgactggatgatctgcaaaagaggaaaacaacccggccagagagtcaggggacggccaccagatggccctgtggaccgccgcccgacccccgagcaagccgtgtgccccgagggcccgacccaagatcacacagctctctgccactcactctgggtacgtctgtgcaaataaccaaacctactttctagaaaaacattttctcatacgaaagtgaatcctggggaaggacaaaggtggggcaatcaaggaaagcaggatcaaagaacagacagagaaaaacgctggaaatattcactctttggccagtaacaatatcgtccaccctgtgtaccacagcacgtaactattccagcaggctggaggcagctggcgacaccctttgtggctgcagatatcatgaaagggaagtaaggaggtgaagggaaaagtgggggaggtaggcaaaagagaatcaaaagggaaaacttttgtttaaaaaagtttaatttgttagtgacaaggtctcgctccgttgcccaggctggagtgcggtcacacgaccatggctctctgcagcctcaaactcctggaatcaagtgatctcccacctcatcctcccgagtagctgcgactacaggcatgcaccactacacccagctaatttttctagggtccccattacattgacctggctggtatccaactcctgggctcaagcgatctaccctgcctcggcctcccaaagcactaggatttacaagtgtgagccaccgtgcccagccaaaaagggaaactgtagaccctgcctggagaggtggaaattaaaaataaaaagcagctgggcacggtggcttaagtctgtaatcccagcacattggggggctgaagcaggtggatcacctgagattaggagttcaagacctgcttgggcaacatggcgaaagcccatctctactaaaaatacaaaaattagccaggcatggtggcgggcgcctgtaataccagctactcaggagggtgaggcaggagaatcacttgaacccgggaggtggaagttgcagtaagctgagatcgcaccactgcactccagcctgggcaacagagtgagaccctgtctcaaaaaacaaaaacaaaaacaaacaaacaaaaaaaacaaaaagaaaagaaaaatgaaaagtaggaggctgggtggaatgagcatagcatgattctctgtccggggggagttcgaagtctacccaaaggcacctggactcctgtggtattggcctttaggttataaaacctcttgggaataaaatgaaattatagaccttttctccagaaaaaaatgtacgcatgtgccaaactctgactatagtacctaggggttcggagactcccaacccacacgcagctttcccagggtctacggaaccctatcaccccaaccctcggctttccaccaccctgcctccagtgacaaacccagcttggtgacaaattccccacctgggcaaacacatacaataaagcagcaataagctaactggaaatgccaccttggaaatgttttaggaaatgaggtcaatctctcctcaggtaagataagatcggggatgtggaacaccccaagttcaggacttctggagttaggtctccagacatggggttcggttcaactgaagtgttagagcccctaaaaacacacctaaatggtgttcacagtttatattaaggtaggtctatgggccaataccttactgagaatttttccaacaactggtttcaacaaaaatatttctcattactttccaccgaaccaaaggtggtcttaattagctcctcctctctttctccccagaggagaccagaaacctcgaggtgctgtcttcactcggctcctctctcacacagccctgatggagaaggtgggtccctggcacgtgggccccaggagggagaagactccgctgtacaggaggttctggaaggaagccgtgcgcctggctcttacgtcccagctcttccctacatcttctttcacgctgcag

SEQ ID NO: 587894 - DNA, 4001 bp, Homo sapiens
agcgagcagaatgtcagggctgactgcgccaggacctggctcctagccctgagttccacccgcacaggggctgggggtccttgtgtacctgcacagcacacccatggccaggaagcaggccaggggattggcagcactgcccagcaccacagccaggtggtaggccagacgcccgtagggtaagcaggaaaagctctgcacggcaggcagcacgccattggtcagcgcgttggtggcggccaacaggcccagcaggcaggcactgcgggctgatagaagctgataggccttagggtctggaccaggggtggtgcctgctgcctggcttggtggctcttgcagtggtgaggactcttccacctcttcctctgctcctggggctcccacctggaggcctgatcctaactcccctgtgggtacagatggtggtggcggcaacagcagcagaagaccctggaaggcagcagctgaagcgaccagaagggcagtcagtgcccagaagaaggtgctggcgggaaaacgctcaaggaagtcgagcggggggccaggggtgccgttgatgggggctggcgggcactcgaggcggcccacaccctgcactagggccagcacgcagggcagcagggcactcaggccttgacccaggaagaatgaccgtaagaagcgaggtggcaggtggctcaagaagggcaggaaagtgacattcgaggcacagcatgccagtgccagcacaaaggccagtgctaagaaggccacagaatgcaactgtcctgccactggggccacatggtgccacagagaggccagcagggctgtgcccaccatgcccagcacctgcaccacccggatggggacctgctcgtcctttcctggggccagcctcctccagagggtcaccaccagcagacccaggttccccagagccacaagcacagagacgtaagaggggaggctccaacctgcagggaagggaggaggccatgtcagggtcatgatgcccaagggaggaagagtgccaaagcccaccttcctgggcacacctgcacctcctcccactcaccctctggaagctctctgaccaccacaggtagctccacccagatcccactgaccgcagcccaggagtcttgggcacacctgcacctccctcccactcaccctctggaagctctttgaccaccacaggtagctccacccagatcccattgaccgcagcccaggagcccatgccgaagagagccaccagcaggtgggtcagcaccggacgggcgggcgtgggtgctgccattcagcccaaggctgggcccttccaggtcagggcaaaggtcacagccagttcttttcccacctagggccagacacgctttggctctcctgggaagtgaagacttcttctagcttgaaagaaacagagaaacagataggatgcagagccggagtcagaacagggtgagaccaggggaactgggggagccccgggcaggagcgcagatggggaggattggctaaaacgtacccagcgggaccgccggcaggcagggaagcaggaagccggcccgagtcgctgcggccccaggggaggaggccgaaggagcgagtggagccctcctctccagggagaggcggggctggagtcaacgccaccaccaccccaagccggacgccgggaaagggcgcctaccaggaggagccacgcacaccccagggcttcacggtgcccgcgaccgcaagagccaagtcagatcccaggggagtggccgggacggctctgctcggaggggcgccgccctctcggtaccgtcaggtgggcgactcgggagccgtccggtccctgcgcctcccggtcccgcgcccagtgcgctcccgctccagtgccggcttcccgccacgccgggacaccgccgtccggcccagggacgccacctcagtccggagcgcgcaggacccggcagcagccacgacccgactcacccgtggcggttccgggcccgcccccggcatggcccacgaccggaagtcccgccccggaagctggtcggcgggcgggcgggcgttgagaggaaccggggggttgtcggtctataagcctcgcccgttccgctccctggggcttccccgagcgccgtcggtggtcatggctgccccagcctcccggcaggtccgacgcagagcccgggcagcgccgcggccccgctcggccgaggactggtggtgggaccggctggcgccgaggggctcggggtaccacctgctgcagtccgacagcatgctgctggtgctgtccgaacccggccccgcccggccccgcgcacagcggcgcgcttcccgccgcactccccggcagccgccccggggccccagcgccgcggccaagcccaaggccgggctcaggtccgaggcggcggccgcgcccgcacccgcaccggcacccacgcccacgcccgaggaagggcccgacgcgggctggggagaccgcattcccttggaaatcctggtgcagattttcgggttgttggtggcggcggacggccccatgcccttcctgggcaggtaacgctggtgccgggcccgccgccgagcgtagcggcttgggccagacgtggtccgagcggtggcccgggcgggggcggagggcgaaagcatcggagcgcgcaccgctcagtccgagagcgcagccccttaggcgcccagttggagtcccaggagcccggctttgagccggggtgtctactgcgctgcgagaggggggcatcgcctacggaggggccggcaccctcagcacgctgtcctcccagggctgcgcgcgtgtgccgccgctggcaggaggccgcttcccaacccgcgctctggcacaccgtgaccctgtcgtccccgctggtcggccggcctgccaagggcggggtcaaggcggagaagaagctccttgcttccctggagtggcttatgcccaatcggtgaggggttccctctcttccttacccctggctccaggctccttccgtctccctgcaccaaggtgttgggtgggaaggactcgtgtgggaacattagtgcagctctgcctccgctgtcggcccaggttttcacagctccagaggctgaccctcatccactggaagtctcaggtacaccccgtgttgaaggtgagagctccaggctgtcctgcacatcagctgtgacactctgggactgttcagtactctaggaagtgggtcaggcaccttgggggcccaacgctgctccgtggggatgtctgcctgcctgcctggttctcttttcctgctgtttcctccagcagggaggtatcagaggcggggacacccaagtaggcctggcatgggcagaaaggaggtcacagctaaggcggtagagtggggttggcaccagccacttgtctgtttcccttgtggatcttagcctgtcgtctcccaaccccagctgcccctctgtctccccgcagctggtaggtgagtgctgtcctcggctcactttcctcaagctctccggctgccacggtgtgactgctgacgctctggtcatgctagccaaagcctgctgccagctccatagcctggacctacagcactccatggtgagccctgtgtcccaaggggccctgaaaaaacccaggccggggtgacgggtgctcttgtattggggccccaggtggagtccacagctgtggtgagcttcttggaggaggcagggtcccgaatgcgcaagttgtggctgacctacagctcccagacgacagccatcctgggcgcactgctggtaagttggcattggtgggagcagaggcagatgctgagctggggactgccaggccactgaccctgtgacctaccccctccccccatctctgcagggcagctgctgcccccagctccaggtcctggaggtgagcaccggcatcaaccgtaatagcattccccttcagctgcctgtcgaggctctgcagaaaggctgccctcagctccaggtacctggcgccctgcctc

SEQ ID NO: 587895 - DNA, 4001 bp, Homo sapiens
tgcgccaggacctggctcctagccctgagttccacccgcacaggggctgggggtccttgtgtacctgcacagcacacccatggccaggaagcaggccaggggattggcagcactgcccagcaccacagccaggtggtaggccagacgcccgtagggtaagcaggaaaagctctgcacggcaggcagcacgccattggtcagcgcgttggtggcggccaacaggcccagcaggcaggcactgcgggctgatagaagctgataggccttagggtctggaccaggggtggtgcctgctgcctggcttggtggctcttgcagtggtgaggactcttccacctcttcctctgctcctggggctcccacctggaggcctgatcctaactcccctgtgggtacagatggtggtggcggcaacagcagcagaagaccctggaaggcagcagctgaagcgaccagaagggcagtcagtgcccagaagaaggtgctggcgggaaaacgctcaaggaagtcgagcggggggccaggggtgccgttgatgggggctggcgggcactcgaggcggcccacaccctgcactagggccagcacgcagggcagcagggcactcaggccttgacccaggaagaatgaccgtaagaagcgaggtggcaggtggctcaagaagggcaggaaagtgacattcgaggcacagcatgccagtgccagcacaaaggccagtgctaagaaggccacagaatgcaactgtcctgccactggggccacatggtgccacagagaggccagcagggctgtgcccaccatgcccagcacctgcaccacccggatggggacctgctcgtcctttcctggggccagcctcctccagagggtcaccaccagcagacccaggttccccagagccacaagcacagagacgtaagaggggaggctccaacctgcagggaagggaggaggccatgtcagggtcatgatgcccaagggaggaagagtgccaaagcccaccttcctgggcacacctgcacctcctcccactcaccctctggaagctctctgaccaccacaggtagctccacccagatcccactgaccgcagcccaggagtcttgggcacacctgcacctccctcccactcaccctctggaagctctttgaccaccacaggtagctccacccagatcccattgaccgcagcccaggagcccatgccgaagagagccaccagcaggtgggtcagcaccggacgggcgggcgtgggtgctgccattcagcccaaggctgggcccttccaggtcagggcaaaggtcacagccagttcttttcccacctagggccagacacgctttggctctcctgggaagtgaagacttcttctagcttgaaagaaacagagaaacagataggatgcagagccggagtcagaacagggtgagaccaggggaactgggggagccccgggcaggagcgcagatggggaggattggctaaaacgtacccagcgggaccgccggcaggcagggaagcaggaagccggcccgagtcgctgcggccccaggggaggaggccgaaggagcgagtggagccctcctctccagggagaggcggggctggagtcaacgccaccaccaccccaagccggacgccgggaaagggcgcctaccaggaggagccacgcacaccccagggcttcacggtgcccgcgaccgcaagagccaagtcagatcccaggggagtggccgggacggctctgctcggaggggcgccgccctctcggtaccgtcaggtgggcgactcgggagccgtccggtccctgcgcctcccggtcccgcgcccagtgcgctcccgctccagtgccggcttcccgccacgccgggacaccgccgtccggcccagggacgccacctcagtccggagcgcgcaggacccggcagcagccacgacccgactcacccgtggcggttccgggcccgcccccggcatggcccacgaccggaagtcccgccccggaagctggtcggcgggcgggcgggcgttgagaggaaccggggggttgtcggtctataagcctcgcccgttccgctccctggggcttccccgagcgccgtcggtggtcatggctgccccagcctcccggcaggtccgacgcagagcccgggcagcgccgcggccccgctcggccgaggactggtggtgggaccggctggcgccgaggggctcggggtaccacctgctgcagtccgacagcatgctgctggtgctgtccgaacccggccccgcccggccccgcgcacagcggcgcgcttcccgccgcactccccggcagccgccccggggccccagcgccgcggccaagcccaaggccgggctcaggtccgaggcggcggccgcgcccgcacccgcaccggcacccacgcccacgcccgaggaagggcccgacgcgggctggggagaccgcattcccttggaaatcctggtgcagattttcgggttgttggtggcggcggacggccccatgcccttcctgggcaggtaacgctggtgccgggcccgccgccgagcgtagcggcttgggccagacgtggtccgagcggtggcccgggcgggggcggagggcgaaagcatcggagcgcgcaccgctcagtccgagagcgcagccccttaggcgcccagttggagtcccaggagcccggctttgagccggggtgtctactgcgctgcgagaggggggcatcgcctacggaggggccggcaccctcagcacgctgtcctcccagggctgcgcgcgtgtgccgccgctggcaggaggccgcttcccaacccgcgctctggcacaccgtgaccctgtcgtccccgctggtcggccggcctgccaagggcggggtcaaggcggagaagaagctccttgcttccctggagtggcttatgcccaatcggtgaggggttccctctcttccttacccctggctccaggctccttccgtctccctgcaccaaggtgttgggtgggaaggactcgtgtgggaacattagtgcagctctgcctccgctgtcggcccaggttttcacagctccagaggctgaccctcatccactggaagtctcaggtacaccccgtgttgaaggtgagagctccaggctgtcctgcacatcagctgtgacactctgggactgttcagtactctaggaagtgggtcaggcaccttgggggcccaacgctgctccgtggggatgtctgcctgcctgcctggttctcttttcctgctgtttcctccagcagggaggtatcagaggcggggacacccaagtaggcctggcatgggcagaaaggaggtcacagctaaggcggtagagtggggttggcaccagccacttgtctgtttcccttgtggatcttagcctgtcgtctcccaaccccagctgcccctctgtctccccgcagctggtaggtgagtgctgtcctcggctcactttcctcaagctctccggctgccacggtgtgactgctgacgctctggtcatgctagccaaagcctgctgccagctccatagcctggacctacagcactccatggtgagccctgtgtcccaaggggccctgaaaaaacccaggccggggtgacgggtgctcttgtattggggccccaggtggagtccacagctgtggtgagcttcttggaggaggcagggtcccgaatgcgcaagttgtggctgacctacagctcccagacgacagccatcctgggcgcactgctggtaagttggcattggtgggagcagaggcagatgctgagctggggactgccaggccactgaccctgtgacctaccccctccccccatctctgcagggcagctgctgcccccagctccaggtcctggaggtgagcaccggcatcaaccgtaatagcattccccttcagctgcctgtcgaggctctgcagaaaggctgccctcagctccaggtacctggcgccctgcctctcccacctgtcacaccctccccca

SEQ ID NO: 587896 - DNA, 4001 bp, Homo sapiens
gagaggccgcccagccctgccaaggacctgcagtgagcgagcagaatgtcagggctgactgcgccaggacctggctcctagccctgagttccacccgcacaggggctgggggtccttgtgtacctgcacagcacacccatggccaggaagcaggccaggggattggcagcactgcccagcaccacagccaggtggtaggccagacgcccgtagggtaagcaggaaaagctctgcacggcaggcagcacgccattggtcagcgcgttggtggcggccaacaggcccagcaggcaggcactgcgggctgatagaagctgataggccttagggtctggaccaggggtggtgcctgctgcctggcttggtggctcttgcagtggtgaggactcttccacctcttcctctgctcctggggctcccacctggaggcctgatcctaactcccctgtgggtacagatggtggtggcggcaacagcagcagaagaccctggaaggcagcagctgaagcgaccagaagggcagtcagtgcccagaagaaggtgctggcgggaaaacgctcaaggaagtcgagcggggggccaggggtgccgttgatgggggctggcgggcactcgaggcggcccacaccctgcactagggccagcacgcagggcagcagggcactcaggccttgacccaggaagaatgaccgtaagaagcgaggtggcaggtggctcaagaagggcaggaaagtgacattcgaggcacagcatgccagtgccagcacaaaggccagtgctaagaaggccacagaatgcaactgtcctgccactggggccacatggtgccacagagaggccagcagggctgtgcccaccatgcccagcacctgcaccacccggatggggacctgctcgtcctttcctggggccagcctcctccagagggtcaccaccagcagacccaggttccccagagccacaagcacagagacgtaagaggggaggctccaacctgcagggaagggaggaggccatgtcagggtcatgatgcccaagggaggaagagtgccaaagcccaccttcctgggcacacctgcacctcctcccactcaccctctggaagctctctgaccaccacaggtagctccacccagatcccactgaccgcagcccaggagtcttgggcacacctgcacctccctcccactcaccctctggaagctctttgaccaccacaggtagctccacccagatcccattgaccgcagcccaggagcccatgccgaagagagccaccagcaggtgggtcagcaccggacgggcgggcgtgggtgctgccattcagcccaaggctgggcccttccaggtcagggcaaaggtcacagccagttcttttcccacctagggccagacacgctttggctctcctgggaagtgaagacttcttctagcttgaaagaaacagagaaacagataggatgcagagccggagtcagaacagggtgagaccaggggaactgggggagccccgggcaggagcgcagatggggaggattggctaaaacgtacccagcgggaccgccggcaggcagggaagcaggaagccggcccgagtcgctgcggccccaggggaggaggccgaaggagcgagtggagccctcctctccagggagaggcggggctggagtcaacgccaccaccaccccaagccggacgccgggaaagggcgcctaccaggaggagccacgcacaccccagggcttcacggtgcccgcgaccgcaagagccaagtcagatcccaggggagtggccgggacggctctgctcggaggggcgccgccctctcggtaccgtcaggtgggcgactcgggagccgtccggtccctgcgcctcccggtcccgcgcccagtgcgctcccgctccagtgccggcttcccgccacgccgggacaccgccgtccggcccagggacgccacctcagtccggagcgcgcaggacccggcagcagccacgacccgactcacccgtggcggttccgggcccgcccccggcatggcccacgaccggaagtcccgccccggaagctggtcggcgggcgggcgggcgttgagaggaaccggggggttgtcggtctataagcctcgcccgttccgctccctggggcttccccgagcgccgtcggtggtcatggctgccccagcctcccggcaggtccgacgcagagcccgggcagcgccgcggccccgctcggccgaggactggtggtgggaccggctggcgccgaggggctcggggtaccacctgctgcagtccgacagcatgctgctggtgctgtccgaacccggccccgcccggccccgcgcacagcggcgcgcttcccgccgcactccccggcagccgccccggggccccagcgccgcggccaagcccaaggccgggctcaggtccgaggcggcggccgcgcccgcacccgcaccggcacccacgcccacgcccgaggaagggcccgacgcgggctggggagaccgcattcccttggaaatcctggtgcagattttcgggttgttggtggcggcggacggccccatgcccttcctgggcaggtaacgctggtgccgggcccgccgccgagcgtagcggcttgggccagacgtggtccgagcggtggcccgggcgggggcggagggcgaaagcatcggagcgcgcaccgctcagtccgagagcgcagccccttaggcgcccagttggagtcccaggagcccggctttgagccggggtgtctactgcgctgcgagaggggggcatcgcctacggaggggccggcaccctcagcacgctgtcctcccagggctgcgcgcgtgtgccgccgctggcaggaggccgcttcccaacccgcgctctggcacaccgtgaccctgtcgtccccgctggtcggccggcctgccaagggcggggtcaaggcggagaagaagctccttgcttccctggagtggcttatgcccaatcggtgaggggttccctctcttccttacccctggctccaggctccttccgtctccctgcaccaaggtgttgggtgggaaggactcgtgtgggaacattagtgcagctctgcctccgctgtcggcccaggttttcacagctccagaggctgaccctcatccactggaagtctcaggtacaccccgtgttgaaggtgagagctccaggctgtcctgcacatcagctgtgacactctgggactgttcagtactctaggaagtgggtcaggcaccttgggggcccaacgctgctccgtggggatgtctgcctgcctgcctggttctcttttcctgctgtttcctccagcagggaggtatcagaggcggggacacccaagtaggcctggcatgggcagaaaggaggtcacagctaaggcggtagagtggggttggcaccagccacttgtctgtttcccttgtggatcttagcctgtcgtctcccaaccccagctgcccctctgtctccccgcagctggtaggtgagtgctgtcctcggctcactttcctcaagctctccggctgccacggtgtgactgctgacgctctggtcatgctagccaaagcctgctgccagctccatagcctggacctacagcactccatggtgagccctgtgtcccaaggggccctgaaaaaacccaggccggggtgacgggtgctcttgtattggggccccaggtggagtccacagctgtggtgagcttcttggaggaggcagggtcccgaatgcgcaagttgtggctgacctacagctcccagacgacagccatcctgggcgcactgctggtaagttggcattggtgggagcagaggcagatgctgagctggggactgccaggccactgaccctgtgacctaccccctccccccatctctgcagggcagctgctgcccccagctccaggtcctggaggtgagcaccggcatcaaccgtaatagcattccccttcagctgcctgtcgaggctctgcagaaagg

SEQ ID NO: 587897 - DNA, 4001 bp, Homo sapiens
tttatttttcttgttttgagacagggtctcactctgtagcccaaactggagtgcagtggtgcaatcatagcttactgcagcctcaaactcctgggctcaagcgatcctcccacctcagcctcttagtagctaggactaaaagtgtgcacttccacactcagataattttttaagaaatctgaggaggtgggcaggtgcagtggctcacgcttgtaatcccagcactttcggaggcagaggcgggtggctcacatgaggccaagtgttcgagaccaacctggccaacatggtgaaagcctgtctctaccaaaaatgcaaaaataagccaggcatcgtggtgcacacgtgtagtcccagctactctggaggctgaggcaggagaattgcttgaacccaggaggaggaggctgcagtgagctgaaatcatgccattgtactctggcctgggcaacaagaggaaaactctgtctcaaaaaaaaaaaaaatctgaggagagggatctcactattttgcccaggtggtctcaaactcctagcctcaagtaatcctcccatttcagcctctcaaagcattgggattataggcatgagacatcacacccagccctattttaacttttaaatgcatccaaggttgctgtagggtgactgcttttataatgcacagatgaaaattatagctttatcattaatcagaatgcttgacgtgaaaatggtcaagtgcaagtaaaatcaatttgtattattacattcatcaatgaaaggaaaaaattataataaaatataaaacataactccaaaagtaagtaaataaaaatacttagagcctcaatgcgtcatacctacctacaacacaaacatagtctggcattggatcattcctggatttacagtttcatgggtgaggaatattttcacaaccccagcattcatccattaacagaaaggaaacagattaacacagaagtcccatacctgtggtcccagaaaggaaagttgaaaaagagaagttgttcaatcaaataagtaccttagcctaaataggaaaataattaagagtaggtaacaagtgccaggctggcatgatctgattcagaaagtcacaaagaagaaagaaacattaaatcatttaagactcaaaatacaacaaatgatatgcatttcatattgtatgcaataagtcatgattttagatttttttcctcaatggattgttacctgctataagtgtaaagcatgccccgcctgaatatgcaaaatatccttggaagatggcttgtataaggtgagagatatctggaagttcagcatcaaaagcattctgaaatcgttctacattctcctttttccctcttatcaggaacactactccagttagggaaatgaagctaagtatggacactttcagcactgagctagctatctgaagccaagtcacttctttcacaccacgagaagtcagaattcctacaatccacaacatggccaatgccagacatttcttaggcagctttgggacagagcagctgggaaaaaaaggctggatgctgtactcagcaaggagcagagcttggccagcaactacccctgaccccagaaacaaggatgtccagagattcaaaaaagcaaccgtggagccaaagtatctcttgagaaaatagtattgagctccactgcatgggaagcttatacttatctctgcagagcaaagagttgatgtcatggccagtatggcacagccagcccaaacgcacagggagactcccacgttcatgcaagagtatgccaacacacctttgggggacacaaaaattcctgcaccaatgatattaataagcaaaaaacttgtgccccaccaatatccaaacactctcttgagctgtattttctcccctctatccattgtaattgaagagttttaaaattctatataaattacaatttctagattttcctgcctatgtagctgcaaaggatgttgatggattcctgaaataaaataattctgtccttcctgttccattttcgttaagtatagcctggttttaataattaacaaaatagaggtggaaggtggggacaaaaaataataagtaacaaaatatatgtgacacattcaataaaatagaccaagatgtagaagggtttggtctgacttgtctttcaattatcatcaaaagaatgcattcagattttttttttttttaaaaaaaaggaatttccaagaagacatggattacagtgcaaagttggggcttcctactctacttcactgcttcccaaatgccttcccagttccctgctctggaaacaatcattttattttactttattttattttttgagacagagtctcactctgtcacctgggctggagtgcagccttgacctcctgggctcaagtaattcttccaccttagcctcccaagtagctgggactacgggcatgagccatcacacatggctaaggtttttggtggttattggtttgttcttggtggctgttgttttgtttttggtagagatggggggtctcactttgttgcccaggctggttttgaactcctgtgctcaagtgatcctcccaccttgtctcccaaagtcctgggattagaagccaaccattttaaagtatgtatggttttagatctttttggtgcttgtcttcatagctctaaataatataaaaagacttttatttctaaatatctcaactttagaaagcaaatactgacctcttcccatgaacactgaggaattagttcactgtccttttactgccttgactctctcttcttcacatttttttaaatcactaagctttcaggaaacaattttatcaggcttatattaccagaagctaattagcaaggcaagggagggaaatgctctgaaacataagcctgtcttttaaccagtcacctatcattctggtagccttagtcacatacagaaaattgtgaacagaaagtacaagagaaagaagacctggccccaggggcagagggaaggagggtcctaaccatcttgtcctaacctacaagtctagggctttagtagctcccacatttgtcgactttataatgcaaagccctgtcctgagaatttccaaagtctcataaacctggagcacatataagcctaggaaataagtatttctgtctctctgtctctctctctctctgtctgtctgtctcttttttaagctgggactagaggggtgtgccatgacacccagctaacttttgtgggtttttttttttcagtagagatagggcttccccatgttggccaggctggtctcaaacttctgacctcaggtgatccacctgcctctgcttcccaaagtgctgggattacaggcatgagccactgcgcccggcctagtaaagtatttctcaattgtcccctcagagtaagtgaaagtgaaattgcttggttttgctttggtttgggaaaactggctattttctggcagattgcatccaagaaaattcactgataatactacatagtgatatagggctgagtgcagtgggtggctcatgcctgtaattccagcactttaggaggccaaggtgggcggatcacctgaggtcaggagtttgagaccagcctggccaacatggcaaaaccccatctctactaaaaatacaaaaattagccgggcatggtggtgcccacctgtaatcacagctactagggaggctgaggcaggagaactgcttgaacctgggaggtggaggttgcagtgagctgagagtgggccactgcactccagcctgggagacagaaccagactctgtctcaaacaaacaaacaaacagaaaactacatggatttcggtaaacacaactagatccatgtcccaaataaaaccatgccttgtttcttctctcggagagcaaggacctgggagtgtgaaaagaataccagaaagttctccataagatagtgttactgaaccaggcctattttgttcacagcacagtatgccaatga

SEQ ID NO: 587898 - DNA, 4001 bp, Homo sapiens
agagaacagaaggtagaccacctagaatggggacaaggcacttccactctgcaaaggtgagtgtgcttgcagtgcaaagcaagaaacgtgaactttaaaattcttcaggcacatgtgttcaaaaggcaaagatacatgagaatgcaagatgaaaaactccagcgcaagatcaggctttttaaactgccacagctcccctgtctccccagctagcttctattcgccttcccaggctcctaagcccagtgacaggagagactctggaatgatcagagattctggaatgaaaagagctatgcccactgcttaggaggccaaggattctgcaaactgatccccgcagataccacagcgctttactctggtctccaaggccatggcacaccctaaaagattaaaatgccttaaggtaaatgaccattcccagatgaaggcacagaatgtaaacaaagtgtgggccgagggaagaaacttgaaaaatcacaataaagtggcctcccagagcaggcaactagcaactttgtaggaaaaggagagggaagaagtcctgtgttctgcactgagagatcatttcatgtcacgcttcagtgcaattaaaataaaaaaggatttactaattacaaagcaatcctaacaaggtacataatacagaatattcacatcttatacatctcctagagaaagattacaaacacagaatgtttcaccttccggaggagataattattaacttttaaagactagctcaggcaagaatgaaaaagtatcaagtcaaggccacatacattctaattttataacccaggcggccctggatgggattcagagagctcttatttgaataagatctgacgatatcctctcattaaaaggattagtgtttctgcacaaacgtctagataaatcttattactggtccaaaattagtcacctaaaggctttagccagttttgcacaaatatttacaactctgaagaggctgagtactttttctcttgaaatccaggcactatatccacttcaaaagccacatatgattgtggcttttgctgagcatatttcttttcgacgagttgaagatgacaatctctcaataccttactccatagactggatgtaagcgtcaaaagaggatgaaaaggtactttctgaacggacaggtactctggggtgatgggttgggagattctctaagcctcaagaacagcgtttcatgaaacgggcttataaaatacagcccatctcaaacggattttaaaaggcacccagttactttaaaatacccaatacaaacaccaagacgggctattttaccaggtcccctgcagaatgtgaaggggcttccagcgctccaagccggctttctaatttaagccaagaaccgaaaaggagcgaaggcggcttcggggaccccggcagcgtgcagggccaggaggttcagcctgcccacccggagaggggtgcgccgagctcctctggaaatagtgactgaagggtccccgcgaagtcgccgtgccagcccctctcccagttccagcggtccccgaagtccccgggcagagccggctgcacagggaccggacgaggcgaggcgcattccggggcgcagccccgaggacgaaggtccacggcttcagccccagcccacggccccgactccctgacgaagactcgctggagcgcggcctcagggcagctgcgcgcagctggactcgtccccgggagccctcgaccctctagttccccgccggccccagggcgccctcgccccgctccttccccgccggccccagcgtccgggctgcccctcgcccgcggcctctcggcggggctggagacctagcaacttactggggctgggttggggtcgcgccaagaaggcggcggtgggctgccggctgcagcgcgtcgggggcccgcggctgggggacgctggagcagcggccgccgcctcgctggtcccgcgaagaggagcgcccgccggccgcgctgcagaaggagggctgggcacgtgggcgcccctctgtgtagccacccggggcgggggcggggcgcggggccgggcggcaccgcctcctccgcgctcccggaacgcgaccccgagcccgcctcccgccgggccccggccgcgctgaccaatccccggggtgggcggtgtgcggccgctgctcagcggggtttgcctggagccgagcacacgtgggcgggcgctagccccgggctaggccggtgggcgcgggccggggaagagaggctgcgcgcgaggataaacttcgtgctctcctgggaggaccaaacctcaagggcatttccgaatcttctaagcagagttctaagtggggttttggtccccccgtttactttccattctacaaagattttggaaataagaaaataataataaaatataataatagcaatgataaatggaagcccaggtggatgtgctttgtcaaatgcaaactaaacgttgataaataatgtgcagttgctattttggaagactccagtggtatgaatacgtagtcacgattgtttgggggtgggtttataggaaatgacattatttccaggggagcaagagcagaagttacacaatcagggtttctcctactgcgctattgtttactttaggagtctctgataagattaagtcacaatgtgaaagcctgttaattttcatccaaaacgaagcaaaacacgcactgaattgaacaataagtgtgtgtcagtgtgtgtgtgtatatgtgtgtgtggtttgtctttagagacagggtctcactctgtcgcccaggctggagggcagtgacacaatcgtggctcactgcagcctcgacctcctgggctcaagctatcctcccgcctcagcctcccaaagtgctgacaactacaggcttgagccaccaggctgagaattacaggcttgagccaccatgcccggcctattactatttttgtttgacagaaaggtccactttactttgcatagtattggagtaaacgtccctttaacccacctactagtaataactttggcaaagtgccagatttgtattgctgcctcacagtacatatacaattttaatgtgatattctaaatcattcttcccttcaagacatatatccccaagatcatctaataaacggtgtggggcttcattccagaagatagcacacacacaaaatctcaatgtatctcaggaagccatccatggatttcatcaaaaagtgaaagtgtaggctgggggtggtggctcacgcctgtaatcccagcactttgggacgccgaggcgcgccgatcacctgaggtcaggagttcgagaccagtctggccaacagggtgaaactccgtctctactaaaaatacaaaaattagccgggcgcggcggcgggcgcctgtaaccccagctactcgggaggttgaggcaggagaatcgcttgagcccaggaggcggaggttgcagtgagccgagatagtgccactacagtccagcctgggcgacagagtgagattccgtctcaaaaacaaaagcaaacgaacaaaaaaactgaaagtttaaacagcactatgattacgaagatattatctgatagaccaaatgtcttaagtaatagagactgtcaaagtaaacttatttttacagtcaaaaaaagattccttatgcaaattatcattaataacattaagggaaatgatgcgtgtggacttttaacaccagattcctcctcaatcccacggctaggaggcgttgttcaagggagcgatgactcagatactttgtctaatttttaagggtgagtaatctggtctaacatttttcacctggtttaaaaaaaatagagattcctgggagtcgcggtggctcagggcggttgccctggcactcgaggaggcgaggctacacgttcgaggccaacctggtcaacattgattaaaataaagaaagaaaaaataaaaaaatagagattcctatttttaaacttaagcaattatttcccca

SEQ ID NO: 587899 - DNA, 4001 bp, Homo sapiens
gtgaaatttctaaagaaaaaacagcataaaaataaaagaataagcaagtcgaccaataaacaaacctcctgtgaaaacgttaaaacagtaaaagcttttattattaagctacccaaaatgaataaattagtgatggtcatctcttcaatacgaaattgaatttaattcactccagattacacaggaagcaggactgcttatagaaatgcacagctttaatcacataagatatgatttctactgcttctgtcctatttttttttcttttttggaggggttggggggaggtctgtgtaggcaaattacttctttcccattaaagatgaaaagtattttatgggtagtcaggttctccatgttactctggggaaaaaagacaaagatcccatttgtcaagcattcatttgcttttgagtaattagaaaaacatacgtcagaaacttctcagaactggcaggttactcgatgccctttgcaaacaatctcaactacgcacagcctggtaaaatacggattgcaaaagccacaatgcagaactaattttgtaggactataatgagatgggagaaaagtaaggaaaaaacatattgggtcaatttaatgagtcatttttaaacaaacatttattgagtcctagcaggtgtatcatgcagtgcttagcagatgaagaaagtgtatctcgtacttttgtaaaatatgcttttgtcgagacacactgatatatgaaaggagtgtggcaacaagagaatgagaaaaaaaatttgtgtctaatattagtgatataatttgatatgtacatatctttgaagtttttataactttaacatttttaaaaagataagctccccatatgaaatggttatgaccatcttactctcatttttacaggggacttactgcccaagaaaaacatccctcctacttatacaacaaatacgaatgcagagatacaatgcaggggttttggaggtgattccattaatctggagggcatagactttgtttttccaggagcagatgatctgcaccattgtaaccattgtcagttattgctactgtgaccaaggactcatatttaatacgaaacctacacgcatgtagtataagaacaatgatgcagattttgggaagtggcccatacaaaactcacacccctgtccttggccttagaatataaggctctgatcaacatccctatgaggtcacaagtgattctggcaataccagaaacagatatctttcttcaataagcaattattttattaattgctgagacagtggcgtctcttgaggaagataaatatgtgcatattagcttagatctgaaaatagaattagcgaagggagggctggaaggaactagcaatatgctgtgctgcagaaaagtctctgaatgattttcatgagcctaatgatacatgtgagatctttcttagccccacgcccattgtgccccaaacttaagtataaccatttctacgcaccttattccttgataagtccctattaattcttgccaaaaagctaaattccttcctcagcaacttggaattacctccttctaaaacttcttcagcccaggccatcaacttgacagtatagaattttaggtctagtaaatccctaaccctgatgacattgacggagcaaacttcctttcaacgattccaggaaatctttccaaatctgctaatcatagtcacaagttgatcctggattttcactttagttcaaaagtttgaagttgcattgagtcacttagaaatgaatctttcccttcctcccctaagtaaaggttgacatttcaaacttaatcttctatatcagtatcccaggccctgacaataaatcttacaggagaaacttgctgtcgcaaaccggtggggcaggtgttccaataaaccctcgacaaattagtttgtctgagttataaccacttgtttctatcttcattccagttgctagtttcgtggtgagacatctgctctttctgttttgggactgatggaaaaaaaagtaattaaatcgtatagataagtagggatctttaccatactgtttttgccctagatcttttttattttgcaatgtccaaacccaacgtttctacaatgttaaagttccaagataaattttcaaattataacgtgggttaaataatttagtaaagaggaaaaagatatagccatgataccatggatttattgacttttattctttttgctaagttttgagagattaatttctttacaaattcatcaaaagtataatgtaggataaaagactatcacatgtggtaactgttcagccttgattagcaaaaacagaaaccacaaaacttggcattcagtacttaagcctgaatctttctggaaaaacacagaacactcttccatattcacttcacttttactgggtccaaaacttatcttttctccaaatcaagtcttctgaataatttcttcctccagagttttctccagagaagttcgtgcaagtgtagacataggtaaaaacaaaaaacacaactgaggccactacaaagttacaagcactgtaataaaaccattgatattttctcccattttataccaaatcagtactgccaggaagttagactaaaaacatagtatttcaaattttctgatatagaatccagacataggcaagcatttttcccaaagacattcaacaaataaagggctgatagagaattctgggaagtctgtaaagacagctgctgcttccaaacatgtgactccatttcactttagtgaaggcaacatcacagtgggaataaggcatacctagttagctcaaagagatgcagaaaaaaaaattaaatgaagcatccaacttttgtgtttaggcttggggaacagaagaagcaaaacttgaaatgaagaaagcaaagccctcagcaccttggtaaccggagtccctgcccagtcagcacactgcgttcccaaccagagctgggtgtcaggcttgggcaccaggcagatgcccatgcccgtaggtctccagcaatctttggctagtatgtcactctgactgccagtgggtacaacctgttccctctccccaagctgctaggacctgtcaccttatatgtgcctttgcaaacatgaggaatggccccttccagaattttttaccttacctgggatcccgccactgcctcctgccctccccacagcactgtcttcataccccgaagccaaggatcactggaccagagagacatctgactcagggttaaacagtcaaaggctgggaatgctcaattagatgttcttgaagctcttacgaacaaaatgattaggtcggtcaaatggtctagtgcaggctgaagtcacacacactggggaccagcttgacaaggtgcagaaacccacaggctggcagtagaagccacacagggtgggctgggcacggtggctcatgcctgtaatcccagcactttgggaggcttgaggagcacttgaggtcaggagttttgagaccagcctgaccaacgtggtgaaaccccatctctactaaaaatacaaaaattagccaggcatggtgttacgtgcctgtaatcccagctactcgggaggctaaggcaggagaattgcttgaactcaggaggcagaggttgcggtgagccaagatcgtgccactgcactccagcctgggcaacagagcgagactccatctgaaaataactaaataaataaaagaagccatacagtgttcattcagaggaggacagtcttgtgaaaggcagctgccccagcagggaggcagggcaagaggagcctggggagcttttctgtccccccaggccttgctgcgcttctaacgctgggtgtgcaagattccccgacatggtttggacacacctcctgtgcacttcagctatttagagtggtctctgttccttgaaaccagaagctaatggcgaaggtcaagatggtactgagcgggcctgcttcaccccactctactcccactgt

SEQ ID NO: 587900 - DNA, 4001 bp, Homo sapiens
aatcatcaaaactttacacatgaggtactgctattccttcctcaacaagtgtattagaatataaacttgacaaattggagcttttccataggtaggtagcaacagagagaagcatcaccccacagtttaaagtttatgttacttgggaaaagacaaacatgaagtatgagtctgaaaattagtttcaagaactctcaactaattgattctctcccaaactgaaaacacactacagcaaggctaaaacgtaaaataaagtgaactttaatctataatatacatgaaaatgtgaaagaacatgtttccttttgatttttgtaaggaaagtaagtttcagtgtgagtgaaacatatctgagagaacaggaaagtcttacctaggtacaaggaggagttttctttcttgacattgtcatctaagtaggttggtcccagggtataaataggtgtggagcccattccaatgagaatctgcgcgcaaatgaataaagccacgtagacccagtgattatttcctcccgagtccttcggacaggccggaggctccaaagtggcggtggagttgccaccctgacacaggccgtcgttgggggccgaggcgttcaactcttggatctggtaggggggcgagatgaagtgaggtaaggcgaagagggctgccccgaaggcgatgaggagtccacccacggccagccacaggggccgccgaccccggccgccgaagtagctgacgaacaccaccaccaccaggttcccgatgtcaaagcagctgaccagcagccccgactcggaactcttcagactgtagcgcctttcaatggtggtaattacgctgctcaggtacccagagaccattaacgcctggatgaaggtcagaaagcacatgcacaccaggaagcaacgggaatccgtgaggaccacgtagaggcaccttctctcctggagcatggccaaggcggaggacaccgagaaggttttgctgaggtccaccctgtggttacagtccccgagccccgccgaagtggacggggcagagggactgggggccaacgggttcgggccttgcttcaactcctggtggcccgaagaatccacacagccaaaggccgggttggcgtctccactagtgggactgaggcttggccggcaggaggcgctgctgaggaccggtaaactcttagacctgagggtctccggctcgcacctctcttggacagcttctgcagtggccggcgcctccagctgctctcccgccccgggctgcagtccagtgccttcgtccatggcgcttagaattcagatttgatagctgatggcacccaagcactccggcacgtttcatccaccggcacgaggggccgaagccgggcccagtcagtcttgcccacctgggactggggctgggggcgcagggccgcgcagcagggcatcctcaccagctgcgaggcgcccagtgcatcctgatcacagacacggcttcaaggctccgcagccgcgtgccacagggggcaggggtccgcgcggtactgcgatgagccctactcggcgtccctctccgggcggtagcttgaggcaggcgcctcgcgcgtcccgggctcatcccctccgccgccgccgccgccgccgccgctgggcccgcggccaggagcgagtgcaccctgcgccgggggtgggggggcacttagcgctgctgtccgtacagcatcccacctcgctgcgccaggggtaccgggtgttcgccgcctgggctcgcggcaccctcgggagtgaagctgccgacctgcaaagcagaaagagggcggtcagcgaagagcggctgcggcttggggctagcgtcccagcgccccggggaccagggttaggtgaccccgaaccgtccctagagggacggaggagctagtcaggagcggagccccggaggactaggcagcagccggctgcagtctccagtcccggaacaataagcagcaggcggtcggcggagactctccctcattgtctgccgcggacctgcccccgtcccgccccttctgccttaaacattgcgtttgcttttatatgttaataattatcaacctggcagctctgactcagaggcagtgtcttttaatcgagtgaactaactgcagcctttccgtactcctactccattactcaaaatagaaaatgcccaaaagaacaaaggaaactttttcacagacacacaatgtattccctgtcccaatttttctaaaaggaaaaaagaaggtgggggtaaactacgtgtgtagaaatgtgtgtgcacactggtgtgcgttggcacgtgtgcgcgactagatttgaatctgtctgctccaccagagacacacattcaaagccgaaggcagcagcaaaaaggtcaacatgcttgcctctttattcccaacaccaaaaataaccccctgaccgaaagaactcttcaattacaaataccaggggcattcgaggctgtggcccgcactaagtcccagagcgcggtatcaaacgaaaccgaaaatccgtctgctttgccgagagctagggaagccacaaccaaacaaagagatcccggcacgctgtcagagagcgcgcgaggagcccacggagccggctgggcgcacgcgggccggcggggaggtgtgctattgactgagcgcaccccgctagcgtgggcctggggagcgtgtgcgcgtgcgcggccacacacacacacacacacacacacacacacacacacacacaccggcgtactggaacctctctcgcgatcccgcacccagcttgaattcagcaagaatcgaaaacaggtgtgcccccgtggtaagaccccgcccctaatcttggggacccccactccactcctccagcctggggcaaggacggggggcggaatatgcaccaggtgggagacagccgagcttcactacactgggtttcattttgcagcgcgcctttgtgatgctgctgagaaaagaaaggaggaagggcaagggagaaaggcagagaggctgggcggccaagggtggccgctccggcatctccctcggctgtgctgggccaaacccgctcccagattcccggcctgccagccactcacaatcccgggcttccccgccgctgccttacccaggcgccttcccggggaaccccaccagccgctgcgtgaggagccggggaatcccagcaaactctcgccgctcgcggggggcgtccgaaccccctgcttaggcgagcgccctcacagcatcgcagactcggatggacacgcggatcccggcagggagctcttggagcaggcgtggaatcccagggacaccccctgcgcgcacatcacatacacgcacatcctacacacacacacacacacacacacacacacacacacacacacacagagcccgtgggaagacaagaccgccggcgacagcccgccgcgctgcccgggcgctcaagccgccgctactcactagcgagtctgtcagtctgtctgcctggctgagtagagcggcgggaggggggcactgagctacgggaatagttgggagccgcgtgaggaggcagcctccgtccagccgaagagaaatcagtgaatgagactgtgactcaggctgaactcttccccccacccctcgcctgtcacccaagcctctcctccgctccaaacagacacacgcgcacagagacgcgcccggagaggagcagccgagggcgcaggcgcgagggcagccacccagcccagccctcccacagccagccaccccgctgcccttcacctgcgtggctgcgggggcccaagagcgctgaagccccgagggagccggtctctagaaaagtcagcggctgaagctgacagcccactctgaataaataaatcatttctgatcgtttattccgtgccttgggcacacaccatgtctcattcaccatagtagattctgggaccaaagataaacaagacaagatacttggtcggaggaaacctctggcttgtgggggaaatactca

SEQ ID NO: 587901 - DNA, 4001 bp, Homo sapiens
gaatcacttgaacccaggaggcggaggttgcagtgagctgagatcatgccattgcactccagcctgggtgacagagcaagactccatcttaaaaagaaaaaaaaaaaaaagaaaagaaacacaggtatgaaggcaataaagcatgatgtatgtagtctggccacgccaccatccctgctgctctggacagaaatcagaagcagcagcagatagaagcagaaaatcatcaaaactttacacatgaggtactgctattccttcctcaacaagtgtattagaatataaacttgacaaattggagcttttccataggtaggtagcaacagagagaagcatcaccccacagtttaaagtttatgttacttgggaaaagacaaacatgaagtatgagtctgaaaattagtttcaagaactctcaactaattgattctctcccaaactgaaaacacactacagcaaggctaaaacgtaaaataaagtgaactttaatctataatatacatgaaaatgtgaaagaacatgtttccttttgatttttgtaaggaaagtaagtttcagtgtgagtgaaacatatctgagagaacaggaaagtcttacctaggtacaaggaggagttttctttcttgacattgtcatctaagtaggttggtcccagggtataaataggtgtggagcccattccaatgagaatctgcgcgcaaatgaataaagccacgtagacccagtgattatttcctcccgagtccttcggacaggccggaggctccaaagtggcggtggagttgccaccctgacacaggccgtcgttgggggccgaggcgttcaactcttggatctggtaggggggcgagatgaagtgaggtaaggcgaagagggctgccccgaaggcgatgaggagtccacccacggccagccacaggggccgccgaccccggccgccgaagtagctgacgaacaccaccaccaccaggttcccgatgtcaaagcagctgaccagcagccccgactcggaactcttcagactgtagcgcctttcaatggtggtaattacgctgctcaggtacccagagaccattaacgcctggatgaaggtcagaaagcacatgcacaccaggaagcaacgggaatccgtgaggaccacgtagaggcaccttctctcctggagcatggccaaggcggaggacaccgagaaggttttgctgaggtccaccctgtggttacagtccccgagccccgccgaagtggacggggcagagggactgggggccaacgggttcgggccttgcttcaactcctggtggcccgaagaatccacacagccaaaggccgggttggcgtctccactagtgggactgaggcttggccggcaggaggcgctgctgaggaccggtaaactcttagacctgagggtctccggctcgcacctctcttggacagcttctgcagtggccggcgcctccagctgctctcccgccccgggctgcagtccagtgccttcgtccatggcgcttagaattcagatttgatagctgatggcacccaagcactccggcacgtttcatccaccggcacgaggggccgaagccgggcccagtcagtcttgcccacctgggactggggctgggggcgcagggccgcgcagcagggcatcctcaccagctgcgaggcgcccagtgcatcctgatcacagacacggcttcaaggctccgcagccgcgtgccacagggggcaggggtccgcgcggtactgcgatgagccctactcggcgtccctctccgggcggtagcttgaggcaggcgcctcgcgcgtcccgggctcatcccctccgccgccgccgccgccgccgccgctgggcccgcggccaggagcgagtgcaccctgcgccgggggtgggggggcacttagcgctgctgtccgtacagcatcccacctcgctgcgccaggggtaccgggtgttcgccgcctgggctcgcggcaccctcgggagtgaagctgccgacctgcaaagcagaaagagggcggtcagcgaagagcggctgcggcttggggctagcgtcccagcgccccggggaccagggttaggtgaccccgaaccgtccctagagggacggaggagctagtcaggagcggagccccggaggactaggcagcagccggctgcagtctccagtcccggaacaataagcagcaggcggtcggcggagactctccctcattgtctgccgcggacctgcccccgtcccgccccttctgccttaaacattgcgtttgcttttatatgttaataattatcaacctggcagctctgactcagaggcagtgtcttttaatcgagtgaactaactgcagcctttccgtactcctactccattactcaaaatagaaaatgcccaaaagaacaaaggaaactttttcacagacacacaatgtattccctgtcccaatttttctaaaaggaaaaaagaaggtgggggtaaactacgtgtgtagaaatgtgtgtgcacactggtgtgcgttggcacgtgtgcgcgactagatttgaatctgtctgctccaccagagacacacattcaaagccgaaggcagcagcaaaaaggtcaacatgcttgcctctttattcccaacaccaaaaataaccccctgaccgaaagaactcttcaattacaaataccaggggcattcgaggctgtggcccgcactaagtcccagagcgcggtatcaaacgaaaccgaaaatccgtctgctttgccgagagctagggaagccacaaccaaacaaagagatcccggcacgctgtcagagagcgcgcgaggagcccacggagccggctgggcgcacgcgggccggcggggaggtgtgctattgactgagcgcaccccgctagcgtgggcctggggagcgtgtgcgcgtgcgcggccacacacacacacacacacacacacacacacacacacacacaccggcgtactggaacctctctcgcgatcccgcacccagcttgaattcagcaagaatcgaaaacaggtgtgcccccgtggtaagaccccgcccctaatcttggggacccccactccactcctccagcctggggcaaggacggggggcggaatatgcaccaggtgggagacagccgagcttcactacactgggtttcattttgcagcgcgcctttgtgatgctgctgagaaaagaaaggaggaagggcaagggagaaaggcagagaggctgggcggccaagggtggccgctccggcatctccctcggctgtgctgggccaaacccgctcccagattcccggcctgccagccactcacaatcccgggcttccccgccgctgccttacccaggcgccttcccggggaaccccaccagccgctgcgtgaggagccggggaatcccagcaaactctcgccgctcgcggggggcgtccgaaccccctgcttaggcgagcgccctcacagcatcgcagactcggatggacacgcggatcccggcagggagctcttggagcaggcgtggaatcccagggacaccccctgcgcgcacatcacatacacgcacatcctacacacacacacacacacacacacacacacacacacacacacacagagcccgtgggaagacaagaccgccggcgacagcccgccgcgctgcccgggcgctcaagccgccgctactcactagcgagtctgtcagtctgtctgcctggctgagtagagcggcgggaggggggcactgagctacgggaatagttgggagccgcgtgaggaggcagcctccgtccagccgaagagaaatcagtgaatgagactgtgactcaggctgaactcttccccccacccctcgcctgtcacccaagcctctcctccgctccaaacagacacacgcgcacagagacgcgcccggagaggagcagccgagggcgcaggcgcgagggcagccacccagcccagccctcccacagccagccaccccgctgcccttcacctgcgtggctg

SEQ ID NO: 587902 - DNA, 4001 bp, Homo sapiens
gggcacttagcgctgctgtccgtacagcatcccacctcgctgcgccaggggtaccgggtgttcgccgcctgggctcgcggcaccctcgggagtgaagctgccgacctgcaaagcagaaagagggcggtcagcgaagagcggctgcggcttggggctagcgtcccagcgccccggggaccagggttaggtgaccccgaaccgtccctagagggacggaggagctagtcaggagcggagccccggaggactaggcagcagccggctgcagtctccagtcccggaacaataagcagcaggcggtcggcggagactctccctcattgtctgccgcggacctgcccccgtcccgccccttctgccttaaacattgcgtttgcttttatatgttaataattatcaacctggcagctctgactcagaggcagtgtcttttaatcgagtgaactaactgcagcctttccgtactcctactccattactcaaaatagaaaatgcccaaaagaacaaaggaaactttttcacagacacacaatgtattccctgtcccaatttttctaaaaggaaaaaagaaggtgggggtaaactacgtgtgtagaaatgtgtgtgcacactggtgtgcgttggcacgtgtgcgcgactagatttgaatctgtctgctccaccagagacacacattcaaagccgaaggcagcagcaaaaaggtcaacatgcttgcctctttattcccaacaccaaaaataaccccctgaccgaaagaactcttcaattacaaataccaggggcattcgaggctgtggcccgcactaagtcccagagcgcggtatcaaacgaaaccgaaaatccgtctgctttgccgagagctagggaagccacaaccaaacaaagagatcccggcacgctgtcagagagcgcgcgaggagcccacggagccggctgggcgcacgcgggccggcggggaggtgtgctattgactgagcgcaccccgctagcgtgggcctggggagcgtgtgcgcgtgcgcggccacacacacacacacacacacacacacacacacacacacacaccggcgtactggaacctctctcgcgatcccgcacccagcttgaattcagcaagaatcgaaaacaggtgtgcccccgtggtaagaccccgcccctaatcttggggacccccactccactcctccagcctggggcaaggacggggggcggaatatgcaccaggtgggagacagccgagcttcactacactgggtttcattttgcagcgcgcctttgtgatgctgctgagaaaagaaaggaggaagggcaagggagaaaggcagagaggctgggcggccaagggtggccgctccggcatctccctcggctgtgctgggccaaacccgctcccagattcccggcctgccagccactcacaatcccgggcttccccgccgctgccttacccaggcgccttcccggggaaccccaccagccgctgcgtgaggagccggggaatcccagcaaactctcgccgctcgcggggggcgtccgaaccccctgcttaggcgagcgccctcacagcatcgcagactcggatggacacgcggatcccggcagggagctcttggagcaggcgtggaatcccagggacaccccctgcgcgcacatcacatacacgcacatcctacacacacacacacacacacacacacacacacacacacacacacagagcccgtgggaagacaagaccgccggcgacagcccgccgcgctgcccgggcgctcaagccgccgctactcactagcgagtctgtcagtctgtctgcctggctgagtagagcggcgggaggggggcactgagctacgggaatagttgggagccgcgtgaggaggcagcctccgtccagccgaagagaaatcagtgaatgagactgtgactcaggctgaactcttccccccacccctcgcctgtcacccaagcctctcctccgctccaaacagacacacgcgcacagagacgcgcccggagaggagcagccgagggcgcaggcgcgagggcagccacccagcccagccctcccacagccagccaccccgctgcccttcacctgcgtggctgcgggggcccaagagcgctgaagccccgagggagccggtctctagaaaagtcagcggctgaagctgacagcccactctgaataaataaatcatttctgatcgtttattccgtgccttgggcacacaccatgtctcattcaccatagtagattctgggaccaaagataaacaagacaagatacttggtcggaggaaacctctggcttgtgggggaaatactcatgtaaatggcttaaaacaacgtggtacatctatgcagcctgctactggagtagccaatatccattagccttcatttccacgcagcaggaagaacagaggcacgggggcatggtgctgccagtcaataggtagataagcttcctagaagattgcagggatggggcagaggaccagactgcaagagtggctgagtagaaaggggcactacgggtttcctaagttgtgtactgtcaataatgtgggggcaatgacgttctgacttcctcaccagagagctggctctggcagtgacaggtagacagatgtgaggccacactgcgggcacagaagtgagttgggaggcagtctgaaagcaaaatgtgatgaggcattggcagggggcatggagaggagggaactgggcagctgatgcaatctgcaagagaagaaaaccagccgaggtaggatgactcccaagtttctagcaccaagttgggtgactacgtgcctgacagccaataaaagcacaggtggagaaacatgctttaggagaaagattgttctcatctacatgtgttgagtttgaaatgtttgggggacatcccagtgtacgtgtcccataagccactggacacacaggaggtttggactaggaatattgatcagtagtcatcagcccaaaggtggcatgagaaaggatggaatgaatagggaagatcatccaaattgtgaagaatctaggaggacagcgtacagccaaaggaaggagactggaagcaagggtcagagaggtgtgggacgcatcagaaaagccaaaagagcagacgactgtaagaagggaagggtcagatgtgtacaggctgcagggaagacaaacaggatgataactgaaaaaaaaaaaaaaaaagagtatctgagggcacttgtgaccattgacagagcaggatagtgctctaatggaggaaaggaggttgctcacaagtaccagtgaccatgctggccattgctgccaggtcgaagcccctccactggcccttggccttgcccaatgaaagcattgtctccattttacagatgtgataagtgtagagaggttaagtaactttatataggcacacagctgctctgtagacaatatgaaccaatgtgctccaaaagactatgttcttacttaacctcttaaccctgactctctaccctctctcctgccattgaataacatcctgactcgtcaatgcaccttgattcttttgattatctccctttagtccaacaaccgtcgtatctacagcgatccttagagaacaattaaggccagttgacagtaaagaacaatcagtgtgtatttgaagtccatgctgagagagcatcaatcttctggcagctgcaagactgacctatcaaccgaggcatttcttcattccctgccattgtctcctcctcttgagatcgccatcaggcacagtcacttttctacaaacaggcaataggactcccgctgccaccctgcccagattttagtcctctactgctgataaagtgagcaaagatacgtggcacttcctgaacccaaatactcttctgagctgattctaaatccacacagaatcaacctacctcctattacctccttccaagctctgtgtcccattctctcatttcagtctcagctccagacatcagtgaattcaatgt

SEQ ID NO: 587903 - DNA, 4001 bp, Homo sapiens
gggggaagcgagcctggaagtcaggtctcctgggtcctgagaacccggggctcctccgctaatctcagctgtcccaaggggacagtgggcagttgtcagaggaggtgactgaaaccgtggagctgtgtggtaccagcaggcccaggtgcacacacccaggaagaccccttgggctgggcaggcagagccagatgtatccacccttggaggaaagtggatgccaactctgagcttccttccctctctagggtgggagcgatgtctccagggtttacaggggagattcttagcgggagatgttccctgggctagggtacaggtcctggtctgagatgccaggctagtttgcatcaggaaaggggcccaggaggcatttcttcccctaagtctctgttttcctatctgtgaaatgggtcacagaggctctgggtgagagggaggagcaggtgcctagaatgtgctgtccttcagcctggctctcctgaaggccagttctgtagggtgtcagtgcccaggaaggacaaaagtcatgtccactcttggcttagttatgttttataagcgtggggtatggaaggcagagggcgcccctggtgtgcttctctcccctcagaccccatgagtgagctgtgccacagcagcaggaagcagggggaggtgatcacaggtggagccaggccccgtcagagaggaggtgcctgaggagcaccttccgccctgccgccctgggttcagagttccgagttgcagaggtctcggaagcagcagaagatcaggtgggcggccccgatgctgtcggggtcggtggccacacaggagctggagcaggagcgggtcaccacggggctctggttgaaggggtactctgcagggtgggccagtgtcagaaccctcactcccctgcagcgcctgcctgctgctgcactgctcccagccgccgtcgcctgacctcaccctccctgtgatccctgttcccaatagtccacatctgtgaagccacccagggcccagccctcctctgactgtgacctgttcatgaattattaggccttgtcagacctctgaagtgcctgcgctgagatgggagcccgagcccagaggctgtggcaacaccacccagtgggtctgtgtcagagctggggtttgagccccccagggtaccccggccattaagccccacccacctccagcgcctggtgccccaggactgggtctctgagggggctgtgccaccctcgtggaaggcacccctgccaaggtgtggcagcctgttctgcccatcccacctgctgccttttgggccgggaggagcaccagcaaaggagggaggcacttgggggaggtggccctgactccagtgcacccagggctgccgtggggcctggcctcacctgcctccaccgtcaccagcgtggtcatgcaggctgtgtcctctggcttgcagcgggtaatggtcctgcaggaagcactggtcatgggctccttgcaggtgtagcacttgagggcctcacctgggtgagggatgggggcagaacctcatcacctgacctcggtggcctcatcctggaaccaggaggcaggggctgaaggagtctcgctgacatctttcaaggccccgggcagcccttcaaggggcctctctggcagctttctctaactgagctgagccacagacttgaatgctgcatccctccaccaagcctcagtctcccttcctgcagagtggagccgtgacccctgtcccagggtgaagctgggctctgggacccaggaggctcactgagaatgaggagggtgagcctcatggaggcctaaggaggctctcagccacaaagcacccccaacagccccatccccctaggaggtgggcagacaagctcagaggcagggtccccaccagcctgcggcccactcaccacagcccatgctccaggctgccacgagcagcagctgcacagcccagcgagaggccattgctccgtgctcagaagtgatgagaggtagccagcctcacatcaaggatttatacccaggcccttgggcaccggcttctgggcggtggcagaaccggccgtgtgagtcaggaacgtggtaaagggcccagtggggaggcagctggcaggaacatggcagacgggcagggagctggatctgggagctctgtctgaggacgatggccaggcctctgcttgcacacctccaacactggggaactcactgttcctcagccatgtccagtggtcctgggacagctctgacagagaaggcctttcctgctgagctcagactgcccctctgatgagcccccatgtcctggctgtgcctctggggttcacataggccacccagccccagcctgggggacccttaagacccaggttcagtgtagcctctgcccttgttgctctagccccgcctggcaccccttccctgcagcctggcctgcagccctctccacagacctctacctggtctgtgtacacctgatacacacctgcaaagtagaaaccagaggtaggaagcaggtgtcaggtgagggtagcatgggccagctagaccactctcaggctgacaaggttgggcccaggagtggcccctcatcactgccagccccttcccactaatggcctttagaccaaacctgagtttcttgattttaggcgcctgacaataaggttctgctcaccctccagcctcctggcctgactgtgttgtctgctctttactgcgtgccccccacgacaccctgttccacacgcatgcctgcctatgccataccgctcaatgaccacattgcctggtctcccatctgatgtcccacatcttccccatgctgtgagacccactaaggtgcccctctccacagtccttccaggtataccagcctctctggtttctctgtcctgtgatgtcccaatgggtggttgtatagatggatgagttgatggatggatggatgggggatggatgaatgggggatgaataggcgatggataggggatggatggatagatgggtgggggatggatgggtaaatgaatgggagatggatgggtggatgcatgagtggatgggtggatggatgggtagatggattagtgggggatgaatatgggatggatggatggatggtaagagatggataggaaatgggtgaaggatgtatgggtggataagttggggatgaatggaggatgggtgggggatggatgcatagatggatggataggtggatggatggatggatgggtggatggatgggtagatggatgagtgggggatgaatatgggatggatgggggatggatggttggatggatgggggatggatgggaaatgggtggaggatggatgggtggatgggtgggggatgaatggaggatgggttggggatggttgggtggatggatggatgggtggatggatgggtagctgatgagtgggggatgaatatgggatggatgggtggatggtgggagatggatgggaaatgggtggaggatgtatgggtggatgggtcagggatgaatgaaggatgggtgggggatggatggatagatggatggatgggtggatggatgggtggatggatgagtgggggatgaatatggaatggatgagggatggatggggaatgggtggaggatgtatgggtggatgggtgggggatgagtggaggatgagtgggggatggatagatggctggatgggtagatggatagatggatggatgggtggatggatgggggatggataggaaatgggtggaggatgtatgggtggatgggtaggggatgaatagaggatgggtgggggatggatggatagatggatggatggatagatggatggatgggtagatggatgagtgggggatgaatatggaatggatgggggatggattggatggatggatgggggatgaatgggaaatgggtgaaggatatatgggtggatgggtgggggatgagtggaggatgggtggatggatgggtggatgg

SEQ ID NO: 587904 - DNA, 4001 bp, Homo sapiens
aatggtgtatataaaaaaaggtaaaacaatctttttctggacttccctacccatgccttaaaatttgattacaggaatggggagctttaaagtaaatcacataatttttttttagcatatgtgttttagttttgttttatgttaattttggtatgtttactcccatttgatatgtttactcccattttgatatgtttactcccatttgatatgtttactcccaaaggccccagtgcagtgttaatggggatgggacttggaactgttctggaacctttgggttgccagatgagaataaagttatgcttttgctgtatttatggtaaaagcctttgaattgaattctcaggtgcttttaagcatatcactttgaaatgtgatcagttaatcctaatagcctgtaaatatagagcaactcacttaatttaagctctggaacttaggccatgtctccagtcagtttggtgaaacagcaatgagcctccatctgtgctaacaatagacatattccaagcaaaatgcaggctgatgatagagtgttaaaacaatgtgggtggtaggggtttctgttgacagtttacctgaaatttgatttgtaagttaactgttttatttgacaaagttatttttattttatctgagacttttgtttggtgcttctgtactttctgtagcaagcacaaatggtttctagataattaaccccactgtgctgaacctggacagatctagtatcttattacagcaacctttgggttttgcaggggatactttgctcaggctagctgaatgccgactaagaaaaggaatagaaattatgaagaaaaaaaaaacaaaaaccctttaaagattaaataaacttaccagcaaggtaaaaggacagaagctggctctttaggtccgatatagtatatagatggagttctaacatctagtaaataactaaattttcatgcttgaatagtataaaattagaaatttggtcagcagttaatattaatttttaatagacatgaatgattgctctgagccacgaagataatcttgttacctagaaaggtacttactctcctttcttaaccagttcttcttaggacatatttttattttaaaatgcagtttatcaaaaggacttactttgtatttattttgaggatcagtttaagaatgacttcaacattatatttaaatggtgtgataaattgatatcaaaaatgaaaggctatttaagaaggtttttgtttaatagcatgactttatattacgagagagaaatttcacagtgaagaaatactttaattaaatgttaaggaagtctgaagctgtataaattatctgttcagtgtagtataatgcagcccatatagtgataccttttatgatcttttatataaaaattaaaattgtgataatttcttggcattctctgcatctacattcaaagcaaaataaaaataattttgaactattttctcatattctaaaaaatataacaaactttcttataagtaactattttttagcagccaatatcatttgcacatagaatcagaaagctttagtctggaattcgcttttgatctgggtttttctttaagaaaaatcctttgttaagacagaccaaactgcagaaatgaaatcgctcagagaaaatgaaattagcaagtaaccagttaaaataaaaagctatggtttactctgaggtctggatatagatcaggttcatgtaaaatgtaatgaattttccattaaggcacagatggtaagggtgcttatcaaatagcacaaggcagtcttcatattttcataataaaatcctaccaagcggtgaaacgaatacattgctttttcttgatatttagtaggagcaaagctttctggttgatttttcagggtaaaatattttcctattgcatcataaggacatgtaccactaaataaaaaagatcatataaacctacctcttgtctgagaggatgctgctgaagcgatggtatcgtctgtttgtaatgcagtctagtgcacagccaagatggagctgtgcttctattggttgaaccacaatggagctgacagtttcctctatgttcatttgcattaagtcttgccacccttaagagtaaatcattcataaacttgaatagagctgtctggggtatcaactgtcatcccttctcctttatttttttgttcttaagctaaattcctatataggaatttgtgagttactaacaaattgatgattctttagtgtttcattataaaatttcagatccttcagtgaatacttcagtgctagggctggaagataatgtcgggaaaggtagtaacctaggaaacaaacagtccaggtttgccagcctgatatttccttcaggaagtgtgcataaaatcttataaatttttcttgttcttccttttctttcattacttgttccgtatataatttttgcactctggaagtgattatttccatgtggtggtttgatttaggaggaattatgaaggaaaataattggcttttagctctgcaagttggaagagggctcatttaggtaaatacactacctgcattcaaaaaatagtctctaaaatgtaaatggcaaagtgatctccaggttggctctttagagacagagtatttttagttactgtgtattatttagagttatggtctaagcacaacagaatgaaggtttttaattatgggagtggctgttaacaacagcagcagaccaggtacatgctatgtagacttcttttttaaaattatagatgaaggctgggagcggtggcccatgcctgtaatcccagcactttgagaggctgagttgggtggatcacagggtcaggagttcaagaccagcctggccaagatggtgaaaccccatctctactaaagtacaaaaattagccaggcacggtggcagtctcctgtaatcccagctattcaggaggttgaggcaggagaattgcttgaacccgaatggcagaggttgcagtgagttgagatcacaccactgctctccagcctgggcgacagagtgagactccatctcaaataaaataaaataaaataaataaaataaaattatagatgaattggtacattagtttctggggccataaaggaatgcatagaaatatctgtattatagtcattcattcaacaaatatttattgagtgtttactaagcttgacattgagttagtagtagatgccagagacataagcatcatgtctcataagcacaactgtttgtgattcataattggccatttgtgtggtgtttgtccttaacacattgtcatctcttttttcatagtcttcccagttgtttatacagttgcgtggggtaagcttaatattattttacttaaacaagcattaaatgtgcagtcacagatttctgtactttgacaaaatggccagtttcagatggaataatctgtgtaaaggctgtttattacagggtttacactggatttgaatctatactctgctgcttactaccctcaattttattatatttaaaaggggacagtaatacttcttaagttggattttttgggagggattacgtatgaatatttaccatagtgtttagcagataataaatattggttacttttattacagatgtgctgaacaccttgggagaatgaactacgtaggtaatatttcataattgaaacagtgaatggaaaagcacctataaggcattctttttttttttttttttaattttgagacggagtctcactctgttgccaggctggagtgcagtggcactatctcggctcactgcaacctccaactctctcgttcaagtgattctcccaagtagctgagactacaggcacgtgccattatgcccagctaatttttgtatttttggtagagacggggtttcaccatgttggccaggatggtctcgatttcctgacctcatgatctgcccacctgggcttcccaactgtaaggcattcttaatgttatt

SEQ ID NO: 587905 - DNA, 4001 bp, Homo sapiens
tcaaaagcgctacttcctcctgccccaaatatgcaggtctttaattacacttaggaaaaaatttctaattactgctgacatagaacggtaaaattttaacgtgaattatacaacctatattatacaacatgattggtatgtcatgaagtcactcttctgcgcttccaggcacatgcacttgagttatttttaggagtgtagttgtgaaagatttgcagaggggaggcctttcccgcccagtcctcaatcatgatcaatggcatgactttataaggctgccaggagtaaggagtgctctggtcctgagtcacagtacagacccacagcccacaggcagcctgaactatgaccccgtcccctcctccccggcatgccacagtgtaaccaagtgtacacacatacacctgctgcgtgcttactgcataccaccacagccttcctctggaatctaaagcaagacaccatttttcacattttcctgtaatgtaatgcttgaactatttcagtaaggagaggctaggatgggctgaattaagtctcaagtaaacaagagtatataaacttgccaatatattacaactaggggttggttttagattgacaaacttttaggatgagaactacttttttttttttttttacaaaaacagggtctcactctgtcacccaggctggagggcagtggtgcgatctcggctcactgcagcctcgacgtcccagaatcgagggattctcctgcctcagcctcccaagtagttgggaatacaggcaagtgccaccatgcctgggtaattcttatttttttttttttaaagacgggggtggggtgggggtcgtctcactatactgcccaggctggtctcaaaactcctgagctcaggcaatccgcccgcctcagcctcccaaagtgctgggattacaggcgtgagccaccgtgcccagccgagaactactttttctagggactaggtcactgtatcataagctttaaaatctgtgtcgtgattttgggttcctgatgtcacgtctaggtgattctaaaattgaccaccgcttgtcatcgtgccttgaatgttatcatttttgtctctcacttagaactttgttactttgatacaaattcacattggaaccacttagttcctagagtcccttacaacaaaatcctctgcatcaaaaaatgggatttctttctctcatccctctgaaacactaaaggcttggtattctgaagccaaagggtacatacaagctcacaggccttcacccaacatccaggaaagcaattcacaggtgctgggcagtccacagagtcactgaattatcccaacaaccctgctgggcggcactaaagctccattttacaggagaagaaactggggtggcggcggtggttatataacttgtccaaagccacacaggcctgggcgtggaggcgcggggctgttatacacacgactcccaaacctgaactcttccagtcttggccccgatcctgcgagacctgctccttccggaagaaagtcaagtggagcagggagaaaatgtaatcctctcccaggaagcagcccgggtcccagggcggcgaggctctagggacgtttccgccgcccgcaggctgcgcgtgattcagcctcaaccctcccgccgagcccccgccgccccggcagatgggccgccgcaactggcccgtgtgcgcttccggaagcgggcgactcgcagctccacgcgacgccgaggggctccgcgccgggaccgggcgggtgctcggagtttcggggaccgcacgggaccgagggcaggcgggcggccaccccccttacccccgcgtccggggcggggcgggcggcgcggggcggggccgggtgacgcggccccgccggggaccgggagaagcggggacgcggggccactcacgctgccggctccggaggcggcacgcggccagcgctgctccgctccggggctctttaccccggagtcggggccgggcgcgcgggaaacggttaccgagcggacctggacgccctctgccttcgtcatttcctgccggccggtcggtttccggatgaaacgaggagccaggtcttttttttttttttttcctttccccttttcagttttttgagccggagagacgcagcggcggccccagtgccgcccccgggcgcgtgagtggagccgggctcctttcccctaccgcgccgcgacccccgcccgggctgcgcgcgccgcctcccgcgagcccccggcccgactcccgggctcccgcgggtgggggccagggctggtcggcgccggcggggctcgcggcggcggcgggttgcgtcccccgcgcctgctggcccacgtggacctggccgtcgcttgccgtgcggcgcctttgcgaaaactcgacggaagtggcagggaccgggcattacctgcgagtgccgggcgcctcctgctccgctgtgcgcgcttggggtgggactcggcgggggaggggtcgtgtacattgtcccaccaggcgcaatgtagccgggcggcgcagaggatttcttttttggtcttgagagcatagagtcccttttcatattcacgtgtactcttaagaaagcgtctgttctccaaactggctttccattctccccgtcctaaatggtgcgtggctgacaccgtagtgttttcaaaactggatatggccaggatgctatagcattgtcagtgtaagtcccttttgggtatttttatttaattgtgtagtgacttgacagaagtgtttcccagcttgacctaagtaatgaatttgcataggatttcagcatcagtatggaagtgatcagatgtcagtggctggtgccaccttgcagataaatggccactggtccacgtagttcgtctttactatacattttgattaagttctctaggaccagctgactggtaattataagtcacatgaaaccctgcagagatgagagcttacattgaacacttcttaacaagttttctattctttgtttcatctgttacaattaaactcaccttcgtctagggtaagaccattactttacgcaataacatactagcttaatttacggtatttatatgtatttatatatattgtatatacataatcatacatataattctataacatttagtttgactctaaagttggaaaatcaggaaaataacaggtgatgttgagtactgattgtttgccgggcctgtgccaaatggtgtgcatgctttatgtaacttaatctaaaaaaatttgaatacgtgagtttgatttcagtgtgtccaaatgtgaaacgtgtacattattgttattgttttgttttttttgagacggggttttgctctcgttcaggctggagtgcaatggcactgtcttggctcactgcaacctccgcctcccgggttcaagcgattctccttccttagcctcccaggtagctgggattacaggcgcccgccaccacgcccagctaagttttgtatttttagtagagacggagtttcaccatgttggctaggctggtctcgaactccagacctcaggtgttccgcccgcctcggcctcccaaagtgctgggattacaggcgtgagccaccgcgccgggcaaacgtgtgcattaaatgcttgtttatgcctttgtaaaataagagtgttggcaatataaaatgttacccatagagtaaattaatgtgtttttcaagttggaagatggctttaaaaattcatagaagtacaattagtccctttatttaggtgctgaatagtttccaaagccccgtgtctcttatttatcagagtttctattatataacattgtcacccagtgaacaggctatgctaggacattggaaaaaggtaaatattgagaaagccctaatggtcctttcttaaatggccccctctttccatatttaatttctaagtgacattcctaattaagggtaaacaaacataatgaaacaaggctaattttccaataccaaactaaaaaaat

SEQ ID NO: 587906 - DNA, 4001 bp, Homo sapiens
ggggaaccatacagcactggccactagaacatttcacgggtgtcatttatctgacaaattaaaaaatgtttcctattttctaatgacaaaatggatcagaaccaggttaatttcttactttaatttttcacaagattctgttcatgtgccactcagtaaatggtatattcctactcaaaagcgctacttcctcctgccccaaatatgcaggtctttaattacacttaggaaaaaatttctaattactgctgacatagaacggtaaaattttaacgtgaattatacaacctatattatacaacatgattggtatgtcatgaagtcactcttctgcgcttccaggcacatgcacttgagttatttttaggagtgtagttgtgaaagatttgcagaggggaggcctttcccgcccagtcctcaatcatgatcaatggcatgactttataaggctgccaggagtaaggagtgctctggtcctgagtcacagtacagacccacagcccacaggcagcctgaactatgaccccgtcccctcctccccggcatgccacagtgtaaccaagtgtacacacatacacctgctgcgtgcttactgcataccaccacagccttcctctggaatctaaagcaagacaccatttttcacattttcctgtaatgtaatgcttgaactatttcagtaaggagaggctaggatgggctgaattaagtctcaagtaaacaagagtatataaacttgccaatatattacaactaggggttggttttagattgacaaacttttaggatgagaactacttttttttttttttttacaaaaacagggtctcactctgtcacccaggctggagggcagtggtgcgatctcggctcactgcagcctcgacgtcccagaatcgagggattctcctgcctcagcctcccaagtagttgggaatacaggcaagtgccaccatgcctgggtaattcttatttttttttttttaaagacgggggtggggtgggggtcgtctcactatactgcccaggctggtctcaaaactcctgagctcaggcaatccgcccgcctcagcctcccaaagtgctgggattacaggcgtgagccaccgtgcccagccgagaactactttttctagggactaggtcactgtatcataagctttaaaatctgtgtcgtgattttgggttcctgatgtcacgtctaggtgattctaaaattgaccaccgcttgtcatcgtgccttgaatgttatcatttttgtctctcacttagaactttgttactttgatacaaattcacattggaaccacttagttcctagagtcccttacaacaaaatcctctgcatcaaaaaatgggatttctttctctcatccctctgaaacactaaaggcttggtattctgaagccaaagggtacatacaagctcacaggccttcacccaacatccaggaaagcaattcacaggtgctgggcagtccacagagtcactgaattatcccaacaaccctgctgggcggcactaaagctccattttacaggagaagaaactggggtggcggcggtggttatataacttgtccaaagccacacaggcctgggcgtggaggcgcggggctgttatacacacgactcccaaacctgaactcttccagtcttggccccgatcctgcgagacctgctccttccggaagaaagtcaagtggagcagggagaaaatgtaatcctctcccaggaagcagcccgggtcccagggcggcgaggctctagggacgtttccgccgcccgcaggctgcgcgtgattcagcctcaaccctcccgccgagcccccgccgccccggcagatgggccgccgcaactggcccgtgtgcgcttccggaagcgggcgactcgcagctccacgcgacgccgaggggctccgcgccgggaccgggcgggtgctcggagtttcggggaccgcacgggaccgagggcaggcgggcggccaccccccttacccccgcgtccggggcggggcgggcggcgcggggcggggccgggtgacgcggccccgccggggaccgggagaagcggggacgcggggccactcacgctgccggctccggaggcggcacgcggccagcgctgctccgctccggggctctttaccccggagtcggggccgggcgcgcgggaaacggttaccgagcggacctggacgccctctgccttcgtcatttcctgccggccggtcggtttccggatgaaacgaggagccaggtcttttttttttttttttcctttccccttttcagttttttgagccggagagacgcagcggcggccccagtgccgcccccgggcgcgtgagtggagccgggctcctttcccctaccgcgccgcgacccccgcccgggctgcgcgcgccgcctcccgcgagcccccggcccgactcccgggctcccgcgggtgggggccagggctggtcggcgccggcggggctcgcggcggcggcgggttgcgtcccccgcgcctgctggcccacgtggacctggccgtcgcttgccgtgcggcgcctttgcgaaaactcgacggaagtggcagggaccgggcattacctgcgagtgccgggcgcctcctgctccgctgtgcgcgcttggggtgggactcggcgggggaggggtcgtgtacattgtcccaccaggcgcaatgtagccgggcggcgcagaggatttcttttttggtcttgagagcatagagtcccttttcatattcacgtgtactcttaagaaagcgtctgttctccaaactggctttccattctccccgtcctaaatggtgcgtggctgacaccgtagtgttttcaaaactggatatggccaggatgctatagcattgtcagtgtaagtcccttttgggtatttttatttaattgtgtagtgacttgacagaagtgtttcccagcttgacctaagtaatgaatttgcataggatttcagcatcagtatggaagtgatcagatgtcagtggctggtgccaccttgcagataaatggccactggtccacgtagttcgtctttactatacattttgattaagttctctaggaccagctgactggtaattataagtcacatgaaaccctgcagagatgagagcttacattgaacacttcttaacaagttttctattctttgtttcatctgttacaattaaactcaccttcgtctagggtaagaccattactttacgcaataacatactagcttaatttacggtatttatatgtatttatatatattgtatatacataatcatacatataattctataacatttagtttgactctaaagttggaaaatcaggaaaataacaggtgatgttgagtactgattgtttgccgggcctgtgccaaatggtgtgcatgctttatgtaacttaatctaaaaaaatttgaatacgtgagtttgatttcagtgtgtccaaatgtgaaacgtgtacattattgttattgttttgttttttttgagacggggttttgctctcgttcaggctggagtgcaatggcactgtcttggctcactgcaacctccgcctcccgggttcaagcgattctccttccttagcctcccaggtagctgggattacaggcgcccgccaccacgcccagctaagttttgtatttttagtagagacggagtttcaccatgttggctaggctggtctcgaactccagacctcaggtgttccgcccgcctcggcctcccaaagtgctgggattacaggcgtgagccaccgcgccgggcaaacgtgtgcattaaatgcttgtttatgcctttgtaaaataagagtgttggcaatataaaatgttacccatagagtaaattaatgtgtttttcaagttggaagatggctttaaaaattcatagaagtacaattagtccctttatttaggtgctgaatagtttccaaagccccgtgtctcttatttatcagagtttctattatataacattgtcac

SEQ ID NO: 587907 - DNA, 4001 bp, Homo sapiens
ttcacattttcctgtaatgtaatgcttgaactatttcagtaaggagaggctaggatgggctgaattaagtctcaagtaaacaagagtatataaacttgccaatatattacaactaggggttggttttagattgacaaacttttaggatgagaactacttttttttttttttttacaaaaacagggtctcactctgtcacccaggctggagggcagtggtgcgatctcggctcactgcagcctcgacgtcccagaatcgagggattctcctgcctcagcctcccaagtagttgggaatacaggcaagtgccaccatgcctgggtaattcttatttttttttttttaaagacgggggtggggtgggggtcgtctcactatactgcccaggctggtctcaaaactcctgagctcaggcaatccgcccgcctcagcctcccaaagtgctgggattacaggcgtgagccaccgtgcccagccgagaactactttttctagggactaggtcactgtatcataagctttaaaatctgtgtcgtgattttgggttcctgatgtcacgtctaggtgattctaaaattgaccaccgcttgtcatcgtgccttgaatgttatcatttttgtctctcacttagaactttgttactttgatacaaattcacattggaaccacttagttcctagagtcccttacaacaaaatcctctgcatcaaaaaatgggatttctttctctcatccctctgaaacactaaaggcttggtattctgaagccaaagggtacatacaagctcacaggccttcacccaacatccaggaaagcaattcacaggtgctgggcagtccacagagtcactgaattatcccaacaaccctgctgggcggcactaaagctccattttacaggagaagaaactggggtggcggcggtggttatataacttgtccaaagccacacaggcctgggcgtggaggcgcggggctgttatacacacgactcccaaacctgaactcttccagtcttggccccgatcctgcgagacctgctccttccggaagaaagtcaagtggagcagggagaaaatgtaatcctctcccaggaagcagcccgggtcccagggcggcgaggctctagggacgtttccgccgcccgcaggctgcgcgtgattcagcctcaaccctcccgccgagcccccgccgccccggcagatgggccgccgcaactggcccgtgtgcgcttccggaagcgggcgactcgcagctccacgcgacgccgaggggctccgcgccgggaccgggcgggtgctcggagtttcggggaccgcacgggaccgagggcaggcgggcggccaccccccttacccccgcgtccggggcggggcgggcggcgcggggcggggccgggtgacgcggccccgccggggaccgggagaagcggggacgcggggccactcacgctgccggctccggaggcggcacgcggccagcgctgctccgctccggggctctttaccccggagtcggggccgggcgcgcgggaaacggttaccgagcggacctggacgccctctgccttcgtcatttcctgccggccggtcggtttccggatgaaacgaggagccaggtcttttttttttttttttcctttccccttttcagttttttgagccggagagacgcagcggcggccccagtgccgcccccgggcgcgtgagtggagccgggctcctttcccctaccgcgccgcgacccccgcccgggctgcgcgcgccgcctcccgcgagcccccggcccgactcccgggctcccgcgggtgggggccagggctggtcggcgccggcggggctcgcggcggcggcgggttgcgtcccccgcgcctgctggcccacgtggacctggccgtcgcttgccgtgcggcgcctttgcgaaaactcgacggaagtggcagggaccgggcattacctgcgagtgccgggcgcctcctgctccgctgtgcgcgcttggggtgggactcggcgggggaggggtcgtgtacattgtcccaccaggcgcaatgtagccgggcggcgcagaggatttcttttttggtcttgagagcatagagtcccttttcatattcacgtgtactcttaagaaagcgtctgttctccaaactggctttccattctccccgtcctaaatggtgcgtggctgacaccgtagtgttttcaaaactggatatggccaggatgctatagcattgtcagtgtaagtcccttttgggtatttttatttaattgtgtagtgacttgacagaagtgtttcccagcttgacctaagtaatgaatttgcataggatttcagcatcagtatggaagtgatcagatgtcagtggctggtgccaccttgcagataaatggccactggtccacgtagttcgtctttactatacattttgattaagttctctaggaccagctgactggtaattataagtcacatgaaaccctgcagagatgagagcttacattgaacacttcttaacaagttttctattctttgtttcatctgttacaattaaactcaccttcgtctagggtaagaccattactttacgcaataacatactagcttaatttacggtatttatatgtatttatatatattgtatatacataatcatacatataattctataacatttagtttgactctaaagttggaaaatcaggaaaataacaggtgatgttgagtactgattgtttgccgggcctgtgccaaatggtgtgcatgctttatgtaacttaatctaaaaaaatttgaatacgtgagtttgatttcagtgtgtccaaatgtgaaacgtgtacattattgttattgttttgttttttttgagacggggttttgctctcgttcaggctggagtgcaatggcactgtcttggctcactgcaacctccgcctcccgggttcaagcgattctccttccttagcctcccaggtagctgggattacaggcgcccgccaccacgcccagctaagttttgtatttttagtagagacggagtttcaccatgttggctaggctggtctcgaactccagacctcaggtgttccgcccgcctcggcctcccaaagtgctgggattacaggcgtgagccaccgcgccgggcaaacgtgtgcattaaatgcttgtttatgcctttgtaaaataagagtgttggcaatataaaatgttacccatagagtaaattaatgtgtttttcaagttggaagatggctttaaaaattcatagaagtacaattagtccctttatttaggtgctgaatagtttccaaagccccgtgtctcttatttatcagagtttctattatataacattgtcacccagtgaacaggctatgctaggacattggaaaaaggtaaatattgagaaagccctaatggtcctttcttaaatggccccctctttccatatttaatttctaagtgacattcctaattaagggtaaacaaacataatgaaacaaggctaattttccaataccaaactaaaaaaataaaaaacagtggactggctattactttgttgatgagtctagcacagttttactgggcatttaaatgttaaggatgttatttacattgtagctagttgtgaaagatttgtgtgtctaagtttttagtttgcctttaaatgtcttgaacatatgcttagtattgagtccagtactttgtgcattaatagtaagttttttgattggatttaattgaacagttttggcttccttaattttattttgaagatagaatttaatgatttgtgtaggcataacagttacaattaacagtgattccgagatgagcgtagggtttaacttaacagttcacattttcttgcgagttgaaaggactggagagttggatgtgtgtcttctttgtgattaaaaaagcatgctggaacttagctatcagaagattctggtggtccatctttgggaagaggaaaagattaagaatgctttgct

SEQ ID NO: 587908 - DNA, 4001 bp, Homo sapiens
cacttaggaaaaaatttctaattactgctgacatagaacggtaaaattttaacgtgaattatacaacctatattatacaacatgattggtatgtcatgaagtcactcttctgcgcttccaggcacatgcacttgagttatttttaggagtgtagttgtgaaagatttgcagaggggaggcctttcccgcccagtcctcaatcatgatcaatggcatgactttataaggctgccaggagtaaggagtgctctggtcctgagtcacagtacagacccacagcccacaggcagcctgaactatgaccccgtcccctcctccccggcatgccacagtgtaaccaagtgtacacacatacacctgctgcgtgcttactgcataccaccacagccttcctctggaatctaaagcaagacaccatttttcacattttcctgtaatgtaatgcttgaactatttcagtaaggagaggctaggatgggctgaattaagtctcaagtaaacaagagtatataaacttgccaatatattacaactaggggttggttttagattgacaaacttttaggatgagaactacttttttttttttttttacaaaaacagggtctcactctgtcacccaggctggagggcagtggtgcgatctcggctcactgcagcctcgacgtcccagaatcgagggattctcctgcctcagcctcccaagtagttgggaatacaggcaagtgccaccatgcctgggtaattcttatttttttttttttaaagacgggggtggggtgggggtcgtctcactatactgcccaggctggtctcaaaactcctgagctcaggcaatccgcccgcctcagcctcccaaagtgctgggattacaggcgtgagccaccgtgcccagccgagaactactttttctagggactaggtcactgtatcataagctttaaaatctgtgtcgtgattttgggttcctgatgtcacgtctaggtgattctaaaattgaccaccgcttgtcatcgtgccttgaatgttatcatttttgtctctcacttagaactttgttactttgatacaaattcacattggaaccacttagttcctagagtcccttacaacaaaatcctctgcatcaaaaaatgggatttctttctctcatccctctgaaacactaaaggcttggtattctgaagccaaagggtacatacaagctcacaggccttcacccaacatccaggaaagcaattcacaggtgctgggcagtccacagagtcactgaattatcccaacaaccctgctgggcggcactaaagctccattttacaggagaagaaactggggtggcggcggtggttatataacttgtccaaagccacacaggcctgggcgtggaggcgcggggctgttatacacacgactcccaaacctgaactcttccagtcttggccccgatcctgcgagacctgctccttccggaagaaagtcaagtggagcagggagaaaatgtaatcctctcccaggaagcagcccgggtcccagggcggcgaggctctagggacgtttccgccgcccgcaggctgcgcgtgattcagcctcaaccctcccgccgagcccccgccgccccggcagatgggccgccgcaactggcccgtgtgcgcttccggaagcgggcgactcgcagctccacgcgacgccgaggggctccgcgccgggaccgggcgggtgctcggagtttcggggaccgcacgggaccgagggcaggcgggcggccaccccccttacccccgcgtccggggcggggcgggcggcgcggggcggggccgggtgacgcggccccgccggggaccgggagaagcggggacgcggggccactcacgctgccggctccggaggcggcacgcggccagcgctgctccgctccggggctctttaccccggagtcggggccgggcgcgcgggaaacggttaccgagcggacctggacgccctctgccttcgtcatttcctgccggccggtcggtttccggatgaaacgaggagccaggtcttttttttttttttttcctttccccttttcagttttttgagccggagagacgcagcggcggccccagtgccgcccccgggcgcgtgagtggagccgggctcctttcccctaccgcgccgcgacccccgcccgggctgcgcgcgccgcctcccgcgagcccccggcccgactcccgggctcccgcgggtgggggccagggctggtcggcgccggcggggctcgcggcggcggcgggttgcgtcccccgcgcctgctggcccacgtggacctggccgtcgcttgccgtgcggcgcctttgcgaaaactcgacggaagtggcagggaccgggcattacctgcgagtgccgggcgcctcctgctccgctgtgcgcgcttggggtgggactcggcgggggaggggtcgtgtacattgtcccaccaggcgcaatgtagccgggcggcgcagaggatttcttttttggtcttgagagcatagagtcccttttcatattcacgtgtactcttaagaaagcgtctgttctccaaactggctttccattctccccgtcctaaatggtgcgtggctgacaccgtagtgttttcaaaactggatatggccaggatgctatagcattgtcagtgtaagtcccttttgggtatttttatttaattgtgtagtgacttgacagaagtgtttcccagcttgacctaagtaatgaatttgcataggatttcagcatcagtatggaagtgatcagatgtcagtggctggtgccaccttgcagataaatggccactggtccacgtagttcgtctttactatacattttgattaagttctctaggaccagctgactggtaattataagtcacatgaaaccctgcagagatgagagcttacattgaacacttcttaacaagttttctattctttgtttcatctgttacaattaaactcaccttcgtctagggtaagaccattactttacgcaataacatactagcttaatttacggtatttatatgtatttatatatattgtatatacataatcatacatataattctataacatttagtttgactctaaagttggaaaatcaggaaaataacaggtgatgttgagtactgattgtttgccgggcctgtgccaaatggtgtgcatgctttatgtaacttaatctaaaaaaatttgaatacgtgagtttgatttcagtgtgtccaaatgtgaaacgtgtacattattgttattgttttgttttttttgagacggggttttgctctcgttcaggctggagtgcaatggcactgtcttggctcactgcaacctccgcctcccgggttcaagcgattctccttccttagcctcccaggtagctgggattacaggcgcccgccaccacgcccagctaagttttgtatttttagtagagacggagtttcaccatgttggctaggctggtctcgaactccagacctcaggtgttccgcccgcctcggcctcccaaagtgctgggattacaggcgtgagccaccgcgccgggcaaacgtgtgcattaaatgcttgtttatgcctttgtaaaataagagtgttggcaatataaaatgttacccatagagtaaattaatgtgtttttcaagttggaagatggctttaaaaattcatagaagtacaattagtccctttatttaggtgctgaatagtttccaaagccccgtgtctcttatttatcagagtttctattatataacattgtcacccagtgaacaggctatgctaggacattggaaaaaggtaaatattgagaaagccctaatggtcctttcttaaatggccccctctttccatatttaatttctaagtgacattcctaattaagggtaaacaaacataatgaaacaaggctaattttccaataccaaactaaaaaaataaaaaacagtggactggctattactttgttgatgagtctagcacagt

SEQ ID NO: 587909 - DNA, 4001 bp, Homo sapiens
ggcaaagtaaatttagtttcaactatccaagtcacccacgggtgacaaatatcagagcaagaatgtaactaacagaaaactgtaggaaaagccttcatctattaaccaaatcaattgattaagatagcaacatttgtatttgctgattactgggggcagtttcacagaacacacattcaagcacatctttcctgattttctaactgatctttgagaccaaaccttctgaatctactttccaaagtctacatgctgtttgcagtccctggagcagaggttgttagcaagaaatggagcactttgtgccctaacaactttttgagtagtcaggaagtagctatcaatgactgtccatcattaaaagcactatgtcacaacttcatgcaaatccaacagccagcccagggcttcattgtatctcagagtaacattcctgcctatggtttttctcttacccgtgtgagttctaatgtgtccttgaagcaaccagggtctggaaaacgccttgccgcagatcttgcaaacacaaggtaatgtgtgggtccgaatatgcatcttcagggcgcccaggctcacatattccttgtcacagtatttacagctgaaagattttctagactgggcatcgcagtgcagctgcttatgtttggccagcccagaaaaagttgaataggtcttattgcataaattgcactgaaacttttcagcttcaatggcatgggggtctgaaagcttggactgtagtctttcctcttcatcactaatggggctttctgagccactgtggtccttggaggaggtgtcagatggaggagggggactcactcgccccaaagatgaggagtatccggaaagaggagagaggccattgggtagctgggcgtggaatggagcagcggtagtccacacagtgatggggctgtatgctcctgagctgaggatctctggttgtggtatgacaggcatggagtaactctcatagagatacggggaaataatcactgggaaagaaaagggagggagagaagattaaggcaaaaataattaaaaataaatccacacgcaagtatacacacactggaaagatatttagcaacacacacgtgattttcttaggaagaagatagacccatttaggagggcatacacactggtaaaatgtttcatttccaccctggcacctacggagttactgtacttaatgcacacataggctgacagctgcacggagctataggtgctctgaagtcagacagtgcagccaagccagtgccttcgccgtccccattgaggaaggagagcctcaacattatttttaaacatacagaaaagttgttttccatgttacgtatgggctatttaggtgtattacgaccgtgagtacaaagatatgcctgcatcaagccgccttctaaaggaaaggagacttagtgcatgaaaaacgcagtaattcaatccttatgttgctcatctttcacatactcattatgcatgtatacacaggctttagcaaacgaagctgcgagatttgaatgaaatgttccttgttagtcaagaattttaaaagttttgaattaaaacgaaccctaaatgatcaaaagaatgtaagctccctttcaggacactgttaaaaaggaaaacagttgaatctttggctcttttgtaatggtatttgaagggtaatacgtagattcatatttgcaaagctctagatacgtagttctagatatatttttctctttttacctgtatgtgtgtccagttcgctgtagtttggctttttggaggcgttgaaatgcttcttgaccaggaaggagcgcggcatcttgccagcgggtctggcgggcgcccggcgcggataacggtccggcgggaggacacggcggtccctacagcatcgcggcgggccaggctcgggcaggggccgtgctcaggtgcggcagacggacgggccggcgcctctgaagtcacccggctcctttacgaactgagcccgttttggctgggagggtttttttttcctctcttttgcaagaaagatccaatcacagctgagaggttcagatttcagctcctccctctgggacagctgtgaacagaggaagaatctgttgtcagactaaattattctggttcaaaatgggctgttttttgagatttcagtggagaggaaaaaaagtgtttaagtattttcaagagaggtaacctcgctcggtgagccccgcccgcgatccacgctctctgggagctaggaggggcgcaggagccggggtctctgccctgcccgcctggcttccagatgtggtgcagcgccagcgcgcggggacacagtgtccgccaggagaaggaagggccgccctgcaccacaccaggccagcctctggtgttaatgagagcctatatttggaagtggcatctggagaggtttgccttgcacaaagaccaaataattacctcttggcttttgaaaaaggaagggggaagcgggaagacaaaggcgcctgtgagcgcggaggacgctctcctgggactctggcctggagcgggactgcagccttgcgtgcggcgagggcgctgcgctactcagggcttccgcgaagccaggggcagcgcggccgcgtgcaaattaagtactcatgtcaccgtgttagctatggtggcttgaaagaaatgctttgtagccctctaaaggcaggctgatcggaagaactggaagattgcaaagataaaaaggaactctggcagagaaggggggcaagaggtaactgtcatttggaaccaccggacattctctcacacttttgacaagagatcttatcttttcatgtattacagtgcatctttttttttatgggaaaaagggttgtatgggtctttagagacaattatttttatttctaatattcccctgcttttatgtggtgctattttcatcagtataaagccattaaaatccatctcagtatctaccagtttcctgtataatgctaaaaaagaaattgaaggatattattatgaatatagattgattaaagttttaagaacccagtctagtaactgcaaaaacacctttattttgtgtatggtcttcaatctaaaaatactttcaggtggtttattttaaatataaaatttcaagcatattttaaagcatctctgtccattgcagacttttatccctatcttttgctaaaagaataaggaaagaacaaattcacatgaagatcaccctactcttgtttctaacaggtgctggaggaaaaaagtgaaaaagaaaataacagtggtgatgtcaagacttgtcagagaaaagtgcattgtcaggttgcataacttcttaatcttggaatgagaaaacaagagtgtatgtgtgtttggagggtgaggtggggcactcacagatttcctaagctaatttcaatgattattcttatttcttccaacagtcactaatttaaatgtcaaacagagaaaataattcaaaggaatccttatgctaatggaactgtacttgcaggagagaggaaaatatgaatacatattcgatttctccacacacaaactggaacctggagtaaaagccagaggcagttttctaagcttgctactctatgtgagggtttgttcggatgtaggcacctgggtttatgagagcaggagtcctccttgcttttcactccatttcccacaaaacacacatttttgttacagatatagcacagttgagaaaacacatatcgccatggctattatttccttgtttcactctacacagtctattcacaacaaagaagagtgttagacaatgttttggtatttatttgctggtagttataacacaagatcatctactaaaatgtgtattcaaaaatccatttacaacgtttaataataattcactatgcatgaaaaaagcttacatttggatcacagaggcataatccagcccagccccatcagcaggtatccgagggtgcactgcacagatcggcgtcaggacg

SEQ ID NO: 587910 - DNA, 4001 bp, Homo sapiens
gctgaaacagtctatttcaatagctacgggctcatttattcatttactcagcatgcatgtcatggagcaactaagctcaagagagactcaccactaaataaaagactccagataccgcaatctacagctaggctaggctgagtaaatagataaaataattacacgttattagtgctgacagaggtatgtacacagcactaaagagaagagaaacaagtgagaaatgcagctgtaggcagacaggagaattcagtttactaccatatgcccttctcccccacataactcaacatagccatgaacagtgcaaaacggtggttcctattctattcacattcaacaatgaggggactggggacatcagatctcaagagagagagtagtttctaggctcttcgcacgcaggggaaactgtttacaaatgcaaagttgtttccacaccactcagaaagggctccagaaaacgcagacagaaaaatcacttcaccagctctcaacccagaggaacctggaatccagactgaccggccagatgcccggcagggagagcgaatttttcccaaaactgcaacatattccccggcccctgacataactctccaggcataaccctagtcccccatttgcagggggaacgtccagaaggatagtcggagttttagcattcacaatattgccacctctctctcacccctttatgagtcaaccctcttctgctgggctgcccaggctttggagtgggaaattttgccaaagcggaaaactatgagttgcaattacgcagtagccctgcttggcaacgttggatgtaggaatattctaagttcacccttcattctcaattccatatcccagtccctacactctaccaggattatccgcagataaaaatgaaacaacgtatactaagcaggcaatccggctgggaaaccctgctagcctcgcttttccatacacccctcctggattaaagcctggaaagactgcgggctggagacaaattgcccccagggtgggtaaaagttgacaaaactctatgctgccaccccctgcgccacccttcccccccccccaacacacacacacccggccccctggggtgtgtccgcatgtggccgagtgagtgtgagtgtgagcgtgcgggtgggaagccgagcaggtgtgtgcgcgcccggcgcggcccgcgcgctgttaaccccttaccttccagcagcacttccttgcccgcgcgcttcaacgcctgcaccgcctcgtcgtgggtggcgtcccgcaggtcggctccgttcacggacaggatggcgtcgcccacgtacagggcttgggtctggtccgccgccagccccttgaagatcttgctgatgaggatgggcatcttgttctccttgccccccttgatgctgatccccagcccgcccagctcctgcttcagcaccttcacgccacgcttctggttcgagatggactcgggcacctgctcgggcaggtcggtgaaagcggtgcggaccccggcgggcgagtccgggggctgcgcgccgcccgcgcccgggtgcccagccccggcgcccctgcagaacgagccattggtggcggtcccgatgccgttgtacgccgcagcgccctcctcgctgctcagaaccagggcgtcctcgctcaagttcaccagaactttgtgccagcgatcccgcaccaaaacttccagcagcccgctccgctgcgcccggccgcctcccgcgccagccggcccagccgccgccgccgccgccgctaccgccatctttccggcattcttaaaatgccatgtgattggaaaaggggggaaaagtggggaagggtggccggggggaggacgcggggcccgggggagcgaggagagtgcgtcccgcggggaggtggcggcacgcgggactccgctccgggagttcgcagacgcactcggcgggagttggcagctgcactcaggctggttccccctcgcctgatcctgaccggggtggagcaacctaaaagaagaaggagagaccgagacaggggaggggaaaaaagccagcagccagttgcaaaaccccaaagcaaggggagccgcggagcagctcagcgctggagagagtccgtgggaggaggcacgctggcggtgaagggcggggacccacaacccagcggccgctcacctgttccagccgccgcagcctcggcggtcacacgccacccgcccgcccagacctcccctcctctgtccccagagcgcacgacgccgcggggacagcttcccgagcgccttccccgtcccgcttctctccagcccaccgcagccccctttcttcccagctcccccactccgtgggcgcccacactgcaccttcgccgggtgcgtgcgtcccgcctcggtgccctcactcggtcctcctgagccgacttccctttcatacccagcccgtagaattgtccctgggtcttaacaactcatttgtaactgatccaggtctcctccctctgcttcctcaaacccaggcttcgctgcctctgcggagttcttacctgtctctcctttccacccgggttccctggaggaagctaaactcagaccaaggccctgggctccccaggagttaaaagggaatacgctgtcccaagattctagaatgaagagtcaacgtagcccgagtggcttaaacctcctgtccttaaatgcaagaaatgttttctatcgagccctggacaggtgtctctgctggcctggggttttcaacaggtcatgcctgcctcagaccccagggacaaatgttcttccagctctaactcattctatgctttaagcttttgacctatctttgttttcccagtgccacaccaaatgctgcctggggatctctctttcttcctgagttcccatataagaagccccccatttaagaattcagttggaatgggttgtatttcaaaagttgctttgcaagttagttatttggatttcaagttgcattttaccagggtaacaatattataatgattgtttaccttcccagagcaatccagaaatgcccacataacccatgtcacacctgaaccaccctgagttcttctatccttgaacctctcaagctttcccctaactctaagcaggtctcatggtccactcaaggtgtttcatgcttctcagttacgtccccttcccactgctgtctaccctctctccaaacacaacacaaaacaaacccacaacagttctgttaattcctgaagtaaacccaacccagcaaggtgttgagaggaaataaatcttattgaacacattcccattgatgtgtatcatcgttgaaagttctctaagtcttttagaatgactcacacttttaatcaaggaggcttaaaggctcagatgactccctaaagagcggagtcccagccaggtcaaggaatgaaatgaaaacatttggacattttcttgagaaggcggagtcactgcaggtgagagggtgccctgggttaatgcttctgcttgtagctctcccttttcgtatatttttaactcacccattttccaaaaactctttactctttcatgcaaagatggccagagcagggatggcagtctcaggggctctccagccctttgtgatgtgcagaatcagacaaggagctaatatagatggtaccaccatccactctcaggatggaaaagcagctgaggctggccccttgctttagagactgaggactcacgtgcatcattcttcagtgaaaccagagcctgagtatctgcgttgaaatccagatacactaaggttgagataggcaccagagtgccagtgtgaagatttacaaatcaaaacagatccactcctggaacagaaatcctgcatcaacatcatgcctgcatcttgcctctgtggacaagcaatgtgggaggcccaggcacaaccacagattatgtatcgatttgccataagaaattgtaggctctgggatgagaatttctcagaatctctgtgataagcacattt

SEQ ID NO: 587911 - DNA, 4001 bp, Homo sapiens
acagtggcggcaaggacagcggcggcggcagcgtagttccgtccctgtggctgcagctcagtccggagacgctgtccatcccctctggtgctgaagtaaggggacgggagcccctaagcgcaggtccaggtcgcactttcctccaccagcgaatccaagcagcagcttccttgtcttccgccctagccttctcccctccggttcttttttttttcttttttctttcttttttttttttgtaggggctaattgtttctccaaattaacagtctcatacttatttggtgacaacgtttctggaaaaacaggaatccctgggaaataacatctgagcctcccctgacttttcagtggccctgcacgagtttcctaatgccagaaatgaaagaaaacgcacgcacaggggcgcgcacatacacgcacgagagaggcagagagagagagagaggaagagagagaaaaaatatatagatttgtaccgtggaaaatccagagcttctttggaaagctcgtggatctttaattacataagatgaaaaggaatattttggaaaactccgcaatcttgattaccaattaaggggaccacattcaaattttgagaaacccaatttgaaattcctaaattaaacccagtgaagattcttagaccctccacgcggaaacgataggttattgttaaaattttaaaagacagagaatgaaagaatgaaaaagacaggaaaaagcatctgcactcggctaccttttaaaacgctgctgaattggatcgggatcgttgcagagcctctcagaggatccggcgaacgcagctcctgtgagtgtcagcgctgagctcagcgagcaggcagcttggaggcccagggcagtgctagcgagtcgcccacagcctaggctcctgcagtgggggcagaaaacggcttatttcacaaaggacgggataaagaaggcacaaagacagtcagagggctcgacaatctctgcctttgtaaagccagagcaaagcccaatttacgttgttttttttgttggcttttcagcccattttccctctggtctcccacgctgccccctcgcctccctactccggaatccgcgctctcccgggccttgcaggctcttcactcccgctcttggcaactggctgacaacgagcataaagaagggtatgggtgcgtggtcccgagtgctgtcacccagggctcagccacccacactcggcaacgggtgcagacgccagtgaactgagacgggaagttgaaatacataacgttgaaactgttggaaaactggtcaaaaccagggccatgtggacctttgaaactatgtggagtaaaaggggaaaatggaaagagcgagactgtaacaccgcccgcccttgcagactcctaacttgtgcagtgtagatttctgcacaaggaggttattgatagacatgagaggaaattcgagaaagactggtgaggggcgctggtgtgtgtggtggggacgggggtccgggaggggcggggcgcaacactaatttctcccgggctgtgggaaggggccggacgcctgctcctggcctcccttccccggcgacttctcaggttcttcttcctgttctgacactacagggaagtcctagacgttgtgctttcctcccacgcttgcttccatcaaggattagagcgcgttcccgctggtctggaaccatccattccaggtaggggatcttccctcccggggacattgcgctctccaagcaccggcctgcggcgcgcgcgggggacgggcgaggaggcggcacagccagtggagttccagtgggctccctggaggagaaacgttactgagccgggaatcactcgggacggaaaaccaaacaggccgcgtatttactcacaggaaaaggccagactttggttggactttgagccattttgctgcagcagcaacggctttatttccctggggtggccaccagccgccaccgcggctcgcgagctccggctggaaggggccgcgctgtgctccgcacattgcaggccgcggtcgctgtgtggagctgcacacgcaggaaacggtcgccgtggaacgaagcccttggtcaactttctctaacagtcttttttaacagaggatctattaaaggttgtgattctctctaaaaccgtgtttggggaatccatctgacctcacggagacacacaaacctaaaaagagagtatctgctgcttgaggctaatttttaagggggtcttttgcttttcagtccatgtgaaaacgttgcttaaggttatggtaaatgaagtttcccttttccttagacaaatgtggtgaaacacgtgcttcttttttctgcagaaacaatacctgtcgtgtgtgtttcagaaaatgccccctttttgttagatgattaaaacaaaccccccgtgtgagggttatgctaatcaggggctatccgtccttgtcagcaaagaagcttttctctgctgtatttaattctatgcttactaaggttgatttaattgattgtttaaattattttatcaggacatacggaaacatgaataaccacagaaaatcaacacaccaaataagagcatttaaatgaagcacagagtacaaagatgttgctaattaaaaacatatgcacttgattattcagacctagaagaacagattcttttcttcctgagcactgattgagttttatgcggtctctctcaatctttctatccccctccctctgtcctgccagtaaaagaaaacagaaacagttgattaatgtgaactgacagtcccagtatgattatgatagtttgatgtcttttcttcaagaagcaaaatccactttatattttttctcatcaagttgtataaccagttatggaaatcaagatgatgaaaattaaataccgcctaacatctgatgctacaaatgaatataaatgaagtacaacataaaaaaaccaagggacaaataagctgaggtgaattaaagaattatgttaagaaatttcaccccgggagcagattttccaaagtctattttaaatgattttttaaaaaaattcttaatttaagttgccatgattttaaaaatgtaaatatagtaaaatgtgaatataaataatcaaaacaatacatgaagcattatatgcacaagaaaatgtagtaacctagcatcattactgtgaattctaaactggctcattcaatccctctctataaaactaggatataattcccctctagtccactctacacagtgcaaaaatcttagaaaacataatagtttgtggaacattttgtaaacaattggaagtcctttgggtcaggaagtttgaaatgtaagttgaaaccgccatacaatatgatctaaatgaatcgtcattatacactatgtgaaacgttggctgtgtcacttccggaagcctcctattttcacatctcattactatatgtaaaatggtgataataatcataatttttgccagcctcataaactgtcatatgcaaaaatcaacatatgtaaaaactttgtatatcttgtatatttctacaaaaataggtagtagcacctatcatctgtggagtatcatttgctcacaatttttagacctcaattgaaaaactggtggttccatttaaaggttctattttttgttaatatatatttctaattatttctgtgtttacttcatgtttcctaatagatatagagctgtaataggcctatacccatatctgaacccttttcaattaacagttttaacatcttcagtataattttgagctgcttttttaaattgtgtccaagtacaaataaatattacatatctattaccaattatttctgaattggaacagtgatcctattttaaaatctccttctatgggttttcagatgaaatgttactgagttgtattttcttttgccccctttgaatataagatcccttactcaatcatacctctactcagctaaggagttctattttgctgaattgtggtca

SEQ ID NO: 587912 - DNA, 4001 bp, Homo sapiens
gacatgctgtaactctcttaaaatatgattaagtcttccatgtgataatttcacttccatacctctcccactgaggaaaaaaaggattgtgttaagagcacattgtaggttttctgggaaggaatccaaatcaataatacatgtttctcctcctcagataatcattcttgacctatatagggcaacggagcccccaaggagctcagtgacatagatgcctctgctccttttctgctaagcaagcaggttcatggtaagtggtgacagttaagaatgatttttcctcagagtaattgctacactcagccaacataaaacaagaggacatcaccccaccaatgaatgccactgtaacggcctccaatgatttttgtgttaaaattgagaaggaaggtacgtatagatatgcattagagccattttactatcgttacacacaaccagtgaaattaaaagtaaaacctaaagatctcctgtaatttttcaaaggggtagactcttttcacagagttgattatgaatatctcatcacatgtatttacatgactgtaaaattccatccttgcaagtcaaaactcttcactgaactgaatgtactcattggaattgatcggattcttagtgaaatgtcaggcacgggttacaaatttgtgtaactgcttttgcccagtgaaccctttttattaaagcagaatgcttatcaaggtcactgtgaaagattgtaattttaaagctccaggggaaaactagaaataagaatcaacagaaaacagatttaattagcattttaaagtttatggtttttcgggaacctactggtccctatcactttctggatttcactgacaaatgtattttgcagaactaataagttagaatgattttgaaatccagctctcctaaagaggcacactaaagcttctcattttctgctttctggcagatcaggtttgagaaagcaatcttgagctttcaaaggctggaaagagggtgctaagtaaaaatatgagtgtctccttacgtaagatcctacaggtgtaggtatacttggaggttggcatggagtgagaaatctggtgtatatgtatacatgtatttgttcccatgcatagtttagtatattataacaatataaaatatgttagagggcatggttaaaccctctctattttaacttttttagtcttgcatactatgtaacacagacaggatcactttttatggcatacataagacaacaaaattatcttgccaaacgattgcattagttttgggaaaaaataaacaagatatgccagatccaaaaagatattagataagcaataagaaaaatggccagctaaaagtttactgtaattatgtaaggcaacatgtatgttattttgattcttcttgtcacacaatgatccagaaacaattattttaaaacaaaattgcttgtctcctcgttaaccccagaaaaaattacactgcttatgatctttctgttaaaccataagacaagtcattagaattttaaaaaacaaaaataatagcgctatcacttacctgccgagcaatgaaattagatgtcttttcagtctctctaacgtagaattttgagtagctctccaccctcttttcacaaagctatttccaaaacagttgcaatccactcaagaccattctgtttatttcaagaagtgtggacctttgagcatttcaacccctaccgcacggcccatgatttctcagagcttctaagaacttcgactttactctcctccagaattcctcccagacccctatagaaaaatgattcttgaagttgctgctgagagtttaatctgtggagcaagagtactcctcagagtcctgtccttaggtacagcaggtgtagagggaggggtacttttcatccattaaggaagggggccgggaggcgagggggtaataggaggcaccgccttttagctgcgaggagcaagtagcccagctgcccgtggcgacgacagtggcggcaaggacagcggcggcggcagcgtagttccgtccctgtggctgcagctcagtccggagacgctgtccatcccctctggtgctgaagtaaggggacgggagcccctaagcgcaggtccaggtcgcactttcctccaccagcgaatccaagcagcagcttccttgtcttccgccctagccttctcccctccggttcttttttttttcttttttctttcttttttttttttgtaggggctaattgtttctccaaattaacagtctcatacttatttggtgacaacgtttctggaaaaacaggaatccctgggaaataacatctgagcctcccctgacttttcagtggccctgcacgagtttcctaatgccagaaatgaaagaaaacgcacgcacaggggcgcgcacatacacgcacgagagaggcagagagagagagagaggaagagagagaaaaaatatatagatttgtaccgtggaaaatccagagcttctttggaaagctcgtggatctttaattacataagatgaaaaggaatattttggaaaactccgcaatcttgattaccaattaaggggaccacattcaaattttgagaaacccaatttgaaattcctaaattaaacccagtgaagattcttagaccctccacgcggaaacgataggttattgttaaaattttaaaagacagagaatgaaagaatgaaaaagacaggaaaaagcatctgcactcggctaccttttaaaacgctgctgaattggatcgggatcgttgcagagcctctcagaggatccggcgaacgcagctcctgtgagtgtcagcgctgagctcagcgagcaggcagcttggaggcccagggcagtgctagcgagtcgcccacagcctaggctcctgcagtgggggcagaaaacggcttatttcacaaaggacgggataaagaaggcacaaagacagtcagagggctcgacaatctctgcctttgtaaagccagagcaaagcccaatttacgttgttttttttgttggcttttcagcccattttccctctggtctcccacgctgccccctcgcctccctactccggaatccgcgctctcccgggccttgcaggctcttcactcccgctcttggcaactggctgacaacgagcataaagaagggtatgggtgcgtggtcccgagtgctgtcacccagggctcagccacccacactcggcaacgggtgcagacgccagtgaactgagacgggaagttgaaatacataacgttgaaactgttggaaaactggtcaaaaccagggccatgtggacctttgaaactatgtggagtaaaaggggaaaatggaaagagcgagactgtaacaccgcccgcccttgcagactcctaacttgtgcagtgtagatttctgcacaaggaggttattgatagacatgagaggaaattcgagaaagactggtgaggggcgctggtgtgtgtggtggggacgggggtccgggaggggcggggcgcaacactaatttctcccgggctgtgggaaggggccggacgcctgctcctggcctcccttccccggcgacttctcaggttcttcttcctgttctgacactacagggaagtcctagacgttgtgctttcctcccacgcttgcttccatcaaggattagagcgcgttcccgctggtctggaaccatccattccaggtaggggatcttccctcccggggacattgcgctctccaagcaccggcctgcggcgcgcgcgggggacgggcgaggaggcggcacagccagtggagttccagtgggctccctggaggagaaacgttactgagccgggaatcactcgggacggaaaaccaaacaggccgcgtatttactcacaggaaaaggccagactttggttggactttgagccattttgctgcagcagcaacggctttatttccctggggtggccaccagccgccaccgcggctcgcgagctccggctggaaggggccgcgctgt

SEQ ID NO: 587913 - DNA, 4001 bp, Homo sapiens
atgttacatgttatccctttttcctctactttattcccttgtgaagtatttctgtaaagttcattttaacctgatttcatgtatgtaaaagttggtaggagaaagattggtaaagacccttctgaagctttattccatgcttatcatcttgacagtactacattcagtacaagagagaaaaaagaaaaggaagaaaactatttacattacctctggatttaatcagaaagggaggaaatctattcacattacctttcaatttaattagtgaaactataaagatttacacagagtagtaacaatgaaccagatgctttgatgctacatagtataattctatagaacccaggattaaaaatacacacttggtcaagttactcaaataaaacccagtgaacactgaacttatatgcaacaaaattaaatagtgaaaattgtaaccgttcttcacagcttacaggtcatcactaattctgctctacgataaactgagggtatttaaatctttataacttacactcaagaatctgttatcaaacggaccagtatatcttgtgtcagaatagtatcataacacaaagaagaaatggtttactattactttgttaaataataaactcataagaaactgtaacaactacagaccaacaaaatgacaagactacacacaacaataactgcccaacttttcatacgaaactctactggtgggaaaggtaagaaatgagtcacctggacttggaaagatgctgaaataagatttttaactctgggctgggcgctgtggctcacgcctgtaatcccagcactttgggaggatgaagcgggtggatcgcctgaggtcaggagttcgaggctagcctggccaacatggtgaaaccccgtctctactaaaaatacaaaaattagccgggcatggtggcgcaggcctataatcccagctacttgggaggctgaggcaggagaatcgcttgaacccgggaggcggaggttgcagtttgccgagatcgtgccattgcactccagcctgggctacaagaggaaaactccgtctcaaaaaaaaaaaaaaaaaagatttttaactcaagtggctctcggcaacatttccccattatcaaagattcatgaaactttagctgctgattcaccgctcctcggttccgcctgacggcctccccaaaaacaagtaagtctgaaatctcaaccttctcaaggtccgagggatctacctggcctttgccactctactacctgaggccgcctggctggggggaggtcgcatatcaatacatatcaacacaaccactgacgtccgaagatgtgagcgctacccaagcgttaaaaaaacaaaacaagcaaacaaacaaacaaaaaaacgtgctgtgctcattaggagcgtcttcgcctctaccctgatgcggagttgctcccaggacgctcagttcattctcactctggaaaacctcaggtgaggtggcccgactctgagcaaccccgtgggcgggaggaaagaggcaaataccaggcacagttcgaccctcggaaggtaaggccggggtctgcgccggtcacgggtcttccgcactgcaggcggcgagacccgcagctccctgggatcacagactctcccgcctccgctgaccggtgcgcgcccagcgcctcccagacgcacagtggggtcggcggtggcctgaaggtggctgggcttcctgcggcgcctctccactctcccgcggagccccttgccgcccgccagacatcaaggttgcaggtgtcacccgtacgagaacccgggacagcgaccgcctgtcctgaggtaatgacccagtctttacctcagccccctcggcgatcccgaacgagcgcgcttcccggtgacggttaaaccggactctccttaaccgcagcttttcgcctcctccctcagcagcgagaagcctcacgtgacacccccgccccaaaagcagctgctccccgcctcagccagtctctgcccgggcccaagatccctgctgtgtggaaggaggggccgaactgggcggggggggggggggggggagagagagagagagagagggagggagggagggagggagggagagagagagagagagagagagagagagagagagagagacagagacagagagaaagagagagagagagggcaagagcgagagacagagagagagagagagagagagagagagagagagagagagagagagagagagagagaaagagaaagaaaacgagcgagggagagagcgagagcgagagagagagagagagagcgtcacacacacatctctgccggaagtgatgtcacggcatgggcgcccgcccaccggaggagcgactggagttgatcggctgggcgctcaggtagcgaagataaatgtaatcttgtggcaggaaatcgacattctctgcactatctttagttttccaactgaacttctgagaaatggaggctacaatacctagtttgccaaacaggagaagactacaattcccagaaggaactgcgaccaacattggtccgtgctcatactttgcatcatgggacttgtagtcatcaccagcttgcgctgattctaacaggttatagattgttttctagaattagcagcgctttaagggatgacaatcgattagaagagtaggaagatagaacactgcttagtagctgatccgttctacataattcagaagttctcattggcagagaacccctgaaattctgtagtgtctttttactatccggtgagcaatttgatcccgatgatggaatattagccttgttagacatgcgcttctgaagacctgtgcagtagggaaagccgagttttttgataggcaaatcccaagattcagaccggtctacaggtctgttcatcattagaatcagataatgtggttgaaaaatcattccacgatttctaaggcttttgtatagtcccaatgttacccatggagggtcttgactacaagtcatccaggttcttggtttttttaacaaagaattggacaaaacgcacaaagaaagcaaggaaagaatgaagcaaggaaagcagagattgaaatgactgtacactccacagagtgggaatggcctccagccagtggctcaagagccctggttacaggattttctggagtttaaatatccgctagagatttcccattggttacttggtttacaccctctgtaaattaaggagtagcctgcaaccaatcagaggctaaagttaagttacaaagttgtactcctatggaaatgaagactaggcccagataccaagggcctagaaggttgggcagggggttgcaaagggaatagcctctggtctttttgttacttgggcttggaaagttggagttttccttttgatttagttctaggaagtcagcgtgaatgggccttaggttccctgcctccggaccctattctactgcccgactaagagtgagaaaaggtgatagtggtcattttgaaatgaaggttggaaaatagtctggtttgtgacatgatgatggttttggtttaagagattctgcccttttagtgtgaatgaaataaaaatagaattctgtagaaacaatgttaggtaggagaatagggtctggaaacaggggacctaaggctgattcatgctgactgatatcagaggcgactccattttcaacccctcttttttctgcgtggcagttgctgcgtggcagttgcaaccctcctttctttgggtggcagttgaaaaatgaaagaacctctgatagagcccctccctcaaccaatcagactggttgagggcctacttttcactctgattggtctccttccacaaccaatcagactgggcataggccaatgggaaccctctagagggtatttaagccccagaaaattctgtagctgatgctcttgaaccccttgactgagtctgttttccttctgtggagtatactttcatttaaaataaatctctgctttccatgcc

SEQ ID NO: 587914 - DNA, 4001 bp, Homo sapiens
gagaaaattgaagatcagaggagaggtgaggtgatcagccaggacgcagttgatcagtcacaggctctcttgctgcctcctgctctgctcctgccccttccccacctcaagctgcaggaaaacagaggagggtaggagaggataccctgcctccccctgccaatgcctaagacactcatcctttctcttcctttgagatccctgcctctgcagtcctcacaattccccatgtgtttcagtcacaagtagcttcttatcttccagaagtctgaatctatgccattcttcattcaatcatttgacaatcgttcctaaggacctactgggtcacagcactagtaatacaaagatgaccactcaaattaactagtaaccacattacaactgttcttggttgactccaaagatacttaatcacaccttgaaaatggacttttccaatgcactgtgatgtatgagcaagaaggcttgctacagtgacaatttaatagcagaaaaaacaaactaagctgtcggtcaacagaagatggttaaatgaaacatggtgtatctaactcactagaaacccagagactgtctgaaaaaactctctcaaaacaagcaaacaaacaaaaacagctgttacctctgggaaagttttttcagttttctctacactttttttttttttttttttaatagagacaaggtctcggctatgttgcccaggctggtctcaaactctgggactcaagtaatcctcctgcctcagtctcccaaagtattgggattacaagcatgagccacggtgcctggcctatacttttgtttttaatgttaggtatgtgctgtttataacctaaaatctaaaacaaaaaaacaaaaatcactattcatgggggagtggaggaggagtgtaaagtttatttctaaactttcatttacttctctaatccattttgaagacttataacacctccttataagaacaatgaaacccattagagcagactaataaatcagtctgcctcccagagaaaatactgtcaagacagcagggtgagaaactatcctagcttggtaagtcatgttccctggttcccagcctgccagtacttgaagcctcatggccattcaaaaacaaaactagagacacacctttttaaagggggcaaacttaagaaactctcgagacaaaggagattaaatacccatgtacaagactccaaagactctaggccttgatctagacccagtttccaaattttggagggaagcattgtcctggggaacagcgggcactgaaatggggcccagcatagccccagcgccctgccaggcggcgctagcggggatcacccggctgcaactgcgaggggcttggaagaatcacctgcgcccggttccctcatctcacagctgtaggcgaccaggagccgcagcatgcattcatccaactgtatgccaagcaattcagttcatccttaccaggaccctgtttcacaataggaagcccgaggccgtgaaaggcccagtgtcttgccagagtcagaggaacagagcgctttggggacagctttctccacctgtctcagtggatgggctcgtacccgcctccaatctgctcacctgttcgttccaaccgtgcagctggctgtagcgcaccctgcagaagaggaacccgtccaggtgcacggagtacagctgcaaacacacagacaccccgtccctggtgagccgagggataagtgagcattgccaccggccccctccctgcccaccctgaccccagccctgggcgcaccacgtagcggccccccagcgcgtcggaccgctgctgggacaccgggatacagaaatgcatcttcatggctgagcggtgtcttgggagtagcgctgggaacccgacctgcggcggcgggcggtgcgcggctctgaactcggcagcggtggacgcagcgcggcctgccacgcgactcagagcgaaccccggcgcccgctctcgccggccggggacatctacaggtggggccggggccgggccgcgccgcctcccagtccccgccccatccagccccgccgctctggtcccgggataggtggcgcctggggctggggcgcatccacggccacccccaccccggacatcggccactgttggcattttctccaagaaggcccgtgaggggcttgaaaacagtttgtgtcccattacctgccaacgctgcctgcagtgcactaattaagatttctgtaattacatagatctagtaactgccttatgattagcagagttatgtttggtcagtttttttgtactgacatttgttaaatgtaacacaagacatgcagcaatatatgcaaccttgctttcgtattattctttcaatcttgttttttccccttaaaataccagaagccccccccaaatggaaatggcttgggtttctcttgatccctgagaagccctcatttttagacaggtgcattcacataaacacttggttctctggactacccagtgcaagttctttcaacagtctctcatttttagttgctgtggaaaataatcttcctaattctctattttagttaaatgaaactagaattcctcccaccttgccgtgatcacagagcacagagatgctgcagctctcaccagcctgttctgtagcaagcctgggctggctccgttcttccctctctcctttaatctacccgtaactcttccaggtaaacagaggacatcctaccacggacaaaacaggcccagggggtggaggaacttgtccaagctcacagggcatttttttcatgggtctgagtcgtttactgcaggatttcatcaggatcattgaaagtcctttcaaatgccagtcatccctggggtaagagctgcatgcctgaaacgggaatccgagactaaggaaggagaagcgacgcctgccaaacaccggtgcctcctgcgtgcttgctgggtgccaggacctgacatatgctatgccatttaattttcacaaacacctgtgggctaggagccattgacagttctggtcttatagaaaaggaaattgaggctagggccattaagtgagggaagcagtatcatatagtagttaagagaatggcaacaggaattcatgtcccagcttagtggcttctagttgagaggccttgggcaaattagtgttttttgtgtttttttgttttttttttttttgttttgagacagagttttgctctggttgcccaggctggagtgcaatggtgcgatctcagctcaccacaacctctgcctcccgggttcaagtgattttcctgcctcagcctcctgagtagctgggattacaggcatacgccaccacacccggctaattttgtatttttagtagagacagggtttctccatgttggtcaggctggtctcaaactcttgacctcaggtgatctgtccacctcggcctcccaaagtgctgagattacaagtgtgaaattagtgcactctttaagctgcagttccttcttatgaaatcatgttaataactctacttacttcaagggaattttcagtccaggatagatgggccttagggtatttcccctgcccataggccatctctgatctggaaggcctccctataccaaggccaggggtattcctgagtgcctcttgggacaaagcctgatcacggcagctctggaatctggtctgatcttcagggcaaagcagagcattttggtcagacccagaagtggccccagctttcctggaactttcctgctccagtgaatggcctggaccctggtttcaccccatggcatgtccaaacagggccatttccttcctttcactaagtgcccccctggagttgaactggaacaggacaggcctctgtgcaagtcaccgtcctcttgcatccctgacctctgctgtagccagtcagctcttattcagtcattcagtcagtgaacattattgagctccttctgtgtactccacactgtgcaagacaatcttcaaa

SEQ ID NO: 587915 - DNA, 4001 bp, Homo sapiens
attcagattctggatcttttacttaataacttttcactgaaccttggcatccccatctgtaaaacagagataatctatcactctctgggcagtgagaggaaccagggcggtaatacacctgaaagaggttatgcgtgtatacgtgatttataaactgtcgcacacttcccactcttgctagttgccattaggatgatttccaaagacagctttagaaagacggatctgaatggtgaaagtctgggacacgaatggttgaggagctggctgctgggtcctcccctgggctaggctccaccctcatttagcaaacatttcctggggtcatgcacagcattgggccaagccctgtgggggccaaggacagttccgagacacgccccagcccctcacagttttttgctttaggaaacccaaggtttgcactaagtctctcccaacccctgcgccctcccagcccagccccacttgctcttgtctctcctgctcacctccacataattagcagggaagatgcccaggcggccgtggtgctctccctccagccagttcttgtccacctccttgtggatgtagacaatgtcacccttctgcagagtcagctccctgcaggtggggacgaggaccgcagggtaagctgaagccttcccaagcctccttcccttcagaccctgcccaacacaccccagttctctcaccccttggggatgcccactgcagcccagtccccctccccatccccctctgggatggcagagattgccttgggtggaaggggagggggaggagggcgcttacttgggggactgcgcctggaagtcaaacttgagcctggcggcctttctctaggcaggggagaggacagagtgggctctctcagttgggcgggtggcagatccaggatggcagccttgggaccactccaggtcccccacacctggtcccctccttaccttcttctcttccctcctggctgggctgccccctccgttagaggcactagggtctgtggagaagcacaacctcagcttggggaggccatacctgggggatggggttgcacccccacctagggcaggcactggcagaagcaaggggctctgtgacctgccacccctggggcaccaacatgcctggtgggtgggcatctccgtgagaaagagagcagggctgggtccttacctcgggttgaggaagggtagacaaagtccctccgacctaggaaggggcttcctccatcagccattttgtggggactcagggaccgggcggaacccaggtaaggtgcatgtgggtagctggagctccaggctgaggccgggctgcacggggcacagagactgagcctccagcctggggctccgcaccccaccctggtcacccctagaccgctctgaccccccatcgcccccatccctgccacctcctcccagggcgtctcccgggtcctgggctctccacaggatgtcctacttcccgagtcgctgcgcggggaagggtgaggcccggcagggcccagcgggagtgcctgggccgtggcggggccgccctaaccgcgctgcgcccccggcggccgcgaccccggtcctctgctaggagttagctgccctcggtggcgcgggaacggcgccccgcagagagtggcgctgcggtccctcccggacacggctctgcggttccttcctcccccggctgggccccgcgatcgcccccgtccgccccgcccggccgcgccacgttccctcccgcccggcctgggacagcccccttcctcctcccgcgtctcccactcacccggccgggggccgctgctccggggcccgtcggggcgccggcgagctctgcgcggggaaacggcgcaatcagggcccgcgaccccgggacccagcggcagccgaggccgccgcctccggaaaagttcgcggctcgggaggggaggagagcgggcgggacgcggggtcctagaggcgcccgcgcggccgatcccgggagcggggcgggaactaggggaaggggcgggggtccccgaggctggggcccgggggccggacggggcgggcgcccggtcgtcgggctgacgtggagtccgcttagaaaggctcctcggggtcacttgcgaaagtcgacgccctgtattttatttatggaggagcgagcccgccagcgcccaggagggcccgaggccggtgcgcgccgctggaggccggacctcggctgcccgtcctccgcccagcccagccgccgaggctcccggctcgccccgaccctgcggtcgccggcgtgccccgcgggtgaaccctgggggctggtaccttgggggacggcagtcgggtctcaattgcccgcaggtccttgtccagctcggcgctcagctcggccagctctctctccagcagcacctgggggcggggagaggctgggcagtgaggggcagcgcaccgtgggggtgggaggcagcggtcaaagatcgactgtgaaaagcaaggccagcgcaccgggccggcgtaagggcaggcctcagcgcacgggccgggctcctgccaggaggtgtggcccagggtgccaagagggcatccccgccacggcctctcacctgcccagcacgccccgggagtgcctacgcgcttcctgatcccgcgattccgcagtcctgccagtttctgccaagttgtgtctctgttacagcaccaatggggttccccatttcctctcccatcttctcccgccctccaaggcctggcttcactgtgcccatccaggttcccccgccaccccagggaccggagcccccacccccacgctgcttcctgccagcctctgctatgggtcttcgccgaatcaggccctcggagcttctcaagggtccagctccacctccaagaatatttcctgataatcccagtgcgcactgaccactcccttttctgctcctgctttggccaacacatatttatttaacacatgtttactgagcgcctcctgtatgccagccactgtcctgagtgctggcattacagaaataaaccatgtgggactggagagagagctcttagttcgtggcctatgcccatggttactggggccaccaaaaccctaatctccctggtttatcaggctgctgtccccagcaccctgcagcactcacctcaatgggctgggagggcttctcaccagggtcgtccaccagcggtttcttgggctgaagggtagaaagggtgtgtcagagcaggtgaactcactttccaaaatgtatcagctgagggtgcgtgcacaccccgagagccagccagcactcaccctctgcccagtctctagttcctgcagaaactggttccaggactcttccgtccagacattgtctactttttcccggcgtctgagcacctgcgtggaggtgggtgggtgtcagcttgtgaagagggctactgggacactggccaggctcaaaatgcaggcttgcaggcccctgcccttcccctgggcccacggtgtcctccaagggattcaagctgaaaggacatcgtggcatagggtcttggccatacggcatacagctggggctgaccagggactatgctgggtgggctacctgatttgagggctgcagcacagtggagaatgctccaggtctgtagttgaaggtgcttctaggtaactcttcagagtggtcccagcttcttctaaagaaagggaaggacatctcttcagcttccttttagggagactgaggcagaagccagcacacagccctctcaccctgcccttgtccctgctgtggggtctactctgcctctgactgccctgccgttactctggaagcaagattaaactgtggaagtgtgtgagctccaagcttaaattccagctctactgtttagtggatgtgtaacctttgaacaagttactgatccctcagagcctcaggctcagaacctgtaatatagaaatgatttggtgagagaacatatatgaggtgcccgggagaaggcctcacacacata

SEQ ID NO: 587916 - DNA, 4001 bp, Homo sapiens
tgagtgccctggggtgttctgcatgtgggcaaatgtgcacgcacatacacgcgctccctggctccactttctcccgcccctccaggctgttttgtgagtgcagggtcttccctggcagcaccatgcctgcccacagccagcttcttctgcctcatcccaaggctggggaaggggaagggagccctaggcacccagggaatggaggggcaagaggggagcccagagtgggggtgcaagaggacaaaaaggggctcccagtttggggtgtccaagggggctttttgacccagagcacggtgctacggcgtccatccctccgcgtcttggctgctggactggaccagaaacagccaagctctgccactgcccaggactggatggaatcaggtttgcctgtgcctgtggggtccttgggggctctcagggagggctgcaaatgcatcgggaggagctgtgtgtatgtgtgtgttggaatctgggtgcagagctgcgaatatgacttctggggggaccaccggagggaccacatgagctgcatgggggttgtgggtacagaggggtgtcagctgaacagtggtgggaggtgcagtcatgtgagcagtggaagagttgggggcccagaggggatgaaggtagaataaggctgggatgactcagcccctggacccagctcctgcccagggctagcgagggtgtagccaaggctgggggcagctccttgtctctggtttgagtttgtggggactcctgacatttgagttgctgcgacacagctcttctgtgcccatgcctgactggggggagtggagggctgaggctggaggaggagcagctccccagctgggtccaattaggactcccaccaaagcaaaacaggcagacacaccccagtccccacactccacctccccttgcgggggggagttgaggcagggtggggtggaaggtcaggagacctggagctggtcggctcctcgcagcacccctccctgcccagctgactgcttcgggccaaattgcagctcagcagctgccgcctgggccatcagctgacagcgccttccttccctgacctccccgcccacctcgtgctcggtgagaactgctctcttggaggatgggtagggcaggaggtcccccacgacccgtagtcagaggttgcttacccttggtgcccccatctgccccttctcaaccctgccccttgtgtcgccccccaccacaggaacctccagggaagggtggtccgagtccttctcttggcagccaggtcaggagacttagggaggacttacaaggaagagggcagcatctggggactggtcccccatgtagcagagagcggaggggtcctcccagaattcagacctcccctccaggcaggcagccagccccgggagcggggagaggcccctggagcgggagaggggaggcggctctgctggggtgggcactggcctccctgctctgaacactgccctgaccttgggtgcctggccctaagagctttcccaggtatttctcagcgacaaggccacgtggacaaggacagcttttcttgaatttcgctttttctggtatgagggctggtgggaggtacttcccagagtttgggacgcggaccccggggaggggctaggtgcgattccctggggttgggcacggatccctcccgccggcctcgcctactccccgcccctccttgcccggacctaccttccccggcgagcaggtggctgggcccgaggccgcccgggagcgcaggagcatccctgcccggctgctgcctggcgcgggcgctcgaggaggaagggcaaggagaagcgcgggccgtcgcggccctcgtgaccgggtcaggacgggccgggccgggccgggcgccggcgcaggaagagggaggccgaaggggcgcgcgccggaggccggaccgtgagagtcgcgcggcggggcgggcggagtttgggtctcggatctggactgcgggccggggctgggccggagaggagggacgtgcgagtgctctccgtccgtcggggcgcgcgcggggacactggtggccccctgccgaggaggcctggccggcggggaggcggcgccgggaggggccgccgagggtccccggggagccctctctggtttcccagctgccatcccggcccctaccgcagggctggcgtcggggaggggtcgggcggcccgacacgggccactcagagtttccagcgacatttccagagtgtgggaagcgagcggcctcgcagcggagccaggacaggggcaggagcgatgaaccgggcggagccaggacaagggggcaggagtggtgaactgggcaagccgggagagacggacaggccgggagcgagatgagggcgccccgcaggcagagtggcggagcggaccaggggaaggccccgccgcccctccgcgctgggggagagggtgtgcctgcggcggcgcgcggccggtcgtgtgcaaacaaacacgcgcgcgtacactgcaaacgtggggacgctcacacacgtgcaagcacagggaggaaatcagcccaagggagcggcccccccgggcgtgccgcgcccctaaagaggataagggtggggtccctttggcggggatgggattaggagggtcttggtgttcccagacactgtgtttgttttgatctgcctgcttttccgctgttctcgctgctctgagctgggtccccagagccccggcccttccggctccccatccattctggtcatcccctctccctgtctctgccccaagcctctgtatggcacttcagaaagtgggaatgcttaaggaacattgaaggaccgtggaaacactctggaatcctttctggcccttgagttggctcagggatccccaagccccaaaccagccaaccaaccaacagttactgatcaactttagctacgagctgggagtgatcaatgctaaattatgaaaactaacgtaatctcctgcattcctactgggtgtcagactggtgccagaggccacgaggagttttggagtgttttccaagctcaccactcaactcaaagtttggaaagaaagagagtagagaaaagactaagtgattttcagtccctaccaccattactgctttagtcttatcttctccctcgttctggtaaagaagctctccccgttgccttgaaacatcacatgtgaaagctggaggagatgtttgggttgagaagcttcagataggcctgctggcctctagcgcctgcggggctgccatgtggacacacagctgcaccagcagcagtgggaccactgggggacacgtcatagggaagcaggtccaaggcttcccaggacaaatttttacatgattccaggggttctgagtctgccagttgtggggcatctatgtaaaggcaactgttgcactgagcggggagctgaacaagatgaccttgaagactccttccaagaacctctgactctccaggaaggcggagagatggggatggcaggggcattgctgtggaggacagctgagcagtgggggaaccctgggacacttcttgagggacgcagcagtgcactgccccccaacctgaagcttagaaaccttcttatccacgccaggtagcctcttccctccctcagggataaaataggtgcccattttcttagacacgcatttttcccacctgtcagggtccttgggactaagaaggaccacatcgctttcactttcttccttcttctcccaagatggtgaagctgaagctcttccgactccaggaatcctggccataccccctcaccagcagcaagcttctcttattctctagggctctgacctggactccaagataaatatttagtgtagagggtgcagcagagctgacaaagttccccacttcctgtttctcacaaagggaggtggcagccatgggtaaggagctggggactggctaccagtttcatctctatgggaatcgggcgttgagtaaacagctttgcaggag

SEQ ID NO: 587917 - DNA, 4001 bp, Homo sapiens
aatggccccgtggctgtcggggagattcacaccggagtcatgcccctggtaggggaggcccatctcaggcttgcacacgaagtgcagatactgttcaaattccgtgcggtccacctccccgaggagctcggcgggctgactggggtccgtgccgtcccggcagggcagtgcctccggagggggcgacggctgtccggggcccggggggtggtgctggtgctggtgctggtgctggtgttgcggctgcatctggaagccgcgcccgccgcccgccccgggcgagcccatcgcgccgtagtacacgtgaagggcgctgggtggcgccaggaggcccggaatcgagggacccgcgggctctgggccgagtcgggggtgcatgggaccggcgggaggctccggggggccagcgtagtccgagacctgcgcgtagctgtaggtgccggccgccgggcagtccccgggcatcggggcggcgaagaaagccgggtcggggtccacgccgtccagcggggacgtgtcgggcgtgggcaacgggtagccgtcgagcggaggcgcgcccagactctggcagtcgcggtagtggccgcccatgtgcggaggcagcagcggcgggccggcggggaagccctgctcggggaactggaggcccaggccgtccatggccacgcggccgccctcggggcccagcgcggccgcctgcggctcagccaggccgtgcaggaagccgccctccacccgcttcagccgcttcacctgcttgcgccgccgcggccggtacttgtagttggggtggtcctgcatgtgctgcacgcgcagccgctctgcctcctccacgaagggccgcttctccgccagcgtcagcgccttccacgacttgcctgcacagtggaaggaagggggagaggggcgcagggcttatcggctgcgctcccgctccaggccccacctggccccacctggacgcacctcccccctcagactttgaattgcgcaaccggggtgaagttaaagagggagatctgggactcctgagtccgagcccttggggaacacccgtcctctaaaggcacccctttcttttggtctcctggaagcggctttccgctcacccatcacccggtcgttcgaaaaacagaaaaggacacctaactagggaaggggtcgagggatggacacaaccggcccagttcagggccaagggtgctctcgcgccgcccggaggtgccgggaagtcgccttcccagagccgttggacccgcgcccccggccacctggggaatccgggagccggagagcaaggcggaaagctgctttggagggtcggagggcgggaagcgggaagggaacccagagccttaagaaaggacgtggccgctacacacccctggttttgggcgtcaggctcgcaaagaacagtttggggtttaagaaatcggcctagcgattcgcgccagcgcgcccggccgcctgggtctgcgactcggactcacccagcatcttgctcaactcggcgttgtgcaggtctggattctgctgcgccagccgcttgcgctcgtccttagcccacaccatgaaagcgttcatcggccgccggatacgggactcgcccttggctcggcccgcggccccggccggtgctccgctgttcgccggcgcctcgcccttcaccttcatgtccccgatggggctcagcgactcggcccaggggcaggggcccagcccggccatcaccgcgggcagcgcgctctgggtctggctctggtcgtcactggcgtatcccgcatccgggctgctcatggcgctccaggcctgccccgctcccctcaaccctccgccggacgcgccgcctcccccgacccgggggagggggtggggagtgaggcactgagatgccccgagggctgcgcgggtctcccggcccgaagccgccgcccgtgttctggcctgtcgcggtctggtctacagcgtacccagggcccccagccggcctagtgacactgcgggcgcccctgggccgcggggccttttctgcacagatgtggccaatggagcggcgagggcgggccggtcccgcgtcgttaggcccacgcccaggccgtggtccgagtcccacgtcccagtccaaccccacgcccgccccttgcccctcccccggccccgcgcccaaggctacacctgcccccgggaaaactagccggagctgggctctggcgccgcgtcctctcccaccggggttagggagactcgaaaagccgtctgggagggctgattgtaccttggaatcgacgtacttgcccaaggtcgtttagatgaacataccgagcgtccattctattctctttaaagcacatctttttgcagaagccgagggtgtttcagtggtgggtgacctagtttacttccaaggaactgcatgggcatcttcaaatgtgttttctcaaatgcgaaagacaccgttgataataaatttaaaaatacaatttttcccccaggactcaacttgcctgtgttatattcaaaatgctgtgtccaagataaatcctaattttctaaagcaagattaaatatggaacgacgttctgtatccaatattccttcactctaaagaataaagcatttactcatgacaagccaaccagtttttatgtgtatcttattatacacatcatgtgaaagtacgaaaatgtatacatgatgtatataagatacgcataacaaaactgtttctcgtatgtgttcagtaacaggtgagccttaatactgatttctaaaatgtaaagacagcagcaatatttgtctaaatgtccgagtttgtttgggggaagagaacaatctgttttagctgcaaagtaactgtggttcttacagtcagtttaaagcggttattctggcagataattagatttctataagtttctttagactggaatgaaatctgaatgactattaaacttgtgtttcgatctggaaaaaaaaaaagttttcagtgggacttttaaaacaagccgttatacaacactgagaaatgacacagcctgccactgctattcctagcgccctccagcattagcaaagaagcatatcctcatattaaccctgaggtagactctatcttacaggaaaggaaacggaggcagagaagttaaggaacttgctggagactacagcgttgagaaggtggaattcacacccagcagtccgccttcagacttgcagctcttaataatcactaagccaggctgttgtgtttgtgtatttgtgttggtttttgagggcaactaacagccattcctgcataattagagataactttgcaaagaaatcaatatacgaatctccagaacagattttctttattatgaaggcgtgataaaaaagtagagcttacacctggaatctgagaagtaaaatgctgctgctttgagtgtgatactacaacaacaagaccgtctgtccagtcttgcttattagtggcatccataaaaatacaaaacttttgcaaactcctggccttcagtttctctggcattgctttttctcaaaagaactcttacacaattgttttaagccaacttatctttaattctgcaagtatctgtgaagccttggctaggggacaagttaagaaagtgtttctagttcctgggtctctaagattcaaacaagaaaaaaaattaaatctgcataaagaaatcatagagaggtgttacttctagttggtagttttgaaagcggttgattttagacaaatttaaatgatgatgtacttttaaagctttattttttctgaaaaaaaaatgggcttcagtataaagcaaaagcacattgcaaatgattaaataagcaacaaaactataggaggagagagagcaatctacaaattaaccccgtagtaccttgttttttgctgttttttttttttttttttttgagatcttttctaacttttctggataataataaatatttttcaaagctctcaaagcagaattttctcttaa

SEQ ID NO: 587918 - DNA, 4001 bp, Homo sapiens
tgaactgtaacctcctgaagctgaagtgcaggccccgatggggaccaactcgcaggaagcatctgtctcctgtgtccctgtccctgcccctttcctgggagcaggcttccccaactctgcagagccatgctcctctctcctccccattccctggcccaggcctgcacagaattcctcctctgtcacggtcacagcaggggcttgcttccccctgttggcagggtcaacaggcacagtgcccacggtccgtggaaaaaaaagtttggggatccacaacaaacatattttcacttcttttaaaatctgaagaaaaatataaacttacaggttaaataaaatgttttattattgtacatattaacacatttgtctttatgccaacactgtgtaaaatacaaatgttactatttttgttgagggaaaaggccccagaaggccccagaccactaaggcgagttggtgcagccggccaccaggctgggcccttggcaaccagcactccatcaactgctttgcacagcagctaaaccgcaggagggctcggcctgggaccccctctgcgggcctgcggctttagccagcagaaagaggggcgtcagtcctatccccaaagttccgcctcgggaaagagccctgagctctgaactccgacgaaaaaaggaagggctctgttccggaccgggtggggtttgggaagggtagagccggcctcgggtgcccttcttacagggcctgtctcccgctgcgtgcaccaagtgctttgaaagtttttcgcggattaaaacgaataaaaacctcgtcgaaaggcaaagaaggcagggttgaaaagtactcagctcgacaccggagaaaaaagaaacccccataggaactccggttgttcgggtgtgtcctaacagcctcactctggacctcttggacctggtgagtccgtgtccccagtccctgcggggacagctcaggaagagagcgggttccaggacagcccaagcatccgaatcaagttatctacaccttcgagactgagcaatagatgaacgaatcgagtctatttgggtaagctttttcttttgttttgttttcctcttaattgtttagttaaagcaaggattcgttcctcagggtctctcttcgggaatattcgttaattataatttcatctgtgacagccttcctctgagatggcccaattgtaaggtccagggaatgctggcttttcccgcttcggtattcctagtaaacgcctgttccacccagcctcaaacgtttccgtccctgccctgtccatgcacgccggtccctgtcgccaggcgtcctggcctggccgctgccccgtctccccgccccctggggcgccgatctccgctcctgtcccagcagaggagcctccctgcccgccgcgcggtttcactttggaccgcgccaagtgcccccgctctgaatcctgggcaccgcgagcacccacgctcgcgcagatggccagccacgcgggcacgaagagggccctcgtcccgcgtgccgggtcttccccaggctccgcgctcgcacccgccctgcagtgccgccagccgcccgccgcccgcccccggcccccagcccgctcggccgcgcgctcactcacccagcatcttgctgagctcggcgttgtgcaggtccgggttctgcactgccagccgtttcctctcgtccttggcccaaaccatgaaggcgttcatgggccgccggatacggctctcggagcccttgtcccccgggggccgggggacggccggcggcgattgtccatccgacagctcggcgtccagggccgggcactcgagaccctcgggccaagggtaggctcccagcagcgaagccatggccgcacgcgggtcgcctcgcttcgcctggcggggcaggcgcggacctggccctcgcacgggtcggggcgtccaacttggcccgcagccgcgacccggcccctgatttatcagcttcgggcggccgcgtcctccaatgactctccaaggcggcgcggcccctccctcggtgtcggcgcgggtcccctccctgcgtcccgggccgccgccgggtccccgctccgacctgccgggaggaggacggagggagggagtgagggagggcctcctccccgcgcctgcccccggcccgcccctccgccgccagggcccgcccggggatctgcgcccggctgccccgggccgcctcccgccccctgccctggacccgcaggtgccgcagagacgcaaggcaggcgctggaggcccgctccagcccctgcctgcccgggccagactccaccgccctccctgcgcgtgtggcctcagaaaatcaacccaaccaggtttcgccgagcccgcctgggtgtgagagacattgaccatgaacccctcagagcagccgttcttaatactccgactgccattcctttcgaaaatgaccgggcttcggccaccgcagccccagtcaacttgggccgccacagaggccggccggagccggggctgggggccgcatcccgcctcgggttctgtgcagtgctcacccaagacccctcgacgcccccgccgcccctggctctcaggagggcgaggccgtcgttctggttctcagccacctgattgatttctcctctcactccacccgcacccagtctccgggtccaggcctccagctccctcacttctggctcttctcaccctgaattttctccttatattttttctttcttcctccgattggcagtcccgcttctccgagtggagtcgctcccgccctctcgcgtccccccctggctgcgctgcgacctgcgaactcccccagtttccctcatctgcacaccctggtgtagaccgaccgtgcgcgccgggcccacgtgcagcctggggactgcaggctgggagctcacggccatctctcggccgcgctcaccgcagctcccctgtcacccggccccctgtgaggagctctgttcccgcgctctcatataagcgccggcacacagtaggcgctcaaggcctgcagaatgagtgagcaaatatagctcagacacctactgaatgaaagtcggcaggtttgactagatcctggaatttaaaatttactgagcgccacccatgtgcggggctccacagaggtgatcctggaaggaggcagcgttgtgggggtgcgggggtgccgtggggtccggagtcagaaccttagtgttcaggtgactgaacgcgcgactctggacaagtcacatctctctggatctcttttcctaatcctaacacgggacaatgataagactgactttccggggctgttgtgaagattcggtgagataaatgcagagaaagctccaaccctgcctgtgatgcttgatgttaatataactctaggcatgaagcccgtgagcctgagtccggatttcaatgtccccgcgcgcagcgaccgatgccttgcatgcaacatgcaacgggcccgacggctaagacccggcaagtgtaaggtgaactgcagcgtctctgtgttcacgtcctaatttttacctctagagccggggacaattttcatccgagaattagctttccgcacaaaagagatggctgggtttgcccctcttttccagccaggattcagtagcagcaccctaggccggtgcgccccaaccgctgcactggtgggccgggaatacaagggtgtggggcggggcgcgcgctgcgcagctcgagcagagaacagggtgcccaccgctggggcagcatcctggaaccagaggcgaagcggcgggggacccacctggggccgtttgcagagagtgcgtcctccatctaggcggacttcccaaccctgcaaagcccaggccatttccactggccaacccctttcccgcatatgcctccagcaaaacccttaggccagagtgcgcctcgtgggatccagggccgcgcccggccaggagaagggagctatttgagaaaggggagaaagagggtcccacggggggattgagcggc

SEQ ID NO: 587919 - DNA, 4001 bp, Homo sapiens
cctctctcttagcacaaatttgaattatgtttatttgtcttcccttctagtttgtgaaagaacttactttatttatcctcacagctccaggactaacataataagtagtgcctataccccttcagaaacattcgctgcatttaattgaattgggaataaggaggtcttggagaacatcactttaaagatactgctgctaatgctaatgataataataatagcaacaaatatatagttcttaatgtgtgctaggcaccattctaagtactttacatatattacttcatttaatccctcaattactgtaccgggtaggttttaagtgacattagtaataacagttaacatttatggagctaaattaccatgtgccatagcttatctcacctaatcttcaaaacctctctcataaaggatattaataattactcctattttacaaatgagcaagtcgacatgtgaactaaggatacgagtctcaataggctaactacagagcccacatacttaaccactgtaccagtgattttcaaactgcaggtagcaacccataaataaatttagtgagttgcaattaacattgttttataatgagatggaatagaataaaaaatagactacctgacatataacattaaagtaaatattgctttatacaaacttttacttcatgtctatataaatggaaattatgtgtgtatataaatgcacgaggttacaaagtaaactatatttcttattgtgggtcactgtcaaaggttaaagaaaacccactgtacttgggcaatgattttaaaaacaagaagtagcaatgggtctaattcatagaagtatttctttcagccctctgggagtctggtcatatatcagacctctgcagaaaaggatgacactgtccacttctccaaattcctgccggctttgacttaggtatatgatatagatgacagttcttaggcttccggatgagatctagctgagaaattagatgtggctttcacaccataccttcagggcctattgatgaatggctcccaggacaaggataacctcaagggtagaagttacaggaaagcaagatgaagaactcgtaaattattgatgctgcccagaatagaatgggttgccttagaaggatttttccaaagagcaagggatctttggtgggagagatctaagcatctaatgggattaaaatagattaccttgaattgaaggtattttgcaacccctgagattttatgatttcaataaaatgtgattaaaaacacatgaaatgatagagccatctcttacctaatcaaatgaatttcattctgaacatcattttaacatttctctgagaatcttttttttttttttttgactaatcaagtgcagtagtgagaaggggagaaagagtacaacgaggaggtggatctataactgaacaatcaagtgagagaactcactacctttggaccaagtctctctgagaatcctttttgaaaaaaaaggattctctttttttctttctttctgtaggatacaccttctcaagactactgaatgtccatctcaagttccaaaaaacaagttatacaatactttagaactcttccacctctgtttgcagtctttgtttctaattgggaaaaccttcgatcctagctggatttaatttctccatcatcctgatccacatccacctcccatatttcgtagccagcttagtaatacctccagttcaaactgctcgggcctactaacgcgaaaagctgggtctctcccaccgaggcaccctctttcctgcatccacagggccgaccgccccctgcagtcggagaccgaaaagaaacggcatcctcccgccgtggcaacggtttctatgtacagcggcgccaggacctgccgggactggggagccccacagcccagccgcaatggtctcagattgctccccagcccctggcttgggtcaccagggctgaccgcgccggtggacccgggaactccagcgttgccaccgcgccccgacacccgccaccgtcccccgcggcctggaaagccccgcgtgttccccggccttgaaggacgtccaccccatcgctccttctccctcgcggcccaccgccccttcgcctccccgcctcgacctctcgcccccgctccgggagggaagggctgagatgcgacaagtcctatattcccggccggcaggtacacacaggcactcactgcttctcagcgccccgcgtcggggaagtcgcggccgccgcaccggctctggctgcactgcaggtgctgagggagggtctcgtcgcccggcccgagccagaggcgacaggctgacggccggggcggggactaggcccctgccacgccccgacccgcagtccggcagatctgcagatctgccgacggccacaggttcaccttccccgccttcactggcagaggaccaattgggcataagagttggtgtgagaggtccacttcctctcgtttgagtttcagtttgttgtagagttaaaacgctggcatcagccgggcgcgggagctcacgcctgtaatcctagcactttgggaggccgaggcgggaggatggcttgaggccaggagttggagaccagcctgggcaacacagtgagaccctgcctctacactatacatatatatatgtgtgtgtgtgtgtgtgtatatatatatatatatatacacacacacacacacacacacatatatatatgtatatatatatttaaatactttaaatttttattgtatttatgttttttgttttttgtttttggagacagagtctcgctctgtcgcccaggctggagtgcggtggcgtgatcttggctcattgcaacctctgcctcccaggttcaagcgattctcttgcctcaggttcctgagtagctaggattacaggcgcccgccaccacacccggctaatttttttgcatttttagtagagatgggtttcaccgtgtttgccaggctggtcttgaactcctgacctcaagtgatctgcccgcctcggcctcccaaagtgctgggattacaggcatgagacaccacacctggcccataaataaaatatttttttaaaacgctgctactgttctgttatcccggactgctgtattccctgctaagtaaattgattactcctatttaactataaaaaatgtaattaaaatttcagagtgcattgcaaccaagatttacttacctcttcctctttaaaaaaaaagagtaaatgaaagacaaaattccctcttccttttcatgaattccacgttttctgagtgctggttatgagtcaggcaccatactcagcacagggatgaaaaggtgaataagacaaaatactaatacaattcagatgaataaaacaatagaggttacttgtcaggaaatttatttcagttttataatttcaaactagttaaaatagatgatgaagatcaaagttaatttacagtgtctggcagttctgtaaatgtatttctctttcccttttgcacttaaattacagacctgcggtctgctaccaagcactgttagtggcaaaaattctaatgcttggcaggacacagtggctcatgcctgtaatcccagcactttgggaggccaaggcaggcagactgcttgagcccaggagttcagaccagcctgtgcaatatagtgagaggctggctctataaaataaaaaaaaaatttttttaaatcactttagtcttcatagagataaaagaagatatcatccaagaaacaaggagataaagtgaggcctggtaaggtcacttagccaggtaacaaggggtggtgcacgtatttggacccaaagccttacaccaaagcccatgttgtttactgagcacttaattactaaccaatccatcagtaagtcccacagccagatacttctcaccacctccacaactacagccctggcccagccaccattaccactaactattacagacggtctgttgtttctttgttgctac

SEQ ID NO: 587920 - DNA, 4001 bp, Homo sapiens
tactgtaccgggtaggttttaagtgacattagtaataacagttaacatttatggagctaaattaccatgtgccatagcttatctcacctaatcttcaaaacctctctcataaaggatattaataattactcctattttacaaatgagcaagtcgacatgtgaactaaggatacgagtctcaataggctaactacagagcccacatacttaaccactgtaccagtgattttcaaactgcaggtagcaacccataaataaatttagtgagttgcaattaacattgttttataatgagatggaatagaataaaaaatagactacctgacatataacattaaagtaaatattgctttatacaaacttttacttcatgtctatataaatggaaattatgtgtgtatataaatgcacgaggttacaaagtaaactatatttcttattgtgggtcactgtcaaaggttaaagaaaacccactgtacttgggcaatgattttaaaaacaagaagtagcaatgggtctaattcatagaagtatttctttcagccctctgggagtctggtcatatatcagacctctgcagaaaaggatgacactgtccacttctccaaattcctgccggctttgacttaggtatatgatatagatgacagttcttaggcttccggatgagatctagctgagaaattagatgtggctttcacaccataccttcagggcctattgatgaatggctcccaggacaaggataacctcaagggtagaagttacaggaaagcaagatgaagaactcgtaaattattgatgctgcccagaatagaatgggttgccttagaaggatttttccaaagagcaagggatctttggtgggagagatctaagcatctaatgggattaaaatagattaccttgaattgaaggtattttgcaacccctgagattttatgatttcaataaaatgtgattaaaaacacatgaaatgatagagccatctcttacctaatcaaatgaatttcattctgaacatcattttaacatttctctgagaatcttttttttttttttttgactaatcaagtgcagtagtgagaaggggagaaagagtacaacgaggaggtggatctataactgaacaatcaagtgagagaactcactacctttggaccaagtctctctgagaatcctttttgaaaaaaaaggattctctttttttctttctttctgtaggatacaccttctcaagactactgaatgtccatctcaagttccaaaaaacaagttatacaatactttagaactcttccacctctgtttgcagtctttgtttctaattgggaaaaccttcgatcctagctggatttaatttctccatcatcctgatccacatccacctcccatatttcgtagccagcttagtaatacctccagttcaaactgctcgggcctactaacgcgaaaagctgggtctctcccaccgaggcaccctctttcctgcatccacagggccgaccgccccctgcagtcggagaccgaaaagaaacggcatcctcccgccgtggcaacggtttctatgtacagcggcgccaggacctgccgggactggggagccccacagcccagccgcaatggtctcagattgctccccagcccctggcttgggtcaccagggctgaccgcgccggtggacccgggaactccagcgttgccaccgcgccccgacacccgccaccgtcccccgcggcctggaaagccccgcgtgttccccggccttgaaggacgtccaccccatcgctccttctccctcgcggcccaccgccccttcgcctccccgcctcgacctctcgcccccgctccgggagggaagggctgagatgcgacaagtcctatattcccggccggcaggtacacacaggcactcactgcttctcagcgccccgcgtcggggaagtcgcggccgccgcaccggctctggctgcactgcaggtgctgagggagggtctcgtcgcccggcccgagccagaggcgacaggctgacggccggggcggggactaggcccctgccacgccccgacccgcagtccggcagatctgcagatctgccgacggccacaggttcaccttccccgccttcactggcagaggaccaattgggcataagagttggtgtgagaggtccacttcctctcgtttgagtttcagtttgttgtagagttaaaacgctggcatcagccgggcgcgggagctcacgcctgtaatcctagcactttgggaggccgaggcgggaggatggcttgaggccaggagttggagaccagcctgggcaacacagtgagaccctgcctctacactatacatatatatatgtgtgtgtgtgtgtgtgtatatatatatatatatatacacacacacacacacacacacatatatatatgtatatatatatttaaatactttaaatttttattgtatttatgttttttgttttttgtttttggagacagagtctcgctctgtcgcccaggctggagtgcggtggcgtgatcttggctcattgcaacctctgcctcccaggttcaagcgattctcttgcctcaggttcctgagtagctaggattacaggcgcccgccaccacacccggctaatttttttgcatttttagtagagatgggtttcaccgtgtttgccaggctggtcttgaactcctgacctcaagtgatctgcccgcctcggcctcccaaagtgctgggattacaggcatgagacaccacacctggcccataaataaaatatttttttaaaacgctgctactgttctgttatcccggactgctgtattccctgctaagtaaattgattactcctatttaactataaaaaatgtaattaaaatttcagagtgcattgcaaccaagatttacttacctcttcctctttaaaaaaaaagagtaaatgaaagacaaaattccctcttccttttcatgaattccacgttttctgagtgctggttatgagtcaggcaccatactcagcacagggatgaaaaggtgaataagacaaaatactaatacaattcagatgaataaaacaatagaggttacttgtcaggaaatttatttcagttttataatttcaaactagttaaaatagatgatgaagatcaaagttaatttacagtgtctggcagttctgtaaatgtatttctctttcccttttgcacttaaattacagacctgcggtctgctaccaagcactgttagtggcaaaaattctaatgcttggcaggacacagtggctcatgcctgtaatcccagcactttgggaggccaaggcaggcagactgcttgagcccaggagttcagaccagcctgtgcaatatagtgagaggctggctctataaaataaaaaaaaaatttttttaaatcactttagtcttcatagagataaaagaagatatcatccaagaaacaaggagataaagtgaggcctggtaaggtcacttagccaggtaacaaggggtggtgcacgtatttggacccaaagccttacaccaaagcccatgttgtttactgagcacttaattactaaccaatccatcagtaagtcccacagccagatacttctcaccacctccacaactacagccctggcccagccaccattaccactaactattacagacggtctgttgtttctttgttgctacctgtcctacatagtctattctcacacaacagcctggtaattcttcacatcagaccaggtcactctcctgcttactgtcccaatggctttgcatcacaacaccctaagtgagctggcctctgcccacctctgcaacctcatctcctcccactatccctcctgtcataaagtttgagtcacatgggcttgattctgaagtgggaacaagattaagctcactttccaccccatgacttttacatggagtgttttctgtttcggtaatgttctttctcatccttcagtcctctctgttcaaata

SEQ ID NO: 587921 - DNA, 4001 bp, Homo sapiens
aagttccaaactaaaacatcaactccagatatatagctctgccccactaaatctcctttaaccaaaggaaggaataatcctgtctcacaggaatactgttagactaaataacacacgcctactattgcacctgtttatatttgttgtgtaataattgagttttctttttcccttcccttgggaggagatccagatgaatgagtcctttggaactgtgggccaattagaaagggatgggaggttgggtaggatgctgcaggcatcaaattcagcaggactttatttgctggatgtcacagcaatttgccaacaccctcctgtctttcttgctcttgcccactgatctgctaacctagttctccctgtcttagggtcagcaatcagcttggcattaaagaagcatcttggaaactacaggctcttccaggcccttttggatttgaagctggtcctgcccaggggtttgggggctgaccagaagcctggcccttctggaagagtccagaagagtggctgtgggctcaattgtcccttgccatgtcctgctacctccttgcctgagtagactgacaatacagtctattctctgcccccatcctcaggaagcatttcccagacctcaatggacacctgaaacttagtaggtaggtattcagtaaattccttgaacgggaacgacctccaaagctaagggcatggggctgcaacctggcaggaggccatgtttccaccagtgtctcctctggcacctgttcttggaggaagccagcaattactggtgtggcttcagataaattgccttttggcccctcaatactcccacgttccacaaggccctcaatgatccagccccaggggaagctgtgagaccccgtggtctccctgacaggcagggcagcccaatgcacccgcaccatgtcttccccaaacaatgactgctcacccaccccgaccagcacagacatcttcccgtctatttgttccctctacgtctccccagtggatgcacttgttgcacgtgttggtccctgactcaccttggtaaggtggggtgcgcggtggtaagaggtcccgtttcactgcgtggcgtagcagctgaaacccgtttgtgccttgcccaggggctctttccctgagttctccgagagcctcagtggctgagtggttcacatgtctggcttgagacgatcctgtgcaagtggaaacacacgtctgcggatgctctgaggcctccgcctggcagacccgtcagcatgaggcacctacactctaccaggtgagtgagcatgggtgattgggtgggggagttgggaggggtgctagtgttccgtgtgtgtgcacatttgtgcacatgcgttgtatgcacctatgtgtagagagagaaggtgaatgaagtgtaagaaatgtatgccatgaatggtgagtctgagcacctcctcaaagccagcacagccagagaatttatttcaagtgtcactaatgcagttgttaagattccctaaaatgtaatgttcttctctgtaagggaaaggggaatgttaaaaggataagaaaatggagtcggggagggacactcttccctgggaagcaagtgccatcagccaattcagagtgccatttatgaacccagttcagagactcgtacccaaagctccaccaggaatacatgccccaaggacttcatctctccctgtccagcctggactcccatacctcagatgaccattgcagagagattctggcacccagacccgggtcacctttccattttacctggaaacagcagggccacaaggagaaggctggtgacggacgggagcaatcgttgcctcatgtctgccaagagcactgcaagccagaaagcacccagggtgggtgggcaggcagcggggctcctttgatggagtgaggctgggtgtgtgggcccggagcgtgggaagagctgtgctccaggatgacttctcattctcaaaggacaatgtggacacgctactatcccactgctggtggaacaaacacttgagacacatatttcaggaagtaaataatacgcctgaatgccttgggtgggtttggtgaataaggaagaacagagagaaacagaaagatgaaaggcatggaggggcagaacaaacataactatcataaagttgccaatgtcctcaaacgcttctcaaaagccccctaatgttcatgagaacagggacataaataaactgccatgtcgattctatcctgttggctgagcgtttttattttagtgttaaaaaatcatgcataagacacacaacataacaggtaggacctggttttacaaactatcccttcctgaagttatacagagagttccaaggctgctcaaaatgttcttttctttttcttctcctctctgagtctctctccctgtttcttggtcccctccacttctccttcctcactttggacccccctcctttctattttaacttatttgagttgtcttgatttttctctcccctttccattctctttacccccagacacctcctgttgatgtcactgggtccaattcaattcttttaaaaaagaaaaaaaaaatctgtgtttgagtctgggttttctcctctagtaatatccaagcagaggacttgtcttcccttctccttcatctttttaagcattttaaccaagtgtgtgtttcttacttggctgcattagctcaggtatgcatgtaacccagacagtctgctctggacttaactaaagtgaagaaggctttggttgaagagttttgtattcacatagcatccaatgtaacatcagtgatgtctggaaaagatagtgcttatctcatatgtctcatttgcatgtatattttaatccagacagagaaaacaacttaggtcatttgtgtaaataaaaatacttactctctacctggagaaagctggaagcaaatggagaaagaggcagcaatgacaatagagacctgggcatccgctgaagcaccagcaaagggcggaaggtttgcagctgcggacagttgcacatagcagctgccctggcagcacaatgcggaggccactatcttttgggtctcaggacagattctccactgcaaagcatgaggtgctggtcagggagagcaggagcatcattcacatcctttcactttaaggaattaggaagtcttccaattccaagagcacagggcaacactgcggagataggtgacaactggcccatgataagtttctttaatcacttactgcatcaaattctgataattggatgttggaagaacatagacagtcaagaaaggaggtagacagctgctctacctcaaccctaaatgaagatttattcgctcatctacatactctgggtattttttatactctagttcaatagcaacttcttacagttgtatttgtaattatttaaacttggaatgtggatcttttataacagtgatggaaattttggagtatattggtaacttatttctatatatttttatcttctctataaaaggaaagaaaacaaaaacaagcctattccaccattcagatattcatagtaatgaatcattaatcaaaatcatgacttaaaatataacagcatttgagtaattaccacccaggtaacggaatcttctttgaagtcgttagaattatttgaaattatttaaatgaagaaactgagccaaaaatagttagatctcacttcctttgtctacgtcttgagataaagtaagccccctcttccatgcttctgaaaagaacaatcttaaaaaagagcagccgggaaagcctagttctgctctttgacaggcaaaagctggtgaagtcgtaataaaggcaattaatgttacatctgtcctaacacaacaatgctctcagctcctgtcctcttctgccagatttctgtgtcctaaaaaaatctttgaataattctcttgctaaaagccacatccatcctgagggggaggatggcagaacccattatagaatattctaata

SEQ ID NO: 587922 - DNA, 4001 bp, Homo sapiens
agttccaaactaaaacatcaactccagatatatagctctgccccactaaatctcctttaaccaaaggaaggaataatcctgtctcacaggaatactgttagactaaataacacacgcctactattgcacctgtttatatttgttgtgtaataattgagttttctttttcccttcccttgggaggagatccagatgaatgagtcctttggaactgtgggccaattagaaagggatgggaggttgggtaggatgctgcaggcatcaaattcagcaggactttatttgctggatgtcacagcaatttgccaacaccctcctgtctttcttgctcttgcccactgatctgctaacctagttctccctgtcttagggtcagcaatcagcttggcattaaagaagcatcttggaaactacaggctcttccaggcccttttggatttgaagctggtcctgcccaggggtttgggggctgaccagaagcctggcccttctggaagagtccagaagagtggctgtgggctcaattgtcccttgccatgtcctgctacctccttgcctgagtagactgacaatacagtctattctctgcccccattctcaggaagcatttcccagacctcaatggacacctgaaacttagtaggtaggtattcagtaaattccttgaacgggaacgacctccaaagctaagggcatggggctgcaacctggcaggaggccatgtttccaccagtgtctcctctggcacctgttcttggaggaagccagcaattacaggtgtggcttcagataaattgccttttggcccctcaatactcccacgttccacaaggccctcaatgatccagccccaggggaagctgtgagaccccgtggtctccctgacaggcagggcagcccaatgcacccgcaccatgtcttccccaaacaatgactgctcacccaccccgaccagcacagacatcttcccgtctatttgttccctctacgtctccccagtggatgcacttgttgcacgtgttggtccctgactcaccttggtaaggtggggtgcgcggtggtaagaggtcccgtttcactgcgtggcgtagcagctgaaacccgtttgtgccttgcccaggggctctttccctgagttctccgagagcctcagtggctgagtggttcacatgtctggcttgagacgatcctgtgcaagtggaaacacacgtctgaggatgctctgaggcctccgcctggcagacccgtcagcatgaggcacctacactctaccaggtgagtgagcatgggtgattgggtgggggagttgggaggggtgctagtgttccgtgtgtgtgcacgtttgtgcacatgcgttgtatgcacctatgtgtagagagagaaggtgaatgaagtgtaagaaatgtatgccatgaatggtgagtctgagcacctcctcaaagccagcacagccagagaatttatttcaagtgtcactaatgcagttgttaagattccctaaaatgtaatgttcttctctgtaagggaaaggggaatgttaaaaggataagaaaatggagtcggggagggacactcttccctgggaagcaagtgccatcagccaattcagagtgccatttatgaacccagttcagagactcgtacccaaagctccaccaggaatacatgccccaaggacttcatctctccctgtccagcctggactcccatacctcagatgaccattgcagagagattctggcacccagacccgggtcacctttccattttacctggaaacagcagggccacaaggagaaggctggtgacggacgggagcaatcgttgcctcatgtctgccaagagcactgcaagccagaaagcacccagggtgggtgggcaggcagcggggctcctttgatggagtgaggctgggtgtgtgggcccggagcgtgggaagagctgtgctccaggatgacttctcattctcaaaggacaatgtggacacgctactatcccactgctggtggaacaaacacttgagacacatatttcaggaagtaaataatacgcctgaatgccttgggtgggtttggtgaataaggaagaacagagagaaacagaaagatgaaaggcatggaggggcagaacaaacataactatcataaagttgccaatgtcctcaaacgcttctcaaaagccccctaatgttcatgagaacagggacataaataaactgccatgtcgattctatcctgttggctgagcgtttttattttagtgttaaaaaatcatgcataagacacacaacataacaggtaggacctggttttacaaactatcccttcctgaagttatacagagagttccaaggctgctcaaaatgttcttttctttttcttctcctctctgagtctctctccctgtttcttggtcccctccacttctccttcctcactttggacccccctcctttctattttaacttatttgagttgtcttgatttttctctcccctttccattctctttacccccagacacctcctgttgatgtcactgggtccaattcaattcttttaaaaaagaaaaaaaaaatctgtgtttgagtctgggttttctcctctagtaatatccaagcagaggacttgtcttcccttctccttcatctttttaagcattttaaccaagtgtgtgtttcttacttggctgcattagctcaggtatgcatgtaacccagacagtctgctctggacttaactaaagtgaagaaggctttggttgaagagttttgtattcacatagcatccaatgtaacatcagtgatgtctggaaaagatagtgcttatctcatatgtctcatttgcatgtatattttaatccagacagagaaaacaacttaggtcatttgtgtaaataaaaatacttactctctacctggagaaagctggaagcaaatggagaaagaggcagcaatgacaatagagacctgggcatccgctgaagcaccagcaaagggcggaaggtttgcagctgcggacagttgcacatagcagctgccctggcagcacaatgcggaggccactatcttttgggtctcaggacagattctccactgcaaagcatgaggtgctggtcagggagagcaggagcatcattcacatcctttcactttaaggaattaggaagtcttccaattccaagagcacagggcaacactgcggagataggtgacaactggcccatgataagtttctttaatcacttactgcatcaaattctgataattggatgttggaagaacatagacagtcaagaaaggaggtagacagctgctctacctcaaccctaaatgaagatttattcgctcatctacatactctgggtattttttgtactctagttcaatagcaacttcttacagttgtatttgtaattatttaaacttggaatgtggatcttttataacagtgatggaaattttggagtatattggtaacttatttctatatatttttatcttctctataaaaggaaagaaaacaaaaacaagcctattccaccattcagatattaatagtaatgaatcattaatcaaaatcatgacttaaaatataacagcatttgagtaattaccacccaggtaacggaatcttctttgaagtcgttagaattatttgaaattatttaaatgaagaaactgagccaaaaatagttagatctcacttcctttgtctacgtcttgagataaagtaagccccctcttccatgcttctgaaaagaacaatcttaaaaaagagcagccgggaaagcctagttctgctctttgacaggcaaaagctggtgaagtcgtaataaaggcaattaatgttacatctgtcctaacacaacaatgctctcagctcctgtcctcttctgccagatttctgtgtcctaaaaaaatctttgaataattctcttgctaaaagccacatccatcctgagggggaggatggcagaacccattatagaatattctaataa

SEQ ID NO: 587923 - DNA, 4001 bp, Homo sapiens; identical to SEQ ID NO: 587921

SEQ ID NO: 587924 - DNA, 4001 bp, Homo sapiens
gtggtaagaaagatgtcatcagaaggaaaacagagcagcagattggttgcatttatgtctctctgaaaatcagtttggagctcggtttctagtcagttcccatctccagatacttaagagatattcccttgactaggaaaggaaagtggaatatcacaaaattctgagacccctttgaaaaggcagtacatggagaagtaaggaagttaaaaaaatgtcttttatcagctcttcacctttggtgctaaattcattcaacaaatatttattgaacacctactataagccacacattcctttaagcccttgggatacttcaacatccctgccttccgggagcttatattttagatcccagatctgccatccatctctggtttctcttttccttcttcatctgtatttgatacgcaacacctattccagggatcagagcaaatgtcacgctttttctcaccagaatggcagaaaaaaagtctgcagatcccttgctgcatatggcagatggtatttctaattcccggtggaacatcccctatggatacaacagaagagagttgacatttaactcatatagtgcagagaatagaagatgaccccagcccgctgccaagggttatatattctgacaaggctaagtacttttggacaagccccagtttaaccgaactttggcctcttagctttaaaacaggaacgataatttatatctgaaatgttgccaggaggatgatagggtgtgttttatgaatgctcacctggcccatctaggccctaaaaagtccacacagatcctaaatgagggtcctcgagcctcccggtgagagatgtgcactagaaggaaacaaagggagttttggaaaacagaagtggtccagaataggacaggtcttggtctctaaggaaattaaaggtattaacccattctcaacttatggcccaatttttagttttatgtcctacaacgaaaaggagaaaataaaacctctctcctcaccaggacctgtgggcttgtaagtcacaaatgaccacctaaatttttataacaacaggacattgggcaagagatggttgaaagaaagatcttacttatgtcagatctgcaaatgctacgtacgatgactttaaacagcagcaacaacagcagcaacaacaacagcacagtgttggtcttgcgtgattaggaaaacactcttgcacaacatccaacctccaaacggggtctaatccctgattctgtatcatctcagccctgtcacagcttggaggagacagcaaagtgaagaaggtggggggtccacctttagtcaagacagaagagcccccagcctggaagcgtggagacctggattctggtcttacttcttccaatatctcattatgtctccttagacaactcatttaactggttacacttcagcttgcccatctgtaaaatgtgttctatgtgcaagcagggggaatattataagtttgaagacctactatgaccataaagattcattgcaccatggtaaattaacactttctctggactttggttttctttttgtagagcatggggctgctatagacaatctctgattcccttccagctctgacattcatatgactataacttccttctgaaaacttttctcagactgcagtgagtgcttgccacttgtatcagagcaagcatacccctttgtcttgtgtcaagacctttataacacttatttagcttttaaaaaacttcacaggggagatcaaaattgtccaagactgagccccacagtggcccacctgcatccactaacaacatacagacacatctacacactgtccatacagacacacacataaatggaattcctgcactaccttccccagggctaaccaggagacatttacctgagtttgtttggaccaaacaaaagagaacagcaaacagaaaaaagaccttcatgttttaaggtccgttgaacctccctgccctcccgtgaaggagcacaaatatgatgaatgatggaatgaaatggagcggagaaggcacaaaatgggacatttataggtttttgggaatactgatcagcatgagcatatttatctgctctactgagtaaggctgtgggcagaaggttactgactactcttccctttctgcctaaaaatagactggcttcctgatattcagagaagcagggatcaaccaataattccatatacggatattgaagaggaaagtgaaccaacattgaggtgtggctacttagtgccaagccctgtgctaggtgctagagacatggttgtgtaaagatatattttctgccttcagaaagctgcggtgtccaccacagttgagcagataattagcttatttcccagcaacatgactcccatctaccaacagaaacataggcccacgtgcattaggagacatgtgcacgaacgttcattgtagcacatttccttgcagccaagagaatgcaaccaaatagtgtattatgacaacaacaaaacacaatgtatttccacaccacaacaagaatagaaaaacaagaagatgtgtacaacaacgtggatgaacctcacaaacgctatgctgaaagaaaaaaaaaaacagagacaacgtaccacattattccaaaaatttggcaaaattcacctatttatgaagagccaggatattgtctactttggaggaagaggacatgctcttctctcatttgatgaagttatccgctgtcggaggtgacagtctagtgagggatgcagagagcccccggcaaccacagggctgtgtcatcctgggctggagggaggtttgtgggctctggggtgctgggagttgtgaaaacagaatctgcaaggacacgatatttttgtgtgtgggtttatataatgtgtggtattaaaacacacagtggataaatctgcacattttgcccctatttgattttagtcccaggatcacttagatttatttcccttaaaattctcttaagcaaaaggggcaagtgagaaggatgtcttctctcctatccccctgggcttcataacaattgctgttagcttcttattaatccttccagaggtgtcccatgtgtatggaagcagagatgaatccataccccatttttatgtaagcaatagcagactctagatatcattctggacttgcctatattacttgttatagcttgcagagccttgttattcttcagattagacacatcatattttcttcaagctgtcttctgcgttatttaaccagtctacaacaaccatatctcaccatgagtcttacctagacatggattttgaaaaagagacatcaagcagtggtcttggactttctgcatgggtgaacagtgtgagcatctcaaagaggcaggggctgggtgttcattttgaactttccacctctggagagattaagcaggacaatgtgccctggcagggactctctgactcacagacctttctgtaccttgcaaaatcacctttgaagttaagactttagggaaaattgggcactccaagctgcttttgaccctccaccaaaaaaaaagagagaaaaaaaaaagttaccttaaatgttagctatgtactaagtaattgtaaaatagttatgaatatttgtgagggtccaactcagtactttaagaaatcgattaaaatgtgaaattctttctctgtggagcatttgttctgaagacatctctgaaatctctcaaaaaaaaaaaaaaaaagaaagaaagaaagaaaagcaatttcatttgccccttagggaaattggcttccacaccaagatgataccctaagttcaagggtcccaaggaataatgacaattctgaatgtatcctgtgcatggacaaagtggctgtacgatacatgaaccattgtttgataaaaacactgagtgtggatattcaaaaatttgagtcattttttaaaagtcactaagatgacttatagataaaacaataaaatgcatattttatactttacattcatt

SEQ ID NO: 587925 - DNA, 4001 bp, Homo sapiens
cctccttcttcttcttgttcttcttctcctcctcctcctctcttttccttccttccttcctttccctttctttctctttctttctttcttttttcctttccctcccttccatccttccttccttcctctctctctctctttctttctttctttccttctttttctttcaaaatttcgctctttttgcccaggctgcagtgcaatggcgcaacctcggctcactgcaacctctgcctcccagttcaagggattctcctgtctcagcctcccaagtggctgggaccacaggcatgtgccaccacgcctggctaactttttgtatttttagtagagatggggtttcactatgttggccaggctggtctcaaactcctgacctcaggtgatccacccaccttggcctcccaaagtgctgggattatgggctgagccactgcactcagcctattattagtttttgagatggagtctcgctctgttgaccaggctggagtgcagtggtgtgatcttggctcactgcaaactccacctctcaggttcaagtgattctcctgcctcagcctcccgagtagctgggattataggcgtgaaccaccatgtccagaagatttttgtgtttttagtagagatggcgtttcgccatgttggccatgttgatctcaaactcctgacctcaggtcatctgcttgcctcagcttcccaaagtgctgggattataggtgtgagccaccgcacctggccccatgtgtattattctttttaccctctctgttgtctctgtgtcattaggggtataacatttaaagctagaggtgtctatgtgctcgtaatcagtaagggagaactgaagaccagccctatgccacatttcaggttgtatggcagggaacccagtgggtagggggcagggaattaagacaggaggggagtgagcacaagcctgaagggctttagctgctggaaagacccaagttatcagtcagaaacatgtctagtttggagtgagctaagttccagtgactcattgagcctgcaggatctggaggggatcttgagttctagtggagagttgaagctgcgctgtgggtacgctggctgagggtggagggacagggcctggacccagagcctgggagcagcctcaattaagatgagccagagggatggacaagatggcttgggaactcagaaagagggtcatggaggagggctatcgatctcagatgccatgcagaggtggagaaggatgcagcacctaggaaggcacttgtgaccgttctagagcagtggtgtcagggttcgttgccaagctgtagaggcttaaataagcagagaccagaaagagcagaggtgtcctttcagggaaggaggaagatttcatacctgatggtggacagaggagagggccaggtaaggagggcaaggtacagggcctgtgatggaggcaggtcaccgcaggggtgggtgggctctgagcacctgtggagaggtccaccctggacaggagggaatgcagcctcctccaggacaggaagcacattgtctggtgagctgagtgtgttagagcagagagggcaaggagaagggcactccctccatgacctcctgagacctcagcacactgagtctctcctctctggtgcagtccccacttccctcctcactctcttgggagcgaggcctcttaccattgttctggcgtgaggaaaggcctgctgttgcctcaccaagcccactcgtgaacccgctgatgccgagcccgcctgcctgagtcttgatcgctgacttgagctcgtgattctcccgaatgagccgcaccaacttcttcagttcctcattttcccgcaccagcctctctatctgatgccgaagcccttcataattggtgagtagagacatgccctggggcagtggcaagggtgcggcccacgggagggcactgcacctggaggctgcccagggccccaggccttgcctgggctgaaggagggtgcagagtctgcaaggctggcccagtgggccctgggtattgtgaggtcagaggctgtgccctcttccttgccctctctgctctaacaccctcagctctccatgccaccaggcctgtacacaggccttgcctcggcctggaatgtcctgaccttttctctgtctcgccaacttcaccctcatggtgcctcttccgtgaaacttcctctcccccaccgcaagttaattgctgcccgctgggtttccccagcagatgtgtcctgtgtcatagcacttcccctggttccagttccgtgctagctccttaacattgtccactggctttacagtgaggtcagggattgtaacacgttcctggaaaccccagtgtccagcacagggcttggcacaatgtttgtaggtaaacagtaaatatttgttgaatgaaaacccaccactccaccttcctggccaggatgccccttcttggtgatcttgaacatgcctgggtttggcctctcagccttctcctggttgctgtgtcttgaaggcctggacactcgcccatgatttcttctgacccaggtgctcagagtctctatcttactgctggtccaggagctctctataacttggagtttccatttctggtgactcagcgttccctattccaaatctcccgtcgttgccttctccgcacttggatctctattccccagctccttgaattttcctgactttagtccttcaggagcccaagactgcatccctcacctggttctaagaactcaggactcagtcctcatgatgctccccttctcttagagctatctacagataactctatggtactgaccttgagtactgagtgaggccgtgtcctcgtggcctccattggctctgtggctgttctccctcaaacctctttttggggcagggagaggatagcgaagtccaggtacaggccagaggacagactcctggtagaatgtgggaatgaggaaggggaagaaggtcagccagggctgggatcgctgtgagttgagcattctgcctggacctcacaatggggggcctacccccacccctcctctaatgcttcagactgtaatcctggctcagtcactctggccccagggaccagagcccccaagaaccagagttgaggtctcttcagtcacccctctaactttatagagtgtctctgttgggctttccttcaacatgtgaaaattagcttgtcatggtcttatttcactgttagcctcttgggttgatgcagtcagtgatggttacattttatgtgtcaattttgtgaggctatagtgtccaggtgtttggtcaaaatctagcctagatagtgctgtgaagctattatatacttgtagctattaatcacgtctattagacgtctaatagacgtgattaatagctacaagatgttgactttaaaggagattaccttcagttatttgggtgggcctcatccattcagttgaacaactttttaaaaatttatttttttaatttttaaatttgtttatttatttatttatttttttgaggcaaggtctcagtctgttgcccaggctgcaatgcagtgtcaccatcatagttcactgctgcctcgacctcccatgctcaagcgatcctgctgcctcagcctcccaagtagctgagactacaggtgtgtgccaccacactcggctaatttttattaaaaacatttttttttgtagacatggggtcttaccacattgcccaggcaggcctcaaactcttgggctcaagcaatccttctgcctcagcctcccaaagtgctgggattacaggtgtgagctactgtgcctggcagaagaacttaagagtgaaaaaaacctgaagttttctggaaaataaggaattctgcctgaagattgtagcatagaattcctacctgagttgccagcctgccttacagattttggacttgccagcctccacaattatgtgaccaagcccttaaaataaatctcctaatataaaagaactcc

SEQ ID NO: 587926 - DNA, 4001 bp, Homo sapiens
ctagccggcactacacatcaacactccaaccattaagtacttttgagactgaccgagggagacagaaacaaaaaataaattcctgggaaatactgtggaagccagcctccaaggtggcccctgtgatccccacctcctggggaccctctatagtctcctcatacattgtaccgggttggtccatgtaatgaatagacaggagatgggatgtcacttctgagtttaggctataaaagacacggggaccgatatcttgttgctctctctcttgctcttgggaaagccaggaccctgttgtgagctgccctatgcagctgtcaagaaacaaccacgtgagtgagcttggaactggattctccagctccaacgaccctttatttgactgcagccttgtgggagatcctgaactacaaccacttagttgagccgttctcagattcctgagtctcagaaactctatgatataataaacatttgttatgaactgcttcagttttcagcaacgtattacacaatagacaactgtacgactactaaaaaaaattgagtaaaaaaaaagagtcttgaaaaatgacaagatgaagagaccagaagtgaacgtcaattcaaaaatactaagatttctaagtcaagagaaactgttagggcctggaggactaagggtgagatgatgattatgtgatgcactaagtttgagctctagggaaagatctaatatagatctgaaagtcatctatatagttaacttcaatgtatgacattgtccaaagcaaatatggaacatgtgaaaaagcacaaggtcaaaaattagaacatggcacgaacacagtaaagagaagaaaatgagctgttgcaagacaggaaaacaatcatggatgttccaaaagaaataaaagcaggtggtgaatgtgtcaaacgctccaatgatcaagtaaacaacttacactggatttagcaaatttatatatttccttgatttttttcacacattaatgcttcagaaatcagactgtatcttataatcaagaggtgcctgaaatgaatttctttattccctaaagccagtcacaaaactgatagtgtgggctgataatcaatggtatttgagaagcgagaaagcatggtagtggtaaagaagttgaaccagtatatgtggtctattttttccaggaagttttcaagtaaaggcaagagtcaagaaaggaggtcctgtgtttgctttttaaaaaccgttttactatgagacaaacgtatttgaaagcaaggaagttagaagaaactttaaaacgataaaggacacatgccatgacaagcacaattagcagaacaaaaaaggatgcactcgcggatacaggtgcaatcaaacaccattcaagcaacgattcctaggcacccgctcccgttctggaacccgaggcagcgcggtgcccacggattgggcagtcagccgcacagtcccctccgagtgcggcaggaagagagacagagttgacagtggattatccgcggagacgggtaaaaccacgccaggattccctgcggtttggtacattacaccagaatcaaaaagagacaagagtaaggccaagtacccccgaggcggacatatgctcccgcccgctgcgtccctcggcggtcccacccctcgctttccgtaccgccgctgagggcccggcccgcacgcctggaccggagccggacctgggggcggtaccccactgcgcgggcttgctccacgcgcgcagacgggacccgccaccacctagcccttcacccccaacgcccaccctctctcaccccagcacaacggggccagccccgcgccggcccgccgcttccccgcaacgcgggaaacggcgcggcgcccactcccgccccagagcctaccttagagccccgagcgcggctgccgcggggcatctccgggagcgccgcctgagcgcaccgcctcctcagcgcgccgccgtcccacctcggcgcgccgcaccgcgccctgccattggcgggcgctcgggcgcagggcggggcttcggcggggggcagggcttctccggccccggcgctccagggcctcccggatggcctagtcgggcccggagcccggaaggagtgccccgcggagagtcgagcttccttccccggggctgggggttccgcggagctcgctctgggctgtggcgttgctcgcccgcgagctcctggggagttcgggggagctgctgggctggtgcctggagcgggggccgcctccaagtattgtctttcgaattaagttactgtcgtctgtgttgtcaggcaacaactgaccttaaataaaaatgaaaaccagaagtaggctacacatgcaataggctacacatgcaataatggatacttaaggaatgggagtggctgctggtgactggagcagagagggtgtggtttccccatgtttcggggccggggggaaggagtaaagtctgtgttcagagcccagacgccatgtcggtcatcacatcaccgggagaactcgtggagcctgaggaaaggctacggggtgccagagtctgaaggggcggaagattgcattcctatcacgttcgccgtggcgcacaggggctccgctggggccgccgctcccgcaggagaagtgggcctgagacggtgcggcgtcgaccatagccggcccagcagaagccggggaaggccacaagtgtaactgggtccgagtactgtgaagaaggcgcctcccatggagaaagctaccgggtagtttaacaaggtggaaaagcgttggcctggggaggaggaaaggatgctcagaaagttgcctcaaaaggacgcagaagtggaggtgaatcttctgtttcagaggcatttttttgtgcctctgtgagaatgcattgcttcctggttgatccatcttcaggttttctctccgtcctagtccctgttctgccaccattctgtgtttgaatctggtacctaaagccgcagatacttggttcatagtagatgtccactctgcagtggctgaaaacacggaagaaaaaccatctttgcctgggaaggacattattgctagtgccattactgtcaacagttggaacaagataaacggcatgcccaatctagttgaggattttggacaccgggcctcccactgggactccgccgagaaaccaggtctgccattgccacctccgccgggccttgctgtcttagcacagtaagtgcacccgaccgcgcccggagtccccctttcactcccacaaccaggcctgtggtgaggctcccgcttgtcatctccaccaggaggtgctgtcctgccgaaatgttggggtttttctccaaacttcctcctgttcagaattcgccatctcagtagtggcatggacatccacctggccacagctcacgcagaaacctaggaatttttgtgaacacgtttgtgtgtcttactaatgtgtccactctccactaccactgtttcccaggccactagtatcttttgcccagactgctagtagctcttaacccatgtcccctaatccactcttgcccctcacacagcacacacatacaatccattctcaacacagacaccacagtgaggtttatgctgtctatactggccttccctttcggtggtcaaacgtgcctagctcctgcagccttggggtctaataagcatttgctcttccttttgcctaaaaggctctggcctccctctgccatgccatttcctatgcgcctgtcaaacctgaacctggtggccagcttccctaaactagcaagcctgaacctccctgctcttccatgtccgcaggacctcatgctctgttgaagatgttataacaattagaatctaaataattacgaaagttatttgtttaccatgtggttccacctccatgctgtaaggtaataccatttctatcttctccgtttttgtatctctatcagttagcacagcgtcttccatatacaaagtactcagttatttactatggatgaactgc

SEQ ID NO: 587927 - DNA, 4001 bp, Homo sapiens
gagcgagactttgtctcaaaaaacaaaaattttttaaaaagtaaacaccgaataaagttactcccatacttaaaatcctccagtgttcttgggagaactcttgggaaaaagcccgaacactcattgccaacatgccctaaatgatctggcctaaactcttccccctcatcttctcccagtggccgcctctgctccctttgcaggaatcccaactacacccttatttgaagacctggcctttatgttaggacattactacaagcatttactcaatgctccaatattcgggggaggagaactttgagcccaatgcctcaaaatgttgagcattctccttctgcctgcttttcaaactgttctgtcactttccccagtcagctgtcacttcttacaagcagtggacttacccgcagcacgtttctttcttcctcaggcacaaatccaatccttacccaagaactttttaaaaactttttcatcatggaaagtggttgttcttctccttcaaaatgaaattctaacatttcgttccatctttcataatcaaatatccaacctccatctgaggctcaaccaatgctaaatgaaacaaatgtcttcactcattcttaagaaggtcaaagatgtaaccaaggcacagcagagtttaaaataaaaaatacatgagaatgtatacaagcatctaacctgccgccttttgcaattcaaataaaacttatatttgagtgaacccaatcctactcctaaataagacattcatctgcccgctttgaaatcaacctaccctcctggcctcgagctgctccttattttctgattcagggggggatttggcccagaagaagccaatgaaaggcaggcctgagagaatatccgagaagagggcgaactgggagccgctctgctggcgcccgaggagacccccgtttcggtggcgacagcggtaggagagcaccaggcccagcgagaggaacaccagcacgcacaacaggacctccctgttggccaaagtgatgaagtccccgaacttcttataaaaataggtgaaagtggcaatgcccagaaaagtccacatggttccaaggcttctttggtggcaccggtcaaggcggagattatctgctcgagtgggtttaaggttctccccaaaatgaggtaccaagaggagcacggagagccggccagactccagtaaacagtgtcccaggacgagaagtccgatcagaccagtttttaaaaatcatataaagttagtgtaaaagtatgtgaagccaagttgtatagggcgtagaaagcagtatttaaaaatcgcctgctggaacagctcccgagcagactcgctcctcctcgcccaggaaatccagatattccctttttttcttttttgatggtgttccctgagcggttgctgcgggtgatggatactcttctgatactggctcttcgtgctataatttcttttctcaccaagagcaggtgccctttcagaagggaatgggagtggagggagggtcacagaaacacctcggcactgggggaaacgtggcctagcctctggcgacggcgagcagcggccggaaggcacgggggctgcgggccggcgcgggttcagaggcttctttttccgcggacggagacactgtacagcccaacctcgggaaaacgccaacgccgacgccttctccaacaaaagatggcctcggactcaagagtgcggctccagggcaatgcagccccaacctaaagatttagaggcctcccgtttcgctggcccccagagccgcccaccgcgactgcacttccccaccgataaaaggtggtttccagggtacctccctcagatggcggcggcggctcccgacggcttcctcaccagcatccctcgcgggcggcggctctcgccagcgcggcgcggccccagtaaccagagtaaccgtcgcacgcccccactcgccgccaggctccacgcgtctcagccagctgggcgggctcggcccagacgagggaccgggggcggggctcaggcgcgagtccgcccataccgcgcgccccgcgtgctgccccgccccctacccctgctcctgccgccgccggccaatgagggcgcgcaccgcgcggtaggccgagatggcgctatgccgcgtttggccaatcggaggcggcgcaacctgcgcggcgacgccccgaaaggcgctagggcgatgttgcgtggtgcgggttggggcgtggggatgggcgcgggccggctccggcgtgggtggggccaggggtcgcctaggaggcgctctggggccgggatcggcgtcggggtcggggttggggttggttcaccgcagcagccccagctcctgcgccctccctggactgaggtgtgctcgctttgaggagaagcctggagtgatccgctgcctcgggtcggaacgtttccattcattccgctagcatttattgagcgcttatgatatgtcagtccccggagtccgaaagaggaatcagacacagcttccctgccctgtgtatgtggagagggcggaagggagggccatgagtgcgtggagagcctgacattccagctgaagctggaagaatgagtaggcttttgccttaagaagaaaaggagaggacgctccaggtgctcaggctagagatacacggatgcgcccagcccgttctctcaagaccagaaacgttgggggtgggggctcggaggcaaagaagtcaaatagtcgtgtcataggtgtcctgagaagggggtggttagagagggagccatggaaacccaagaggtggtccttcccttggcctggagaagtctggtgaggcgcccagggggaggttacacggtgtccaggacaagcagtccgagggagcaaaagtgtgcaaaagtctcggagtgagacagcccttattctactacgatgaaacttacctaaaatttattgaggcttaagacctcagtgtctttgctcatcctgtttcttaactctggacttccttctttaacccctatgataataggtgcaaatcccttctgccttttggagcgtggctgcattgtcacctcttccaccaaatcgccattgaccttcaccaagtcacataactttattcatactttttaatctctagattccctaaagatctgtgtctgataagatcacccacagcacctagcacaatgctctgcccttaatttatcctccataacatgtatttaatgaatgatgaacgacactggcgcataaaagcaagactaggcaactagagttaggagacccagattctggctaccgctaaccagactgtgaccttttacagatgttacaagtcactctgcctctgtggggagaaggcaacttcttcatgaactcgaacatcctttgcaattctgtatcagatacttggcagggtttaaaaaaacatggcacctcttataacttttcacccccaatattatgttttatctgctaataaaataattatttggtaaaacacccgcacaggcgttcacttgaccctcaaaacaactttgatttttaaaatgaggaaaatgaaaattaaagaggttaaatggcttgactaaatcacagctgtgattaaatcgtaatgatgaaaccaaaagtcaaagtcctggtctccaaatcttgtggttccccagtatgcataattatcaataactgccttgctttccaatacttttattctttcttctacaatattcctcactgttaccagtaagtttggctgtctgaactgacatcaaatttaaaaggactgcagaaaagagaatcagttcaatgtatgggaaatcatttcctgaagagaattcttcaataaactgcttattggtatctgtgagttctgttttgttaaaataatagaggagcagctgactcttttattatttttaaatttttgtgacagagtctcgctctgtggcccaggctggagtgcagtggcgcaatctcagctcactgcaacctctgcctcctagcttcaag

SEQ ID NO: 587928 - DNA, 4001 bp, Homo sapiens
ccaattcatcaatacattgctcaagggcctggatttcctatgtggtgatgtacaaagctgaattttaattcaaatagtttaaaggtataatcaaagcaaaggtttttttaatttggaattttttatttttacttttatttcgtgttggaaatacaggttttcccagataacttgcaaagccacaaactaaggacgctgtctcacctaaaaagtttggttacaaagtcagtaagaaaaatgatgttatttttgaataacatcaaactaatttaatgtaggactatgaataatttaatgtaggaccatgttgctaggaatgtcatttttatcttgaccacctgaacatagcttacaagagaatcactactttggcataaattatttaggtttatctgaagggaccattcctgctaatttgacagcaatttatctgaaatagttagaaagatcaaggctccaagttgtgtgcaataaatgtattcaccaactgccggaaaatcagaagctcttcctgactggaacaccactgtgagcctcgctgtctgctctcccccagttacaagtgctttccttaacccacagtcacgagacagaaaactgtacaaccctgagaatcaacagctaatttctatgtgaactggaagaacaatcttgtcatagtgctaacgttatgtgtatatattgtaccaacaaataaaagtggttattatgctttgctcaagaaactcatctacaatcccaagtactgcgtagtgaccaatgcagtatttgtccttctgagcctccttcaaaatacccattcaaaagtccaaaataatgttcattttcagtgacctaaattagctagagattttaaaaaatcttatggctcaaagaaagaaccatgaagtttgattcctcagtgcctgtattccagtaaacagacatatagcatgcatatgttgcaggtctcctatagcgacaaatggttcaagcattcaacgtgtcttcatatttgatgcttattatgtgaaagcaacagatgtacttctcatctgagcacagaaaaagtgatgtttttaaaaatcctaaatagaaagtgagtcagtccccgtgcaaatataaatctaaaagaaattccttactgtacaagtaacatttgcagtattaaatacattgactttttcgcagaactgtctgccgagtatcatactcagtcagatcccctcgacctggtgaacatgtcttcgactgctccacagccggcattagaaacaactcaggtggccgctgatggtcatggtggacacagggctgccatgcccatgcccacgagagggaggggcaaaaggtgagccctcctaactcctccttgcgcatcttgcgccagtggtatgttttctctcaaagttcaacccagtgcgatgtaataaaataacttaaatgcattttacaatattttttcttacctttacctggcgaacgtctacaggtgtgtcgaaagttatcttttcctggatgtgttccaaaatgctcttatgctatttctcttaggatttctccacgctgccccattcagaaattttattattttctaaagaagaaaaaaaatatgatgtgaaaattatcataagaaaaccattgattttcaatcaaagctacacaaatgccaagccaatgtgatagcaccttccacaactctgccaggcactggtttttgcgtgggatgatgccagcttctctcttcatgtggccttattaaaagccatggtttccgagatgtaaaacacccacagttacctcaattatttttctctccttacctctagtattcccctgaggtcacattcagttaaaaacatcctgcccttctccctacaaaaaggttccatagaatcagaacgcagaggcgctgcaacttgctaactttgctctgtgttatttaccaaccgcacaaagaaaatgctgtctattcagaactcatttcaaaactcttttcactgagagtgagcgaacaagcgggctcatgtcccgagcccagtcacatctccagcggtccggtgatggccgtggggctggcgccgagtggcacggcctccacagtggcccacaagggtctgttgtccacgccgcgtggaccgcgcaggccggtgggagtcaagaaagggggaggggcgggggatcttccactttctcaccccgagtttctttgcttgcttgccccgagtatctgtcaagaggcagccctctcccctcaaggccccttcatcctgaacgtgcatgatgcccctgcagtgacaaatacagaatcttctcagtgggcctggatttgaggccgagctaatcactgggttgctgcgggtgggtaggttatttaaaccacctggaaatcagtttctctgtgttatggtgattgtacctggctcactggatttgaggagtaaccagattttaggacagactctttctctgtccgtcctactcagatcccagtaggaaacttacccttcccctgcgccacggagtgcagagaaaacagcccaaagacttctttaacgactctggatccctcagccagatcacggatatggaaaaagcttaaattagaaagaggaggtcgtgaagggacctccttggcctcctgtcccacgtcctcaaggcctgtggaatgagagcttcaaggcttgttcccgcagttgggagatgggagccagccacacagacacaagcagaccatgcagcagagtctgtcccagaatctgcctaagatggcagaggagttggcaaacagctctgggggcagagccagagagtatggacggatacatgcagcacagactgcacctgctgagcgcaggtggggttggaggacggaggggaacaagagttcccaggaccagttgtatgtcctgggtcagcaggagaaatcctgtccaacatgtgcaaagggatccttagaggtgggaggagaccagggcaagaaggggatggaggttatccactggacagccagggctgaggaaggtagggtccactgacgacctgaaggaagggagatgcacccaccaggaatgagggagctgcaagaataagggagctaccgggggcttccaaagcctcactgcgccagcgagtccatcatagagagttgacccaaaccatctgccagaccggaaaacaggacaccagccagccaggttagaaggggcggaagtttctacctcttcttcctgcatgcacccaacacatgccctgctacaaccatagcagttgcggtgagctggcctgggagcaggagccgggagacagcaagcctcctcagcctcccctccccactgcaggcatgcaggcaggccatgtggagggggtgtagctaggctaaggtcagtttttgattattgcatggaaccagacactgtaagtgctgaaatgaaactgtgtatgtgattccagttgaccagaagactttttgaattatctgagaacgagcagaagagccatggggcctgccagagttttcatccaggggtcatggacattggtcccactgaataaagtttacaagaacaacaggaacaaaattatgttgtattttggctctgttgtgttgtgtttttttaacgtatcaattacttgagctatacatgataaactcttctgctagactagaagctgcaagaaaacagagaccctacaatttatgttccttgaggtttccctagagtcaagtacctggcccatggtagccagctagctgtcctgcctgttcttatttgattgttttattttaagccatgcctgtctttctagagaaatctagatcaatatattttctctctaacttcttgattgcctcctaaaacatgctgaatactacattagtttttctttatgtacttctccaaaggcaatctctctctgcccttatgtctttcagagaaccttatatatctataacattatacctcatatagaaggcacaagctgagtcttatgcaacctttaatgattggtcatcaaaa

SEQ ID NO: 587929 - DNA, 4001 bp, Homo sapiens
gcttggtcgatacatttgaactccattttagagactggaagggaagaagggggcgtccgggcccctgccagcaccttccaccttggggccttgtcaatgaacactgcgttagcacctacgacgtgccaggcgccctggcgactattggaaaacccggctcccctctcaccccgttttcctcgttggcgagtcggcctcgcctcctcctcccgtctcttcctctcaccacacacacccagccgcagagcgggggtgggcgctcgctgtctccctggagaaccagctcgtcgcaaacttgcggggcttggggacccgcgagggggagaagtcgggagaggccaggggtgcccggaaacaatcacgagaaagccgggcgaatgcctgatgcagggacgcggcgagccagtcactgccctcagggtcacggctgactccctctgcgggactcgcccagcccgcgagacgcagtgacctgcccaacccccacccccttgcgcgcttctgggtgcgcacgtgtcccctcgcccaacacaccaccgagccccgcgcatggtacggccgccgaggaccctagcgtaggagggaggagcgagtcagggctccagctgacgagcagagccagacgatccccacacgcttcctgggagacccggctgcaaggccaggctaatgcgcgctccgacgtctctgtgccaagccggggcgcaagctcaacccccatctcaagttcagccgcgcttcctcccgcaaggtcacgcttaaacactcgcgcagagaaaggaggagcggaaagttgcgccaccgtcccgattccaaactaactgtaccctcaccagagcgcctcgccccagggtcaccgctgtccgtccccgtgcgctcccagaaggggtggccctgcccccacgcaggtcacacacacgagagacacaggcaagttgctaacttttgtcagattatttcttgggagctgcgacgcctcacggggttggggcggattcagagtttcgagttgccactaacacgactccggccgtgctctccttggcccacccgcgtcccccactgtccgccacgccgcgttcagctctcttgtcccgggtgtcaacttcacccccagatccggagcagcgcgctctgacggcgtccccggggccgatagccacctcccggatctgcgcctgcttgcagcggattgggggactcgatccggatactgtcccacggccgctcgtccagaacactggcggcctccgcggtgtcccagcctgtgaccccaaatccgctcgagagcgcctgagcccggccacccagcgaggtctcctcccacgggcggccccagcggaggagatcccagcccggcgccgggtgcaatgtcactggggctgctttcgggaaccgctgcccgggacttggcgtaggttccccacagagctccaggcagctcctccagtgtcggccgaagacccctaagcccgaacctccaccccgaccttcttcctctcccaaagccctgggtggtcgccgctgccaaggaaggggtctcccttcgaatgtcttccactagaatcccggggtcttcagtcccagctccactgtcacaccctcctagtcccctccccaccccttcagttcccgggtccagacaatcaaccttccactccgagaatccacaggaaactgcccgagccccaactcaggcggacgcagcccccgcgcaccccgagcagggttcgcctccgcgcgcgcactcaccacggctggagacacgctggagtttccgggatttgggcatgaaggggttcggaggagaatacaggggtgtgggtgtcccggacacttgcccccttcccagctcacatcgcctcttccttctctctccgctcttcttcctcctcctcctccctccggtctagggctctttgtctttgcaaagtgtcgaaactgtctggcatagtgggctccgccggcggaggctggagccgaggaagcgaggaggcgggatgagggtgggagagggctcgggaacaccttcccccgggtgtaacgggagtgaaaggcggggcgaccgaggaggggccgccttccctggccggccggggccgggtgccagggcgcgccagagcccagccaccgcctcccctgcgcgcggccctccccttcctccgcccagtgcccgcccctcccgactctgcgcctccgttcggccccgcccaccccaacttggctcggctttcccttggctccgggcttcctgcaagccgaatttagctctgccaagccacgtggaccgcagcgggctcggcagaggccgagcctgggagacgccggaggcggcggctgcggcgcggggacctgatcggcgccccgagaggagctccccgctctctggacgcggccctcaagctggcggggctaaggaagagcgcccgggaggcccgggagccactggggtccgtttcagcaggaagacgggcacgcaccgagaggatggcagtgcccagaagaactcgagtcgggggcacggtggggagaaggggccgatcccctgctggcgaccgggcagagccacccacttcctctaagggcgcgggactcgaggtgggatttagggagggggaagggaggagcgtgggctggacgactcttgcggccagaaccgcgttcagagccacagagccgggcactgcggccggccctggtcccggccccggccctggcccagcccttgccctggctcgcctgccgccgctttttccttccagatgcggaggctgcggctggagcttggggtttgcggattaggcttgcagttattcagccctccctcttttacagggaagcgggggcggtggagacttcttttgctgaaaggcagagtgcagcgctttgatgctaaatgcagtacacaagtcatgtaaatctggttttacggttcttaaccccttactgagactacctctttcgcaacttttcggaggaatgttagaggaaagaggcacagtttgcctttggggtcattgcatccttccagcgccccttgctccagctggagagagatcaaccttttgcagtggaaggggagagtcccccagcctttgtttcatcagacggctgctgtagtacagggattcaggccagggcccgcatggccggacttcttggttcaaatcctgcactgccactcaacggatgtgtgagcttgggctagtgactgaacctcccagcctaggtgactctgtgcctcggtgtcctcatctgtgagaaccgacctaagaagtgtctgtctgataaagctgttgtgatgagttagtgaattcgtacacatagaacctttagaactgtctttgacatgtagtaagtcagctgtgtagatggtgggtttctccagtgtcaggtccctgcccacagcaggaagatgacctgtgctagaagatgggggctagggtgttggggaagacttcagggacttgggagagaaaaggagaaatattcagagatgagaaaagtagaagaaaaaccagcttttaaaagggggaggagagagaatgagaaaaataactactagaaagggaaggaaaagatgaatagccttttaggtacttcgggacctgctctgagacctcttgcctgacgcccttggtttttgatagaattctagagaaggggtgagcccttttgtctgcctggacacatcctgtgggctttcctctttctgaaactcaggtcaaggtgttcactgcatctccagattgcttgtgtgcatgggaggaggggggcagagagttctgcttacatcggctactgtcccctccaccagcagcgtcttccagcaaagaagagcttctaacatgcaccagacttttagctttggctgggaatatcgtctgggccaataaagagtttttggatgaaataacaaaagtgttgtttattgtatggatcaaataatgtatgggaacatattcgaaaaatagaaaatgctatactcatataagactatg

SEQ ID NO: 587930 - DNA, 4001 bp, Homo sapiens
ggagaatacaactcctgaggcctgtgtgcttgcatgagtctgtgtgtctgcacgagtctgtgcttgcatgaggtctgtgtgcttgccagaatctgattgcatgaatctgtgcttctgtgagtctgtgtgcttgcatgcataagctactctgtgtgcccctggattctgggccagggaagccctgtccatctagtgaggacgacaacaccactgccagctgcagatctaagcatggcttctcgctctaaaggtagctaattcaatccagtgtaattggaaagatcgtgcctagattgacttgtgtacccttcagtggcagcaggggattgattcaaatgaccttggatgcgaatcagctctacaaaagtggcctcttgtagctggtttctgccccttcctggctattcaatgataatcagtcttccgtcttatctctttaccttgccctcctgtcttactcccctatgtctcttctccgtctttttttgcctgtgggagtcaagtctaatatttactctgccactgtgggcaagactttcctgtgtacccctgctacaagacttgtccagctctgaaggaaggcaaagtcaggaatagttcaagaaagatggccaggcatggtggtgcacgcctgtggtcccagccactcaggaggctgaggcaggagaattgcttgaacccaggacgcagaggctgcagtgagccaagatagcgccagtgcactccagcctaggcaacagagcgagactgcctcaaaaataaaataggctgagcgccatggctcatgcctataatcccagcagtttgggaggcagatcacctgaggtcaggagttcaagaccagtctggtcgacgtggcgaaaccctgtctctactaaaaatacaaaaactagccaggcgtggtggcatgcacctgtaatcccagctacccaggaggcggaggttgcagtgagccgagatcgtgccactgcgctccaggctgggcaacagagtgagactccatctcaaaataaagtaagccaggtgtggcggctcacacctgtaatcccagcactttgggaggccaaggtgggagaatcccttgagcccagggggtcaagaccagcgtgaccaatatagcaagacattgtctctaaaaaaaataaaaataaaaataaataaataaaactagctggttgtggtggtgcacgcctgtagtcccaggtactcaagaggctgaggtgggaggatggcttgagcccatgagtttgaggctgcagtgagctatgattgttctactgtactccagcctctgtgacagagacctttattcaaacaaaaaaaaaagaaaaggcggaagaaaaaaagaacgaatgaaggaaaaggggaaggaagaaaggaagaaagaaaggaaaggaaggagggaaggaagaaagaaaaagaataaaaatgaaagaaaaggagaaaaaaagattggagtcctggaggggagaccagaaattatagaatctggaagggatatatcttagtaaccagcccacttcttccgaggggaaaactgagattcaagaagggaagaaacttgcccaggttcacccagtaagaggcacaactaggatcagaattgggtggcctgagcctcatccgctgagagctggccaacccctcatcgcctccttcccgcagcgctcacccttcatgttgcgcatgtgtctgtaggagctcccagcgcacagcttgaatgtcgctagcagcattgtttcctggcaaatgtggcagtggtggggtcgctgccgctgctgctgccgccgctgctgctgcctcttctctcaagggtggttcttcgtccttcctgagcccctcaagcttcgcctctgagtcccgcagctgcagcctggacctggtgttctgcgtcttaaatgtcccccgctgaaggctgtgcatcatcatcaggagataaaaacgccatcactcactgtgcaaaggaaggggtcaaggatagagcgattgcctcacactgctgctttggccgtttgtggggagcttggggcgggggagggtgcaggggagagtagggaggacagggccaggcgagggatggaggggagagaagcaggggcagcttagatgaaggcacacagtggttttcaagactttaaagtgcagatttctagcccttgtcttcagaaactccaggctcagctgatctggaattgaggctcagaaacctgtgttaaaaaaaaaaaaaaaaaaaaaaaaaaaaaaaaaaaagaaggaaaagaaaagaaaaaagaaaaaaagaaaagaaaaaaacttcccttggccaggcgcggtggcttacgcctgtaaccccagcactttgggaggccgaggtgggcagatcacttgaggtcaggcgttcgagaccagcatggccaacatggtgaaacctcatctctactaaaaatacaaaaaattagccgggtgatgtggcaggcacctgtagtcccagctactcgggaggctgaggcatgagaatcacttgaacccaggaggcagaggttgcagtaagccaagatcgtgccactgcactccatcctgggcgacagagtgagactccgtcataaataaataaattaaataaataaataaataaatacccagtggttgcaatgcaggtgttgtgtggactacacactacactttgagaaccaccgtctcgcgagagtgagccagggtgtttaccaggcagtagagaccatatggctgctcttcttctgggtgaggaccctgaagtccacagagtggaactgacttgttcaaggtcaaacagctggccagtggcagggccaggacaacaacccaagcctctggccttcaagccatctgtacacagttcctcctgcggtccccaggacgcttggtatattcaactgtcaatttatttactcatctatttatagaaaccacctttcccaaagtcctgttccgagtgagggttcttaggggtctgtgctggagcaaggatgacctctcgtggctgagtcgcgggggggcgggggggggcggggcagccctatcagtatacggcagagagaagaggagggcctgggccacgcccacacccttcctcacactttcccgccagtagctttgtctgagtgagctgggctgggggtcttggtatgtgcagaaagcttgaaaagacagggcatgggctgggcacagtggctcatgcctgtaatcccagcactttgggaggctgaggcgggcaaatcacaaggtcaggagtttgagaccagcctgaccaacatggtgaaacctcgtctctactgacaatacaaaaattagccgggagtggtagcgtatgcctataatcccagctactcaggagactgaggcaggataatcacttgaacccgggaggcagaggttgcagtgagccaagataaagccactgtactccagcctgggtgacagagcaagactccgtctcaaaacaaaaacaaaaacaaaaaaacaaaaattagccaggcatagtggcaggcacctgtaatcccagctactcaggaggctgaggcagaattgcttgaacttgggaggtagaggttgcagtgatctgagatcacaccattgcattccagcctggatgacagagcgcgagactctgttgcaaaaaaaaaaaaaggaaaaaaagaaaagacagggcgttggggtgttcaccctagtctttgcactttaggggccctgtcaggctgagcaaggccccacgaggcctctgcatttcccactcacccttacccaggcgcagcacgtgctgggctctgactctgacggaatctcttccctttacagtgaccttgaggctgcttttaagccagattcactgggcaagaatattgggagtggaaaaactcacactggaactgcccctggcccaggccctgctccctgtgggagggagttctgtgtcctgccaccacctcacagaggcagaggggagccctaaaaatggggagcagtgccggggccccatgcactct

SEQ ID NO: 587931 - DNA, 4001 bp, Homo sapiens
tacacagcattttatttgaaattaacaatacatacttggattacacagcaacattcttacaaatacaaaacactggtttttatggggaaaaatgcagtaatttgtgagcaagtatgtaccatatcctaccaacttatcatcacttaggaataaatttcagactagcctaccatataataaaatatggcaatagtgacttgacttgaaaccatagcaggaaaacacaaacacaccagatagtttggcataactgcttcgcaaatttaatacaggcctgctgcaaaatgcagcaatctacaattaaagtgttatgtgatatctcttgtttgcagtaagatacaaactgaacaatgaaaatctggccatactacaaaacagagatggagagtaagtcttggttttggtagttttattaaataagatttttccaccgcagctgagttcacaacagtgtacttgaatcatctaaagaaagcaaggacggggaagaaatatcctggagaaatgttgaaatcttttctcctccaaggttactatcaccctgcctgtccatcacaattttgatttcaagtattcacgatgctggtctgaaacacaggatgcatcagaagccaagtaatgctcagcaaaagttcaccaaaattgtgaaagcaaacattaaataaaaaacgttttcaattaacagtaaaatatctttaaaggatcatctctagcctttctttctgcaggatccacccactttaaaatcctttggtaaattcccaggtctaccctaattgaatggtccctctctatctgctcaagcagttcttaaccctttggagtggggatgggggtaaggggacatcacagcaaatatggacccttaccaaagaaaattattcacaaatgcaaaattctacacacatttccaaagacttccagaatcccacggccattacccccaccgcctccctaagaatcccagagtggcgtgcttctcaatggcctctgcggagcacccccagcccccaagccacagcccccggctcgaccccgaagagactagagttcctgctctcacacagcggattccgtaactgagctttgtctcctcgcccaactcccttcaccccggcaaggtcactaccgccaactacccctttaagccgagccatcacggtaggagttcgtaacagccacagcagaacttgcctgtcataggatatattttgtcccctcggccccacctaccctccccatttcggcaagttacgtctttaccactagcccattctacagaaatagctgccgccgccaccctccggcgcgccccggccccgccgctccgcctccagcgcccccaggcccatttcccgcagaccctccccgggccgccctcccctgccctactctaggcgctccctctccctcgcagccacaccgtggctgcactcgccgtcctctcttccggccgctaccaccccggccccctagaaccccagcctcccgcgcccgcagccgcgttcctgtctccccgacctccgcacccccacttggcccggcctcctcgccttcctcccggctcctcccctcaggacacctgtgtcgtcccaccccctccaccacacacgcaccccccaccccaattccttcgcctccctgtcctccctcccccgccggtctcccctccccgctgctgccccgagagcccgatgtgggagggaaggcgcgggggaggggaggccgcgaagggggctgcttttctccgggttccccgtgctgcggaactgcagggctccccagcgccctctgccttcttcgccggcggcgcggaagtcggggtctcccggacgcccccgatgagggtatttaccttcttgccggggacactttgcagacggctccaacattggcaaacactacagagaactgaccccgctcggccgccgccggcttccacccctcgggctccccgccccccgcctccgcccgcctccgcccgcctccccggcgctcccgccgcgccctcccgcgctcgcgccgcgcgcccccgcctgcgcagccgctcccgcgccccagcacgcccggccggcgcgcgcgcccggcaccggctctacctccactccgcctcccgccggcccgcgaccaagcgcggccattgttcgcgacgcagctcccgccccctggcggctgccgggccccagcagctgcaggctctgcggggctagcggcggcgagctgggcccctgggcgagggccattcccggggggcttgggcacgcgggcgagcgactgcgcaaggagcgcgcccggtccgcagtctcctcgtccccggcgcgactccccgccccctcgtctgccaagggtgggcctggggcagccccttccacacctgcaactcggcaacttccttccccgcccgactgaccgtctgctctttctggtccgcaccctgtgctctgattccccgctcgtacctttcccaggctctccggctgcccctctgtgctgtgcaggggacgcgcgaccatcccgcgtctgctccggccgccgctgtgcaacgcacggtttagcggatcttgcacctttctagacgggggagggggcggggaggaggttgcttcaccgtctcgcccagcaaacaccagggatccgtgatcacctgctcgccaagacccgcggcgtggccagacctcctcttctaccgaaaatattagtcacatgaaaaagaatccttggagccaaaaatgagaaccattgaaaacaatgccctgaatcctagatttatgaggcaagagtgccagaaaacagaaattacgtcttaattcgtcctggttttgatgtggattacttttgtctagataacttcaacccagttaagctcaatgaaactgaacacttcgtttagtaaccggcaccaaaaataatctgacaaagaaatttcgaaatagaactattagtgtgttttcacaaacttactcgtttgcaacgttatttctagggtttcttcccagtgtcacttctctgactgagaaatgtctcccaggccggtgatttcagtcatcatctaaaaccaatctcatgtctgcacctgggaaggtagtgtgtgtcctggttaaccgcaagggcgccagagtcagataaccaaggctggatatccgcttgctaactggtgaggagaccacgggcatgttacttatcctgtgcatcaagaggagactacatgtgatagatagttcgtatttaaatgtgacaatacatatgaagccctttaaataggaccgggtatgtagtacctctcctggtacaatgttagctacagctatatttttcctcccagaactctttcctatgctcctttccccccttttcacctctgccagttccctcggatttaacatgttgcatcctccctaaatttgctgtgctccttctagcggcttacgcacccagtcagcattctaatacagtcatgccttacctagccacaaggatatgttctgaggaacgtgtcattaagcgatttttgttgttttgcgcacatcatagcgtgttcttacgcaaacctaggtagtctagccaactacttgctttggctatatggtatatagctattgcgcctaggctgcaaacctgtacagtgtgttactgtactaatactgtaggcaattttgcaacacaagggtatttgtacctaaacagaaaacctacagtaaaagaactatataatcttttttttttttgagacgaagtctcgctctgtcacccaggctgaaatgcagtagcacaatctcagctcactgcaacctccacctcccgagttcaagcaattttcctgcctcagcctccctggtagctgggattacaggcacatgccaccacgtccagctaatttttgtatttttagtagagacggggtttgaccatgttggccacgctggtctcgaactcttgacctcaagtgattccccgccggccccccccccccccgcccctccccaccacctcggcctcccaaa

SEQ ID NO: 587932 - DNA, 4001 bp, Homo sapiens
tggtccctctctatctgctcaagcagttcttaaccctttggagtggggatgggggtaaggggacatcacagcaaatatggacccttaccaaagaaaattattcacaaatgcaaaattctacacacatttccaaagacttccagaatcccacggccattacccccaccgcctccctaagaatcccagagtggcgtgcttctcaatggcctctgcggagcacccccagcccccaagccacagcccccggctcgaccccgaagagactagagttcctgctctcacacagcggattccgtaactgagctttgtctcctcgcccaactcccttcaccccggcaaggtcactaccgccaactacccctttaagccgagccatcacggtaggagttcgtaacagccacagcagaacttgcctgtcataggatatattttgtcccctcggccccacctaccctccccatttcggcaagttacgtctttaccactagcccattctacagaaatagctgccgccgccaccctccggcgcgccccggccccgccgctccgcctccagcgcccccaggcccatttcccgcagaccctccccgggccgccctcccctgccctactctaggcgctccctctccctcgcagccacaccgtggctgcactcgccgtcctctcttccggccgctaccaccccggccccctagaaccccagcctcccgcgcccgcagccgcgttcctgtctccccgacctccgcacccccacttggcccggcctcctcgccttcctcccggctcctcccctcaggacacctgtgtcgtcccaccccctccaccacacacgcaccccccaccccaattccttcgcctccctgtcctccctcccccgccggtctcccctccccgctgctgccccgagagcccgatgtgggagggaaggcgcgggggaggggaggccgcgaagggggctgcttttctccgggttccccgtgctgcggaactgcagggctccccagcgccctctgccttcttcgccggcggcgcggaagtcggggtctcccggacgcccccgatgagggtatttaccttcttgccggggacactttgcagacggctccaacattggcaaacactacagagaactgaccccgctcggccgccgccggcttccacccctcgggctccccgccccccgcctccgcccgcctccgcccgcctccccggcgctcccgccgcgccctcccgcgctcgcgccgcgcgcccccgcctgcgcagccgctcccgcgccccagcacgcccggccggcgcgcgcgcccggcaccggctctacctccactccgcctcccgccggcccgcgaccaagcgcggccattgttcgcgacgcagctcccgccccctggcggctgccgggccccagcagctgcaggctctgcggggctagcggcggcgagctgggcccctgggcgagggccattcccggggggcttgggcacgcgggcgagcgactgcgcaaggagcgcgcccggtccgcagtctcctcgtccccggcgcgactccccgccccctcgtctgccaagggtgggcctggggcagccccttccacacctgcaactcggcaacttccttccccgcccgactgaccgtctgctctttctggtccgcaccctgtgctctgattccccgctcgtacctttcccaggctctccggctgcccctctgtgctgtgcaggggacgcgcgaccatcccgcgtctgctccggccgccgctgtgcaacgcacggtttagcggatcttgcacctttctagacgggggagggggcggggaggaggttgcttcaccgtctcgcccagcaaacaccagggatccgtgatcacctgctcgccaagacccgcggcgtggccagacctcctcttctaccgaaaatattagtcacatgaaaaagaatccttggagccaaaaatgagaaccattgaaaacaatgccctgaatcctagatttatgaggcaagagtgccagaaaacagaaattacgtcttaattcgtcctggttttgatgtggattacttttgtctagataacttcaacccagttaagctcaatgaaactgaacacttcgtttagtaaccggcaccaaaaataatctgacaaagaaatttcgaaatagaactattagtgtgttttcacaaacttactcgtttgcaacgttatttctagggtttcttcccagtgtcacttctctgactgagaaatgtctcccaggccggtgatttcagtcatcatctaaaaccaatctcatgtctgcacctgggaaggtagtgtgtgtcctggttaaccgcaagggcgccagagtcagataaccaaggctggatatccgcttgctaactggtgaggagaccacgggcatgttacttatcctgtgcatcaagaggagactacatgtgatagatagttcgtatttaaatgtgacaatacatatgaagccctttaaataggaccgggtatgtagtacctctcctggtacaatgttagctacagctatatttttcctcccagaactctttcctatgctcctttccccccttttcacctctgccagttccctcggatttaacatgttgcatcctccctaaatttgctgtgctccttctagcggcttacgcacccagtcagcattctaatacagtcatgccttacctagccacaaggatatgttctgaggaacgtgtcattaagcgatttttgttgttttgcgcacatcatagcgtgttcttacgcaaacctaggtagtctagccaactacttgctttggctatatggtatatagctattgcgcctaggctgcaaacctgtacagtgtgttactgtactaatactgtaggcaattttgcaacacaagggtatttgtacctaaacagaaaacctacagtaaaagaactatataatcttttttttttttgagacgaagtctcgctctgtcacccaggctgaaatgcagtagcacaatctcagctcactgcaacctccacctcccgagttcaagcaattttcctgcctcagcctccctggtagctgggattacaggcacatgccaccacgtccagctaatttttgtatttttagtagagacggggtttgaccatgttggccacgctggtctcgaactcttgacctcaagtgattccccgccggccccccccccccccgcccctccccaccacctcggcctcccaaagtgctgggattgcaggcgcccggcttaaagaactgtataatcttatgggaccaccgttgtatatgcagtccacctgtccatcattgactgaaagaagttgaccagaaattgttgaatattttgaatgaataccttactttcccaccagccataccaagggtcaagctgcctacctctgtgtctttccataggctattctctctcccttcaggctacccttctctcgcctggtgaacaaataatctttcacggcattcaaaaatcaccttcttggccgggtgtggtggctcacacctgtaacctcagcacttcgggaggccgaagcgggcagaccacgaggtcacgagtttgagaccagcctggccaacatggtgaaactccatctctactaaaaatacaaaaattagctgggcgtggtggcacacacctgtaatcccagctacttgggaggctgaggcaggagaattgcttgaactcgggaggcagaggttgcagtgagctgagttcgagccactgcactctagcctgggcagcagagcaagactccatctcaagaaaaaaaagaaaaaaaatcacctccttgagaggcattctctaacactcctctgagcaggcgagtgctcttctcttgtacctctcttctctgatattgtaggtatgttagaatttttttttttagcctgtctgtatctaccaaacattgcattgttgaagggcaggctctgtgtctcatgcatatctgtagtcccagcatccaacagcaagtaggtggacggtaaat

SEQ ID NO: 587933 - DNA, 4001 bp, Homo sapiens
atctagctttggaaaaatgcactcccgagtaaaaagcatgggattttagtctaaatggcagagaagactgtgccaggagtccacttggagacccttctgatttcaggcttttaacttaccgtcatattggcaaaaagaaatctgatccgttcatgtttcaccccaaccctccactaggacagtgcttagaggtatgcataatctctttcatattaaaagccttttaaaaaagaaagaaagaaagaaagaaagaaagaagaaacacaggtgtggaataaccaggccaaggcctccctatgcaagactggaagaaaaccgcaaaaaacttgcatgaggctttctacattctggataagatctcccataaaagtaatttttctcccacagaaggggggtgttctggcaggcagctaggcaaggaatgatctgcagccttcatgccataggattctcctctgagatcaaaagcatggttcagttagtcttccccaccccctcccaccacccgcagcctctaggatgttacaagtcatttccctaattatatatttccacgggtttaaattataactttgctttaagcagttttaatatgcattagggctgctattgttttaggcaagctcgaattgtgaatcactgcatctctatagcaactaagtacaaaaggaagtgaagcaaaagccctcctctcggcagggacctgtgctcttccaaggggatcatcatctgcagcattttgacacctgtgatccggtctttgctgacagttggaggacagagggcagtattggaaggggaacaagtggagccagagaagtcaagaggcagaggtgtcaatgcaggcttcctaatgattcttttccttcagaagccaagataatgcacaattaactgctccaagagtcaagacgaaagtgagaccttacccttggagaaacagctgctacgtttcacaattttttttttctaggggctctctggctacgggctgcagggacgactgaatggagccctacagagccaggagggagacaggcagcagggttgggggtgggatgtatagggttttctctgaatccgccctggatttgtcagacttgagggctatggttctgaaaatcagtctgaagagggagcttttctgtgtattctcttaggtagagaagtcaagaagtgaagaggtagagtcttaagaggaaaggaagagggacagcatcaaacaagccaggtcttaccttagatcagcttctggaaagtatagagagcgctttgaagcatgccaacattcaagcctttcctcccctctcacccctccccctccaagagggtacgtgccagatttcaggcaatcaggctaggcttatgcaatgaaataccctcagcagagcgtccagcttcttcgtttagttgcatgcaatttattaaacaaaggagctccactgcctaaggctattggattacactggcagtttattgccatcaggcatgaagcacatttattatcaagatcagccgtcacagacacagttgcaaaagggagaggcaaatgaggacagctctttgggggagaaaccgctcttgggtttgctgcttacctgagttttgagccgccactcgggatttcctggggctcacagagtcattctgctccgcctcatgggttgcagaagcactgatcaccagcaccagaagcactgctgagttttggagcattctctgagaagtttccgctaagttgttgggttttttttttttcctgcccccctttcctctttccctctcctggcttgagtgaagatgtggatctggatacactgaaagcttaggtgaggatttgatgaggatttttttttgttgttgttgctggtgatgctgctgctgccaccggtgcctccgctgctgctgctgctgccgccgctgctgctgctgctgccaccgccgctgctgctgctgctgctgcagtcgctgcttcttgcacctctggcttttgcaaactgggggcccaagagctgcacccagggattttatagccgttcttatcggtcctcaggatcaaggaccaatcaggtccctcaactggtctggtgagccaataagagggcatgcaattcagctggagctttttgacttcttagaaatattttccagcaaattaaaagtacctgctgccaatgttttatatgtgtgtgtgactgtgtgtgcagagatgtgtgaaaaagctattttcgtggaagtaagagataactctgtattgattgaactaaagaaaaatcctatagaaatctctccaagttgctttttgaaatctagccatctttttttctaatgagccacttgggggaaatggatagcaggggtatggtggggaaatgtgatctctttagatgagaacttaacctgcttacagcagttttactctaattttaacagcacattctcggttctgttttgtaggctacaaatgcaataactccctatcttctctgtgtgtacatgttcacatgtctatgatgcatttttgtttgtatgtggacatcctgggttctcactcacacatttgagcccttgagggggaatttatgtgagtggaaaagccttgggggactgagatatgacagctcagagctgaagccttagtccccctactgatcaacctatgactctggctaagtctttttaccttgccccacctcgttttcccatctgtaaaacgccaaagttggactctgacattctgtatacctctaaaataatgtgattcttcaataatcaaatcaactttgacttcatcttttcagtcaccagcaaaattgcatagtccaggagtgttagttaccccaggtacacatgtgcacacctgcacataccacactcaacagggagacatcatgaatgcctgaaaattaataatctgtgttcaagcccagcaactttataaccactttgaaacaataagctggccaaagcaagactaaacctgctgaatggaaaccagttcatttcttggggagaggggtaggaaaaaagggggcagaatggaaagaaggggtagagaaagaccagaatgtgtaggagagaagaatgataagctctagacttaataggaaaattgcactgcaatcacaaatcatgcctggtatagaaacttatattttcttataagtgagttgtaggcaatgctgaggtttgtccccaacatgtgaaggaggttaatgagccagaagaggacttcttagggtaggaaggtggtgaaggtattatacaataaaacctttaataattttggggaagtagatgagaaatggccactggtgattcatacagatttgggcaggataatcttgcagagaaatggggccagtggctttactttgcatcctaaaaccttcaaacaaaagttgaagaaagagtgccacccctgttaaccacaaactaaaccaagtgtcagctctgtgtatgttgtggggtgatagggtggtggggggcgggggggggggggcggcggacggttctgggtgatgatagcctatccctcacaaaatagggttgtttggtaagtatgaaagtttgctagaaaaaggaatagaaggaataaaggatacaggaaatatctaaaagaaaggaagggaattttcagatttacattatataacaagaatacattttaatttatattaacaggcagtattggtatttctttagaaccttctgggctgagtgctaggggacaatgtgggaggataaatgagaagacatagagaagaaggtaagttcattattcttgtcctgaaggtacttacaggtgagttgggaagatgaccagccacagtcatacttcctaaaggttcgggatgtcaggacctcatatagtaagacacaggctcaggcagcactggctggagatggggggaaagctcttgagggaaagatcagtggggaaagatgtaaactgctgttgttgctttttaagaatttaggaaaagctatgctatttcatt

SEQ ID NO: 587934 - DNA, 4001 bp, Homo sapiens
acgaccctcagctcccgcagacgcgggaaggcccccgcgccatccgtgggagtggggcagcctgtctgcacgcggtcccctgggaaacccctctgcatctcccgcccggacaaggtccccggccttggaatctgcgccgccccgcacgcgaccgcctgcgaactccctgcgctggggtcagaactggtatctttctcctcctctggggaagtcagggcagcccggagtggcgtcgtgggtccgaaaaatccgtctcagaaacccaccaggagaaaaggctctggggtgggggacaccatgtggggctcccacaaaggacccgacggtgggtgtggagaagcttattggccctgagaataggcccaggccctctccacaggacccctaccgcacacgcgactctttctctgcagcaaaggggctcgggcccaggtacagggagccgctgggccggcggggcagctgttggccaagccctcacgcagcggagcccaccaccggtgtggccgccccctcagcccgcgccacgcagagctcggccggtgcctccagggggcgctgcggcccttcccgccggctgcggactgcagcccgcggctgcgctttcccacctcagccctgctgagagcacgggcgctgacgcgctgttttaaaagataaaattcttagccttttgcccttgtctccgcaccctcgactcggcctagtacacgcaatcctcctctgggttccccaggcgtccttgctactccagggccagggtgcacgcaccctgagcagagccaagctccctactcctccaggctctggcgaaaaacggccaacagtgcgggaagttcaaatgcaaaaggtccccgccccgcagaggcagtggaaggctgaggagaagggaggcgagtccccggaggtagtggctgggatccctggaaaaagataaggttttcacattgtattctttaaagattaaaagtttcgaggatccgagtccgagtgggagaggcgcgcggtccgagtgggagaggctgagagtcaactccagggaagtctgtgtctgacacctgctcgctgcttagctggcagagcctcctgggtgggccggggggcaggggcctgcgctgcgcgccccctcctcctccacctcctcctccgcgtttcctgtccctggccttcatcccggcctcccggggcgtaaacttgcagcggttggggttcaggcagccgctgctcgcgcgcccctcgtcagttagccatttccctgagagcgtccttggtgtcgcaagtccagagccgcgaggacagcagatgaccgggtcagcggaaatttcagagccagccagcagctcaggtccccggggccgcggcaggaatggaacggctccgcggagacagcctcgggggcacagccgggccactgcagactccgggacttccctctccgcacacccgaaacccacaactcgcccgtgggccgcgtggcctttctgcgccgagggctgctgggggcgggcggcgagcctggcgggtgacctgctcttgggtgggccccgcaatgcctgcgccctagacgccggccgggacgaggggctggctgggtctgagcctggagaaacacaagggtcagcccccagtgggcgcagaggtggcccaggagggcccgcggacggtgctgcgctgcgctcagcctccgggccgctccccgcgttcggcgcgcacctgcccatcgaggcggcagggccagcaggcggcctaggcgcggccgggccacgcggcatcccccaaagctggagctcgccgactcttccctaccttttcaagagaccgtagtcgtgcccagaacgccggcgtggcccagactccattttggaacttcgcaggctggcgtggacgaagtaaacacatttatggaaaaaccccggggttaggaggtttgcggaaagagggagcagctcgtggggttggaaattctgcctacccctcgggaaaaccaaacggttctgcacccaacgtacacatacttaagggcgggaaaggtgtgaagcccgctgctggggagttgcctcccctttgatgaaaaggaagtgcgaagcgtaggaacgctcttcaggtcaccaccccgtgagtgggaggcttggggagtctgaaggaagagaaagctccctccaaatctcccaaactgagaaaagctgcaggaggaatgaggcagttggagagagaggaccgcaggcatcccgcagctgaggctcaggactgagctctaaaatgaaagcacccctatgggacccaccaggcaaaacgttaaaaaaaaaaaaaatctgaatgcttaggcattctgctgcttccattctgtgtgtcaaatctactttgaagcagttaagtactgcaggatattaaacactcgaatctccgtttcaagctcactttttaatctttgcgaacttaaaattggaaagacagaaaaaaaatctgcgacccctgttatgttttaccaaaggaacgaaaaattctctccacctcggcataaataaaatagaaagaattttatcttaataaaataatatctgggagcttctgcttgactccccaattactgcttaaccttttgacagtttttagcctctgcttgtatttatctacttccccgcacgattgagattttttgaattgtcctttggggcgtctcattcaaaaccatctttcgacggaacacttttgaattgtacagcctcttggttgaagatctacgtcctcaaagtgcgggcttgccgtggagtaacacagatcccctctggcaactcgtctgggacgaagggcgtttttgcttagtgttgatcacgcaaatcacatctgaaaagaagctgcttaaaatgggtgtgtatcattcccttcctgtcactcggtcacccctattccagagaggttgaagtgctttttgcagttacactcacacaagaccaaacctttagaaggacctgaaaaatgtatcactgcactttgaattctattaactttcctggagactgaacattgaactcaatttttgctgggaatgaagatgtaaatgttttgaaaaactagaatcgcattttcctaaattttaaaaatgattgttcttcaccaattccagatggattctttattctttgccaatgggttgcagatgcccactgttttaaccaagttggtttactgcgtatgaaatgaacatttgccgattaaagcttaaatattggaagaaatttctcctggggcattccacgcgtctttgcaataattactaaattagtcaattgccacctctgtaaacaaacttcgtttagaaaacagcaggcgaaagcagactacacatgtagtcataattgaccaaaagtatgtacaaaactgtttaaaattggggaaagagtgatttatgctggagaatgcagtctagacctgaattattttactttacggtgaaggtagttgtattgaatgtgttaagatgtgcaaattaagccggcgagcgaaccaaataaaaatactaaatgccctttgggattctctgtggagtctttgagaggcagagaagcagttgttgagtttctaatggtataaggaaaagtggcaacgagaagaaagggggtgggtattgtgtttgtgtgtgagttttgaactgagtcacctacggctgcgtctctataacagggaaacctcgagcaaacctgtgcctttaagactcagttgctatccaaacagaagtaaacagagtggaccattagcagacgccgggcgcggaggcggagccagggcgctgagggccccgcgcggcggcgggacgcccgcccgaaggggaggcggggccgctactaaagcccaagactcccggcctggggcagcctggggagggacgcgggcggggacggagctcggcgtgcttgctgctggagggtgatggccctgcaaggctgtgggctccgacctcaccgggagtcgacagcgagaggttcgccgaagagcgaggttct

SEQ ID NO: 587935 - DNA, 4001 bp, Homo sapiens
agtccccattatcttttgttgtttttgttttgtttttgtttttttgagacagggtctcgctctgtcccaagtgctttacatatcacctcatttaatccccacaatacatttcacagatgaagaaattaaacttagaactagcataataagtagcagagccaggattactatttcttaggatttaaataatgtatacttaaatttcctggcaaacaggatgacctcaaaacgagtagctatatttcattattaggagataataatcaataggggcaaaactgccagtaattcctgtcatagccttccatgtggcaaactctctcaacatcctcatctataaattaggattaatgcctataatccaatctactccatagggttgctgtgaggattaaatattatgaatatgaaaattctataaaaaatgttgagacattcaaatatcagggattgctgtcacatatctttcgccttcaaaaatgcttttgcggcatttttgttcactacttcaaaataagactctgaataagctaaaaataagtctgttaaaagtgcaaccaccactttgaaaagtataaatcaccacagaattgctgcctacacctgcccctgactcctccaggttctctaatgtctccacaagggcaaggattctcttacacctataatgaaactctgataacttacagtacagctaatcaatagagagctgcacttcaattcagagttgttcaaactggactactgtgttttctcagaggtgctccttccagttcttccagaaaagaaaaaagtgcccaattctcttatattgtattaaaacggtgcccaatgagtagaatgcaggtaacttacaaaatgctagaaaagaatctatcaattgacttgctcaagtgctctgacagcaggtcccttttggaaactccttcacgaccccccctttttttcacctgaacagatggcttccaggcttcaaggctcacatgtctagtcacacaattcacaatagctcccaaagttcctaacttttcaattatcccatgttcttgaacacacctttcatctaaagatctctagctgtcaaagcatacgaactctttaatcttcacaacagcactatctgagagattactatccttattttataagttaaaaatgaaagactgaggttaaatattttagcaacatcaaacaattcgttaattcattcttggggagagaggaatacatattatgaacttctgtcaatggacaacctagatttggcttcctaagatcattgcaaatattagctcaaacacatcccactcttgtatgcatacatttccaacacaggtgtcaaagattaaatataaactattaataacagtaaataccataccaaagcagcactatttttacacgcaaaactatattgggggagggggttctaatttaaacttcccactgtcttgcatccataaatacttttgaacttgagggggaagggggaagaacacctgtcagagcagcacatccacaatgttttacagactgtgtagctattaatatttaattcctcccgccccgggaggtcaggccgcagggagcccggcgctgcccacccgactttccacgcgccaggcctgccggccgcaggggaggctccggctcccgctcccctcaggtcccctcgcccgtggacagacgcggcgggacactcggacccgcctcccgacctcagcgcgcccggctcggggcccggcgggcggggagaggctcgcagcagggcctggcctagccacccccgccccgcggccgccggcgccgcttccctccttcttcccgctccccgattcgttacctcttaggcgccggcggctgctccatggcggccggggacagagagagggacctggtggacggcgaaggccgaaaggaggaaaggagccggggcaccggccggccgagcctagggcaccacagagggaaactctgggaactcggaccaactttcccgtaactccgcggcggatctccctcccgcttaggagcgcggctcctcccgccccgccccgcccccggccgccccgccccgcccccggccgccccgccccgcccccggccgccccgccccgcccccggccgccccgccccgcccccggccgccccgccccgcccccggccgccccgccccgcccccggccgccccgccccgcccccggccgcgccggccgccagcctgcggcggcggcccagagaaggtggacggagccgggcaccgcggcggggggcggagcctgccgcggcctgggttggcgggcggggccggtgccgcggcgggtgggcggggccggggacgaaggcctggctggccccagagccccgtgaccgggaaaaggagaaggttccgctagagctagggggcgaggccggagccgctctaggctggggaagggcaagtccctctgagctggcccagagctccgcccctagcctgccctcactacggtttgccctgatccaatttgactcatttctttggctttcccaacgacacatcctaacatcgtgtgaatccgtttgaagtattactttctcactgcccacgcttccctctctagttctgtttataattatcggttatgttttcccccagccatttgacatgtgtaggccacagtactagggatacttctggaaattcttgtttgatttttattgtggacaagctcctcgctacatttcacaataattacatctaattaccgagaaaataattcgtacagtgagatctctcggtacaccaaattcagttgcactgggcccttgcagctgtcccattgggtaacctggcaagcctgtcacaaattatgctgccaggaagaatactcaagaaaagtttgtttcctcccctctttggtcctctcccccaacctgattccagcagccctcatcccattgtaatctgaccactgcatgcatccatattgtgggtatacttttaaccttaaattccatatatacctttcacataacaatatacagctgctacatgagtttacttgtttttgtcagaaattgtcaagatgggccgggcgcggtggctcacgcctgtaatcccaatactttgggaggccaaggcgggcggatcacttgagctcaggagttcaagaccagcctggccaacatggtgaaacctcgtctctactaaaaatacaaaagttagccgggcctggtgatgcgcctgtactcccagctgcttgggaggctgaggcaagagaatcacttgaacccgggaggcagaggttgcttttaaccttaaattccatatatacctttcacataacaatatacagctgctacatgagtttacttgtttttgtcagaaattgtcaagatgggccgggcgcggtggctcacgcctgtaatcccaatactttgggaggccaaggcgggcggatcacttgagctcaggagttcaagaccagcctggccaacatggtgaaacctcgtctctactaaaaatacaaaagttagccgggcctggtgatgcgcctgtactcccagctgcttgggaggctgaggcaagagaatcacttgaacccgggaggcagaggttgcagtgatccgagatcgcgccactgcactccagcctgggtgacagagcagaccttgtctcaaaaaagaaaaagaaagaaagaaattgtcaagatgtagagttacatagaattttcttggaggttagaacaataaatatgaagagaatgttaaataaaggaaaccaatttgaagagaatgttgaataatgtgaatatttgcccaaattaaacttgactattagcagctaatacaagtttagtttagtcctctttttgcattattttaagtttcactatgtaataaacttacactattttcaaaccattatattctttcctaaatttagttattttaagaccattcatttttgaaactctaattctgagaacaagaaaaagggttttttttgttttgttttt

SEQ ID NO: 587936 - DNA, 4001 bp, Homo sapiens
atcttttgttgtttttgttttgtttttgtttttttgagacagggtctcgctctgtcccaagtgctttacatatcacctcatttaatccccacaatacatttcacagatgaagaaattaaacttagaactagcataataagtagcagagccaggattactatttcttaggatttaaataatgtatacttaaatttcctggcaaacaggatgacctcaaaacgagtagctatatttcattattaggagataataatcaataggggcaaaactgccagtaattcctgtcatagccttccatgtggcaaactctctcaacatcctcatctataaattaggattaatgcctataatccaatctactccatagggttgctgtgaggattaaatattatgaatatgaaaattctataaaaaatgttgagacattcaaatatcagggattgctgtcacatatctttcgccttcaaaaatgcttttgcggcatttttgttcactacttcaaaataagactctgaataagctaaaaataagtctgttaaaagtgcaaccaccactttgaaaagtataaatcaccacagaattgctgcctacacctgcccctgactcctccaggttctctaatgtctccacaagggcaaggattctcttacacctataatgaaactctgataacttacagtacagctaatcaatagagagctgcacttcaattcagagttgttcaaactggactactgtgttttctcagaggtgctccttccagttcttccagaaaagaaaaaagtgcccaattctcttatattgtattaaaacggtgcccaatgagtagaatgcaggtaacttacaaaatgctagaaaagaatctatcaattgacttgctcaagtgctctgacagcaggtcccttttggaaactccttcacgaccccccctttttttcacctgaacagatggcttccaggcttcaaggctcacatgtctagtcacacaattcacaatagctcccaaagttcctaacttttcaattatcccatgttcttgaacacacctttcatctaaagatctctagctgtcaaagcatacgaactctttaatcttcacaacagcactatctgagagattactatccttattttataagttaaaaatgaaagactgaggttaaatattttagcaacatcaaacaattcgttaattcattcttggggagagaggaatacatattatgaacttctgtcaatggacaacctagatttggcttcctaagatcattgcaaatattagctcaaacacatcccactcttgtatgcatacatttccaacacaggtgtcaaagattaaatataaactattaataacagtaaataccataccaaagcagcactatttttacacgcaaaactatattgggggagggggttctaatttaaacttcccactgtcttgcatccataaatacttttgaacttgagggggaagggggaagaacacctgtcagagcagcacatccacaatgttttacagactgtgtagctattaatatttaattcctcccgccccgggaggtcaggccgcagggagcccggcgctgcccacccgactttccacgcgccaggcctgccggccgcaggggaggctccggctcccgctcccctcaggtcccctcgcccgtggacagacgcggcgggacactcggacccgcctcccgacctcagcgcgcccggctcggggcccggcgggcggggagaggctcgcagcagggcctggcctagccacccccgccccgcggccgccggcgccgcttccctccttcttcccgctccccgattcgttacctcttaggcgccggcggctgctccatggcggccggggacagagagagggacctggtggacggcgaaggccgaaaggaggaaaggagccggggcaccggccggccgagcctagggcaccacagagggaaactctgggaactcggaccaactttcccgtaactccgcggcggatctccctcccgcttaggagcgcggctcctcccgccccgccccgcccccggccgccccgccccgcccccggccgccccgccccgcccccggccgccccgccccgcccccggccgccccgccccgcccccggccgccccgccccgcccccggccgccccgccccgcccccggccgccccgccccgcccccggccgcgccggccgccagcctgcggcggcggcccagagaaggtggacggagccgggcaccgcggcggggggcggagcctgccgcggcctgggttggcgggcggggccggtgccgcggcgggtgggcggggccggggacgaaggcctggctggccccagagccccgtgaccgggaaaaggagaaggttccgctagagctagggggcgaggccggagccgctctaggctggggaagggcaagtccctctgagctggcccagagctccgcccctagcctgccctcactacggtttgccctgatccaatttgactcatttctttggctttcccaacgacacatcctaacatcgtgtgaatccgtttgaagtattactttctcactgcccacgcttccctctctagttctgtttataattatcggttatgttttcccccagccatttgacatgtgtaggccacagtactagggatacttctggaaattcttgtttgatttttattgtggacaagctcctcgctacatttcacaataattacatctaattaccgagaaaataattcgtacagtgagatctctcggtacaccaaattcagttgcactgggcccttgcagctgtcccattgggtaacctggcaagcctgtcacaaattatgctgccaggaagaatactcaagaaaagtttgtttcctcccctctttggtcctctcccccaacctgattccagcagccctcatcccattgtaatctgaccactgcatgcatccatattgtgggtatacttttaaccttaaattccatatatacctttcacataacaatatacagctgctacatgagtttacttgtttttgtcagaaattgtcaagatgggccgggcgcggtggctcacgcctgtaatcccaatactttgggaggccaaggcgggcggatcacttgagctcaggagttcaagaccagcctggccaacatggtgaaacctcgtctctactaaaaatacaaaagttagccgggcctggtgatgcgcctgtactcccagctgcttgggaggctgaggcaagagaatcacttgaacccgggaggcagaggttgcttttaaccttaaattccatatatacctttcacataacaatatacagctgctacatgagtttacttgtttttgtcagaaattgtcaagatgggccgggcgcggtggctcacgcctgtaatcccaatactttgggaggccaaggcgggcggatcacttgagctcaggagttcaagaccagcctggccaacatggtgaaacctcgtctctactaaaaatacaaaagttagccgggcctggtgatgcgcctgtactcccagctgcttgggaggctgaggcaagagaatcacttgaacccgggaggcagaggttgcagtgatccgagatcgcgccactgcactccagcctgggtgacagagcagaccttgtctcaaaaaagaaaaagaaagaaagaaattgtcaagatgtagagttacatagaattttcttggaggttagaacaataaatatgaagagaatgttaaataaaggaaaccaatttgaagagaatgttgaataatgtgaatatttgcccaaattaaacttgactattagcagctaatacaagtttagtttagtcctctttttgcattattttaagtttcactatgtaataaacttacactattttcaaaccattatattctttcctaaatttagttattttaagaccattcatttttgaaactctaattctgagaacaagaaaaagggttttttttgttttgtttttttgagacagg

SEQ ID NO: 587937 - DNA, 4001 bp, Homo sapiens
agcctgaggtctccccggctccgcggggagggtagggcagggcggagccgcgcagatggagtcctttcggcagctttccctgtctccgcatcctgcaaccaagtcccgggggacacgtgcttccagctgccacaggaccccaggccccaccctgccttttcaccccggggccactgagcgccagaaccgtgggcactcaaggcacaagaccaattgcggatgaaggccctgaatccagaatcttttccggtcatcctgtgtctccactgtcttgtctctctgagcttatgaaattgccgatatttggcactgtctgacccacaaaacggaaatttcgcgtggcttaacttaagactttgacctcttttgctttatatacgatttcatgtcatctctattattatacatacacatgtctaggttctagaagcttttcccgcaaacgatcaaaggtcttcaaagaaccctttatctgtgtctatgtctaaacactctatgtaatttgcttccgaaaagaaaaatgttaacccacttttcccatctctcttaaaagcagaacaatgaggccagcgtggggagggcggggtcagtggtcaggtctctcttggaagccgcggcggggagtcgggagcggggagcgcggggcgtggcgccgctgtccccgcagggttgggctcctgggtgtcacgctgcgctccccacccgaccccctttcgaatgaagatgcagcaccgggcgggggggcggggctgcgcggttccgcactgggtggggctgtccgcattgtgcgcccagcgctgcaggtgcctccccccgggaccgctggtccgcacacaaagaaaccccaccccagcgccttcgaagccgctgtccctccacccctccctgccgcgcgcttccccgcccctgcagctgcccacccgcgccctccacgccctccgcgacttcctctctccttcccctcccttgccctaaaacaaaggagcggaggtcctacccccaccctgtcccccgccgtcttacctccctgcaccgcaccccaggactagcggtttcttcgacgagacaataccgtaaaatgtgcccagttctctccatcccctccccccgtctccacccatctttcaaacagcgggatgggaccgctttgactttgcaattttctttttcctttctcccaccttccctttacccctttcctattttcttcttaaactagagaagaaataaaaaaaaaaaaggtcgttataaagcactttccaaaatgtcccttaagcccatttaaggcaaacagttaaggtagcttcctcccctcacgattgagtcctaattttaaatatggaaacagaataaattctctacccataggagggcaacttacccgcttctaccttttaaaagaaattcttcgctttagatttccatagacctcttctctgccctcccacctcccccagaactgccctgtccttcctggtcctgtgttaccattaacatctttttctttataaaatatctctgaatgcttctagagctcaagagaggaggtgagaggtgggctccaggtagagccgacggagaacgaggcgcagtgccttacccattgctgttttagccattgtagggatgtgcagacgctgagcagtggcgaaggcaaagggtccggctacagcagcggagagagcgagagagaagactgaataaggcactgagtctgcagagtgggaccgtgctagagaaagagcaagaggcaggagcccatgaataattatcactcagaagctcaagcagattggctcccaaggtcccctgacatgactcccgcagagtcagaatctccaagcattaaatattgatcggccaatggtgctggagtacaaagtaccagaatgcagtttgaaatggaaatcagtccttccctgtcggctccccccattttgggggcctgatagtacagtccaagtagagtggagctttaagccctgaagcttcctaggagctaagaactgggctgtgcctacctgggagccaggaggcttgactttgctcatacatgtgccattgcacaattcaatggaaaaggattcagaagcttgagaagtcctcactatatgcaggctgttggaaaattctgtttaaatactgtgttttcactttttcatattttctttcacctttggctctgtccttggttctagtctttcagggctaccctatgtctggctatggtggcagctcagagcagacttgcattattgtcctttatcttttagcacagctggacttaggcgtctctaaactcttgaaggtctctcaggagagggaagcatggtgttttcttcccttggcacagaggaaggggctacctggttgcttgggaatagggatggtaataatggtccacctggggacatgggggaagaggaagaaagtttaacctctggtgcctgtgtcctgtccatttgttaacacggcagaaaacaggttggctggctggtttgggcattaaggaaaccacaggtgaatgccatgttgccctgaaggtgtaggattaagtgggtcaaaattttagtaacctttccagggctctaaggagaatgctttacatggaaaacttagaagagatgaaaggtgtggtctgggtcattatttttctgagatccagagagactacgtttatgtaggcccaggaaggctgtgttcaagtttcggattgagcaatgtcgtatgtgaggatctttgagactagttgcaaaaaatgactttcattacaaacaaggcatttattagttcctccttctcacttaatggatgccagtcattcatttgttctctttcacttgacttaaatatgtattgagcatttaccatgtgcacagctctgaaaatggtgagaaaaagtttaggagttgctgcatgaagtttttaattactgctaatttaactcttctgtaactttattgagccagtctaattccatgcagaaactggttttaatattagaaaaataggcaaagaattgctaattccgacgtttgaaagccaaaagaagagcacattgttgcaatcatgaacaggtatgaaaccctggcaagtttttaatttcagaaaaatgaatgtatttttttcttcttattaaaataggtttttagcagctttctgtccaatcacatttcaacttttttttctatcctcaggaacaatacacagtttcaaatacataaaaccaattgaaaatagcagggcactctccttggtgctgaaatgaatttcttcacctcctattaacttgtaagacattttaacctcatggacattttgctgactgataggatgctactggaactggaacagttttgacctgctgaatcatggggaaaataaaagatgaagtggagatcaataaaattatttcttgaacaggaagattagaaattatatttcctatctttgaacaggtctgtgactatgacacagcaagagagcaatatggaagttggcagggtctggaaataaataaccattttctctctatatataggcatttcccactttaaatgtaacagttaatcacctctcactggagtagttatcactcatgaggtgaaggatcttcagcatgtctgtgtgactaatattttcaaagtatttctcttctccccaccacaccctttcccctcaggctgtgtgtcatctctacacattcttcagcttccttggagaacaagggccctaagtcatggcattagtttctttaacaactgcagttggctgctgaatgaaatcgattgcacttttgatgactatgaggaaaacaaaacactcattctactgccctaagggtcacatatgtgactcttttctatttccgattttctaggtgttagccacctaacttcagttatgaatgatttttaaataatgtcaaacagggaagagagtaggtcaatatgatttaccatagaataaaaagatagtaggcaaaattgtcaatcagctaa

SEQ ID NO: 587938 - DNA, 4001 bp, Homo sapiens
agaggtaattagaagtcacttagcctaatgtttctcaaacttttttgactgaagctcacaaaaggtgctacattttatattatgatccagtatgtatttgtcatgatatggacatatacacacatatatgattacagatacagacatatatgtacatttgtacacacaaatatacacataactgatatgtaactaaagacagcataggaagcattaattatcccattacatgagatgtgctctaattattttctactcttattccattttattaaaacaaaataccatttacaatccataagttgatttcacaatgtactaatgggtctcagccttcagttaaaacactaacctagaccaatccctaacataatgcaaaaatctcctctaaagcctccctgctgggtggccatccaacttctgcttgaatgccttcagtgacagggaactcactccctacagggcagcatgctctatggtagtcccatctagcacttgcagatcctgctcactccagagctgttccaggagtggcctgggtggagctgagaatgccaggagggctgggaccagctgacaggtgctcagtggtttccaagaggggtgaaagtacagctcctagcagcaaagcggagggttggggtgagccagagactagggcagcattgctgggagactctggcttccttctgtggagctgcagatcagaccttttcccctctgccttctcactgctccagcactatgattatttcctcatctgaaggatgatctcattcccctagcacccgcctgtgggagaggtttcctccccctgggaggcgggggctcagcctcaggtggagacagattccctcatattccctctcaacctcccacccatccctcgagcctcagcaggccacctctggccatcccaccttgtattctcttggtcttaagacagggggtatcccttcccagggcattcagataagggtgcctgaacattcctgacctctccctccgacccccatacaaacacacacacacacacacacacacacacacacacacacacacagcattctggagacctgctcatgttcaggacaacaagactccaccacacctgattgtgtcttcctgggagaaataaaacaaagacagcaccgccacgtggggacagctgactgctggacatcaaaaccctgggtcccaggatgagaaatgaatgatgcctaaactcctggcaagtgtggtgggctgaataaggagggggactggccagggccccagtcaaggaccagggcgtggcagttctgggtgtctgcagttttcagctttggagccagccacctctggccaggtaggattaggctgacctcagggtggggcggggccaagaggaggtgatgatctcattgcatccttagaaccaagagaaaaaagtaacccgtgcatagagccgaaggaaaagatgtgtgatcaaaatgggaatgggagacaagaaaagctgtgtctgaggaagaaaaggtaaaaacacaggagagcttcccacttgaaagggatcttcaggtcacagccagctgcaggggcagccagactcagcacaaaacctttctccttaagcaacaaaacatttttatgcagaaatagctcaccatagcatctgacaattcccacccatcctgcctctcctgagctctggaataaaagtggcacccggagcccaccctcaccccttggccgagcgccattctttctgcctcaccccctttcccccaagatctgacaaagtttaaatgattgagtagaaccaaaggtgacacaataggtgctaggcccctcgcttctccccactgtagctgctgtcttgttttttcttttgcctgaaaagcctcaaattagttgcattttatttctacttacgtgcagtccagttagaagcgagctgctctcttcctcactccctcaattagtggtaccctgggcttctctcaacatcagcaccactgctcgctcttgccatgacatcacctccaagctctgtgattggccagcagtgggttgcttggcaattggacagtctcctctggtggagcagggattgcctgagtgagtaactcttagcaggccagggagtgaaagatgatgtcagacaaagagcctgctttctctgctgcctgtggagctggagaaccagaggggtgagggcggagaggaagaaagaaagagggagtggtacagagaaggttggggagaagccacagcttgcgagctgggggtataatgaatgatttccaggatctttaggtcctttaaatttgggggtgagagaatatggaatccagagaagaaataaaaaagaacagatgaaccctaaaaatagcttcctggagggcttggtgcctgtttccagctctgtcagaagggctggtgggtttgaacgatgactcagaaggcggggggttgcggggactgcaaaaaccccaggattgggagctgatgagggccctgcactggagtctctggagaataaggcttccctctggccacctttgcaaaggtatcagccacatctctgctgacactagtgggtcctcactgcccctcccatccagccctcctgggccttccagagggagccacaggtaggaagatggactggtcattacactggtgattcccaaatatggtggattttttaaaattttcagtaagtttttgggaaacaggtggtgtttggttacatgaataagttctttagtggtgatttctgagattttggtgcaccatcacccgagcagtgtacgctgtccccagtgagtagtcttttatccctcactctcctcccactctttcccccaagtctcctaagtcccttgtatcattcttatgccttcgcgccctcctagcttagctcccacttatgagtgagaacatatgatgtttggttttccattcctgagttacttcacttagaataatggtctccaattccacccaggttgctgcaaatgccattatttcattgctttttatggctgagtagtattccacggtgtgtgtgtgtgtgtgtgtgtgtgtgtgtgtgtgtgtgtgtattacattttctttatccacttgttaattggtgggcatttgggctggttctatatttttgcaattgcgaatcatgctgctataagcatgcatgtgcaagtatcttttttgtacaataacttctttttctctgggtagatacccaggagtaggattggtggatcaaatggtagatttacttttagttctttaaaaatttttcacactgttttccatagtgactgtactagtttacatttccatatggtggaatcttgagggggggtgacgggtcagcgatggtggcttctgtagttccctcagggaatgagggagccactaacataaccttcacaggctgctgccctcagccagtgagctggagagggcagggtgaggcaggagaggagccaggcagctgtggagcgagaccccctcctccagaacacctctccagattaaatccccccaagatgtgtccatcatccccacattccaccgtccagccttgcctcatgtgttcttcttggtggggaggggtaattttttttcttttttttttgagacagagtctcgctctgtcacccagggtggagtgcaatggcgtgatctcggctcactgcaacctccacctcccgaattcaagagattctcccgcctcagcctcctgagtcactggaactacaggcacgcaccaccacacctggctaatttttgtatttttagtagagatggggtttcaccatattggtcagtctggacttgaactcctgacctcgtgatctgcctgcctcagcctcccaaagtgctgggattataggcatgagccaccacgcccagccggggaggggtaattttattgaggctgaacatgtccaacataacgctcaccattttcactattttgaagtgtatagctcactggcctcaagtgcaca

SEQ ID NO: 587939 - DNA, 4001 bp, Homo sapiens
ctggaactccgaaagacttcagcttatgaacttggatctattttggttatgtaatattgggaatcagataatactcagtcggaataactgcctgggtatttatgaggataatttctcattgaaggagaagtttgagagtataactggagaacattttgaataaaaattaaagaccatattaaaatattgttttaatcttaacttttttaaaaaaaggattttaaaaaaattatctgcatggttgcaaaaatatgtataatgcaacttgaaacataattttacaggcatctttatgcaatcgaatactaaaatcacaaagcactagccataaatcctgttattcaacctaccaaacagctcttatttcagaacagcttatatacaatattattcatagaatctctcacctgcaaagggtgaggataatgctggatttctctgccaaatgtgaaagtccagtaggagccagaagctctgcataccacaggtatatgaatgttgctatcggagggcaagtatattagggtagcagaagtctcattggctcacctatcttgctagaaaatttggaaaataaaaaattttatgttttgatccctgtgaaaatagagcctgaattgaaaggccttttttttaatactataaattaaacatagcatataaacccccttcttatatttataaatagttcaattcaatattggtgggtgcttttggtagagccgttacggctactcgcatatatgatgacaactcattttgtgttgctcaggcaccagatgactattaatttccaatgactagtttataattaaatcctttctgtttgtctgtttataaccaaacctgaaaatctatttacgtttaattaacacttcacttagccggtctaaaacctataaatgtagtgactcttaatgatccattacagagatgctactttagttttccatgacttgtaaaactttcacaaacagatctgcaaatcaattacctccatctgctttccctgcagctgcaagagggctatgttaaagagcattttcctccttcttccttctctgcttttcttccagctctaagcatttttgttttaaagccgacctagtggctgttcagagggtagccccttctcttcaggagtttccaaacttcagagtcaatctccaaaaatattttaaaacaccctttgctctgtcataaatcagacataatctaccttgcacaaatcggtgaagaaagcacttccacctctgccagcaactcagtaatagacccttcaaagaatctttataaattgagcagtaaaatgcaacagtttgaaagtgaattttaattttgaaagctaaaataaatcctttctcagccttatctatcctctacaagcaagttatagctcctgttttgagtatacaacggggatatgaaaaggtacaaacgcggctcccaaaggtattttcttagctacaccttcaaaagcaaggcatgaggagtgttagttctacaaagacagccaagcatcaagctatgctcaccgtcatctgtcagccgtacaatagcagcattgataggacagcaacaactggctttgacaagtgtgccgtgctagcattccattcaaaactatgctaaaagagagagggggagagaagcattcaatgtcttttactttacctgaaaaaaaaactgcttttcttgtgtctgctgaaaatgaattcctccttttcctccaaaagcaaagtagttctattgcctgcgactctcacttggagaagaccacacagctccagcaaggcagccttccttctcttaatccccactcgaatgtgatgacacacactaaccccaaccatctgttgaaacacgtcctcaagcactcagcacagtggtgtgtcaagacgggctgcccaatccaattgctggggctgggtgtctcttacggattggaggctgagggcagggctgaaactggaggtctgagaactcccagtcaagtaacctgagattttcagagagaaaggactgctataaaaagaggagaagtgggaggtgctacagagaaggtggagggaatgaattattctgatgaccagttgtgcgttacttttcacaactcctcgtgctccccctgagatgatggggaccctcagtgggatgcacagaaaccctaaacatttttactgcccgtctatggaagggccatctcagcaagacgttttcccttccataggagataaaaggttcatcttgacttgctgataaagggttaatgtaggagtagttggcactgaaatgtgacatctacattttgaaatctaaactcctacctttctttgattagatcgtggctgcctccaacattcttggcaaggagggggtgggggcgcagctaagagcagaaacttctctattcccacacacagctcttcactgtttgccacaggctgaacttcagaaatagtcaatgaaaatcattttcgtttctactcatgtaaaatagcacgcgctcccatagataaaggtggcttttttaatcacttgctgctttcacagacatctctttgtaaaagcactttggtaccagagggctgcactctgtcattgattatttttattggcttctagttaattgcacttataatgtccatatagctcaaacagctcattaacaattttgctttgaaatgttttcaatttttggtcatttcaataccttcttcttaggggcattttttttttttttttggttttctgaactgtttaatgaaagtaagtactttgacagcagtctgaaccagaaaatggctatacttgttacagtactttaagaagatatctggaaatcaattaattgccacaaatctcacaatttcaaaaattccatcagatatctaaggaattttgataaactgaaagagaaaataggaattttaaacactaccaacttcctgacagtgtctgtgggaagccaacattttaagtattgcaccttttgtatttctttgaactgggagggggattgttttaaaaaaaaaacaaaaaaactcttaaacttgcctaatgccttaaaatttagactataaatagttatctaatatgggcatgctagtatcacaaggagaattatttcagtttctagcaacattgatttgactagcttgtgtttttccagaatttttgtgtgtggtattatattaagatacttaaaaattattctgggtgcaattttctgatgtacaaaattagaaaactaatttttctgcagtgcatttttttcttataattgagttataaagaagaaggagggaagaaaaagaatcagaagttaaagtcctgattcatttgctcaattgcttctcagaagtgattatgaggtgtctgtttcacaatatattgtgtattcactaaactactcctaatcagctaagtccagatacataatcaacacaaacattttcaacaatggcaagtggcacaacggggctctaacttcccttgggcatcataaaatttttaatagtgccaattattgtaaggtatttttttttcctgttttggcgggaggggggttaatccaaccagacccatgtctggaaatctggattacctcaactgcatagattttgaagaccccagagacattattaaggtagttcgcattctcttaaactgtaaattgagttacaaaagtaaaacctaagaaactgtacagatgcggaatcaagaagctttatcaaccctgtgcttgtaacacactgtctatgaggcattcccaaatgggcctggttctgacctacattattgtttaaagtgctttttaacacggacattttattctattattaattgtagatcttttcattaaaactcagtcactgcttctcttttattgataacttcagctatttacacgatttaatacttgctttaaaataaaaaatacaaggatgcaatagatgtggttgtttgctatgatcttaatacttgcttctgcagtagct

SEQ ID NO: 587940 - DNA, 4001 bp, Homo sapiens
atcctcttgcctcagtcaccggagtagctaagactacaggtgtgtgtcacaaggctcagttaattcagtttgaccaaactaagcctgaaatccagatctcatcaaagcttgtgttccttctattatgattgagtttgcctttgaggctaatgctgagattatgtggttcatctttgtaatcaaattaggtaaagtatagaatttagtgttgaaatatcacttttaaatttaggggtaaaagcaactagaatccaatcttatttttgactttaattataccttagaatttcatgggagccacagagaattctaagggaaaatatcatttaaagagaatctaaaaaaagacataattttataatatttcccatgtgtgttaataaatactgaataaacattgcaatctgaaagttgatgtgaaataaatttctccacttgatccattttggatgttgtactatcatataacatactgagcactagatagatacaacaaatgtaagaatttaagataaagacacatatacacactaacatatacatacatactatacatggttttcacatctattcatctagaggtaaagatgataaagccttacaaatgaatcacagcacttacagcattaaaagtgagaggccttgcttttctacattattaccaatttatagttcttagttttcttacctgaaatcttattaaaacaataaatctctgtatctcatagcataccaagttataatcacggttttataaatgcaaattgtacaattgcccaaaatagaccctttgttttttggcttgttcaaatagcaagtcagagttgctaagtattcagaagttgtgtctttcttcatgttattctagagttttaaattcacctcttgttgaaaagcagtttctcaaagcagtgagcataatctctgagaagagtactctgttaattcagcactctttaagacacatagtttgataacagggctttgagttttgcctgtgcttaaaaagttagtgtccatgtttctttaatattagaaccttcggttatgcagtgaaaaatttaataaaaattcacatgtccactatagctacagtgttttgtacagtttacccaagccagtgcaagtttcaagcctgcactgaaagatgggatttatttcgtagtgtgaaaagaaactttcaacaattacaactgattgaaattgtgagtacccaaggcagagaaactgaagaccaaagtggcatcatttctccttgtctaacaagccaggtgactagggctcctcttaagggcaaaaaggagtgtgtgtgtgtgtgtgtgtgtgtgtgtgtgtgtgtgtgtgtagtgttgtgtgtgtgtgtgtgtggtgtgtatcaacagccagacatcaccagaatgctgtgaaagtggccaatttcagtacctcgcctgggtactattttgttaagtgaattaattatcaacagaaacctctttcccctcttattatcattacaagggaccaaatttgggtggaagactttggccagaaacatactttccatcatctgagaatataatgaataataatatgatgaataatgaataaataatacgaaaaggacagggacaggaaggaaagtttgtcttctttctttttaaagtaaaagcagagcacgatacttacaaaagccgccttcaaaatcttctctagagaaaaagctctgggaacagggaggaggcagaggagcagagataaggtggcagcgggacttccttcctcctccgaagggggagagtcatgttcctcatctgccctgacctccgaggagcgccggcagccgggaaggcctggcctctgatcctcgctgccctcgctcctggcctctgcgcctggggtttcctagttgccgatcaagccgccccggcccgacaccggccccaagattcattagcgacggtctgcgaagtgctcgcaagatgaagacggttatataagcccgcgtattattatcatcacacacccccatagaaccaacgctgccagacaaacaaaaggcagttccaagaagaggaggagcagaggcagaagttacactaagggtgaatttcgggacacggctgaaaggactgggggaaaaaaaagggcaactgaatatgtgcatgcaaacctcggcaaacaaactgcgctgcagccggccggcttggacggcggcgggcaggggctcagggtttccaggcatgtggttccggctccctgagcacccgacacagtagctgcctgtggcaggatggagtggatgggaagatgtggtatttggaaagccaggcgttccagagaccaagtgcttagtaaacactgatgtttcttagactcagaccaggtgcttctgctggttctctttattcctggtctcttgttttcctaaggatggttggccaggagttccctgtgccctgtcgacccctctaattttaaacctctctgggtctctcctctcttctctgtgggagcaataaacggaaccagagcgctctttccactgagcctgggtccactgagaaagttctgattattctgagcaccaagcttccctccccgctcccacaacttgctactcatattttctttaaattattattatcctgtcctgcgcctgccactgcttcccaacacgcaaagaaattcctcatcctggcactcaaagcccacaatttctgtctccacactaatttcccacttcccatcccgccctcccgcctcacctactccccagcacgttataatgtgaatcattctctaaagacggcctttcaattctccatttcccatctttactcatacccccatcctcacacccacttccttcaaggctcagttcaaatcccgcctcccccacaaaagccttccccaatttcccctcttttctccgtgtgactctgtttctctgttgtcattccgcatgcgttgtctgtctccataggtttggaaccttgcgttgttctccctggtggcccaggacagggccctgcataaagcaggtgctcagtgagtattcactgaatgaaactgacagctgaccagatcttacctgcattgtcgccagctatatgggcataggtgagagccaccacatggtactaaaatatggacggttgtcggatatatgcaataggttcatgagggtgtgtaaatttgcataagttaaacaagaaagcttttctaaaacttgaaggggagcctctaaactttactcaagtcagcttactttagggcttaagttcatgaggcaaacaagaatgttggcatctgttgttcctttgctgctgcacattagaggacctgtaagtgcaacttcctttacagaatgccaggaaaattctccaaaggtgagatttttcagacatcactggcttctgggactgattttatggaggaactcctccattattgaaataatatgtgctatcacaacagcagctcagcaaatgaacaactgctctctggtgaattgttttatgatatggggtgaaatatagaacatgagctgtcagatactgaatttcttgtggctttgtattaaagtgttcttaatgacatttcccctgttattttttggtaaaagtaacatgcttcaaattccacctgtgctagttggatcgaccgtggtgtcatttaagagacttggggtgtgtctatgcagtacatgctctccacgcatacagattgttcagtgaattagaagaattttcccccctctactaatttggaacaattaaaaccaattcaggttttaaagaattttggcctcaagttcctgaggattcggcttcaggaatgacagcgatcttactgcaaatttgtagttcaagtgtaggatcatctctcattttgttatgctcaggtgaggaccataacctttattatagctactatttacaaatccctcctgggtttcaggaactggcctagatgctttacatgtctttttaacctagcagaactatttttgttttcgt

SEQ ID NO: 587941 - DNA, 4001 bp, Homo sapiens
ctcttttgtgcttatcttttacctactgttactacaatatgaaaaaaaaaaaaaaaaaaaaaaaccatgactattagagacagctggttctaagtgtgccactggctaaattactcacttactctctgcaagcctcagtagatcatctgtaaaaataaagttttggacccattttttgtttttttgttcagtgcatcagcatttatgaatgcatacaattacttagtttcaattatgatatcaccttaaagactattaaatacaaataaagtgaataaaatattatttaaatatgtacagatcattatgaattgaagagcgtattttaaatatattctgcattaaaatagtactattgtaaaataaattaagcaatcaaaatctgcactatgataatgtattgctgctttaaaatctgaagcatataaaaaaaaatgatttcacctgggctcatctctcagcgacaggtgctactgctctccaaatgtacaagtggagaaaacttggcatagagaatacctgactccttttgccccaagggcgccctatggggaggaaaaggcaaacattcctaacatgtgcctactgaagaatctgatctggcagaaactttaagttgaagattctgatctgtagggttcaaatgtggcccttttctgagaagagatatccagatgttatagctgccctttgcttctgctgcacaggctctggggtcagggccagaggacgcaagaggaacctagcagtggagtctcctgttttccttgatagcactacctgctggacactggggaagataaaagcaacgattttccgattttccccagtagcttctttcatttaaaaagctttcagaatctctttccacatactaaattaagctcacagatatcttttactgtacaatttacctctattttaaatccaaacctgttgataccacccaccatgaggaggttttgagctcatcaacgtagcccttcaacagcacattaatggaaaatggctcatcctttctcacctggaatagtctttaagaaagtttctccaggaagcagaaacttgaaaagtgtcctctggggacttgggactgtctccctctttggagagctcaatggaggcttcctggagaacacctattcttaatgaaccttccttatcaaaagccaccatttccaaacccactcctgagaacaaccagtaaagggagattcaaaaccgacggcctatacattagcctggctaatcttgctcgttgcaacaaggagtccagcccgaccgtctcaacaaccaatcaaaccaatcaaacaggagggcctttcccttggcctccatgtgctgagagtgcccttgattccccattttccacgaccttcttctgtgcatcgccgagcaccctggatacctcccgcattggaaagggtggtcctggggtccggagcgccccatcactgccctcattgtaccgaagaccatcagttgccctcccgtgtccgcgggcactgacagcagagaccgcataggcgccccggtcttaccctttctcgcccagaagggccccatcgcgctgtccaggaggaggcacctacgtgcgcccgggagaccgggccccggctgggccgggtgccggtgcggacgggaccccgcgtcgctgctggtttgcgctcaggcccggggagccgggcccggcccgctccgcccgccttagcccggcttggacacgtggtgccgcggaatcccttgcgctccggtgccctcggcccctcggcctctgcagccagccgggcggctgctggggctgaggacaaaatggagagaagggcgggggaccaaagggcaggcaccgctgggtggggcgcagcggcgtgagcacgctgagggccgcgcgccgggggcgccaggattctgctccctgggctcgctgcctgaaggaccggttcctgttgccagggccctggcagattatgctgcaggatctgtttcttgaagaagccgctctcagcgtgggtggcgcgctgcagagactctgggctcctgccagatgagggagccccggcggaggccaggagggcttgcgttgcacaatctggagcggatccccgggggcggctgagggcctgggaccccagtctccctcgaggtcttcactcacccctctgctaaggagcacccttgtcctcacgctggagaggaagagccctgaacactgacttcagcgtgaacctaaggtgccctttaggacagtctccctgggaaaatttatctcgcgaccacagcctgcctgtctggggacagctaaggaggcgcggctcaaaactagggggcgaagacttacctgcagcttcaagctctttctaacttcaccagtgaccttgggcgcctcatctgaacagtgtgtctctgtctaagtttcctgatctttgatctggggataaatgtggctgttcactttctagttctcaggagatagcagcaattgggtttaacaaaaattctccagacttctttaatagcaagtgcaatagagatataatttgttttgactttaggtagggctgacgggaaccccagactggaaaggataatgtgttctaatttcttagtccaaatgcaaacttaataatcaatcccactacctgcttttctcggaaaataggtttctaaagagactgttgcaaaggggctttctccctcagaattgccagagtcccagccaggtagccccataaagaacgcctagctttcctaaggctcttcatgatgaatccagttacatcgtcctatcatagctaagggtgaaagagtcactaccacagtttggctaaagactcttctaggtgagattcttttgatgttgtttgcttactctgagattactcttcattttcacccctgaaggaagtttctgcacaaaaggaagggatgcttctgcatcctaccccttctcctttcgctgcctcccttccttactgtattcactagcctttagcacacagttagcttaaagtccaacctacttacattcatgtgtgaggaaacttggcagcgcaagtttatgcaatggaaacccgacaatctcatattcctacttaacttggcacatgttaaatgcattaagcgtttcatttttagttccagttcatttttgctatctggtcatctcttctacttctcactgtaaggcttagacgtgaagatttcttctctgtagtgttttctaagccctagaaatccctcccccactgaaaatacatatcataacacaatgcaacccatcccaacaatttctttttcttttctcctttctttccccttccctcccctccccttccctcccctcccctccccttccctcccctcccctccccttccctccccttcccttcccttccctctttgccaaactgtgacataggaggtcttagtatgttccttccctccctccccacccctccccttctacctctattcaaagtccaaccattgagtttaatcctcctttggccttaaagggatataagtgccctcctttggctttggtcaaaactgctctctgctcaatatttccttcaccagattagcttatgttctcttcgaactatgctctaggaactcggctttctgtcttccttctatccataatccaggcttccaggacctctgcatcaggtattcctggattgtttttattgaattccaactagttatttataagatcatttgtgaagctaaaaaaaaaagtgtacacaaagtgctatgaaaatgtaagactattaggttaaagataaccagtctcatgcccttgcacgtaaacagtttcctttagaatggggattgctacctatctggaaggaaatgtcattctatttttattctgaagacttaagggcaccgagagtgtatatgtgagagaggtgggaggggtaggggtgagggtggtaaaatagggaagaggaaagggcagacatggagttcctgagcgggaatggtcaagtgga

SEQ ID NO: 587942 - DNA, 4001 bp, Homo sapiens
aaagaccttgctgataaaacaggatgcggtaaagaagctggcctaaacccaccaaaaccaagatggccatgaaagtgacttctggtcatccttactgctcattatatgctaattataattcattagcatgttaaaagacactcctaccagcgccatgacagtttataaatgccatggcaatataaggaaatcaacctacatggtctaaaaagagggaggaaccctaaattccgggaattgcccatccctttcccagaaaactcatgaataatctaccccttgtttagcatgtaatcaagaaatagccataaaaatagccaacgagtagctcatgctgctgctctgcctatggagtagccattcctttgtttctttacttgtctaataaacttgctttcatgttactctatgaatttgccttgaattctttcttgtgcaagatccaagaactctcccttggggtctggatcgggacccctttctggtaacatcttccaatgtgcagttaaggttggaaaacattgctcttagtttgtccgcacaataatggcactattcttatgtaattgctttgctattacacctaagtgacctcaaacaaggtgaggtttgggacatcaggtaggtgtgaggaattaaggacagcacaagtaagacagctctctatgttattaggaacgagatgactctgacagtaacaataattacctctatttcaggatagatttctgaatgcctgcaaaaatattataagtcttgctagagataaaactgcctttagagcactggccaacaacctttcccctcttgctgaggtgggagtttaactggtacccacttaatgccaaatggtattggagccaataagaaaaatagctgtatttaaatccagtttcacctgcaagagtctccaagttttaaactaaaccattaccttcatggtagctgtttttgaaaatgtatatacttgatagtttagcaataaataatacaacacatttacttaagagcagatatggcacttcaaccctaacctgtgaaagctcccaaccaggagaacacgtatacactctcatatactacagacgtattcaatttgtacaactacaaaacaactagcatatcacattcaaattaattcaatttaaaatgtttctagatcaagagcattaattttcacttacattctagagcaaagcctgcagtacaaaattattatataatctgggataaactctaaatagaaactaatttaaactccttcgctcaactactgtcaacctgccaagtgcaggaatggcagcatgctactatagttagcagctctctcctggtcaatcggatcagagagactcagagtgaagaaccgaaagaaattagttttgtacagtttgataaaaggaaaacagctttaaatgacaaattaggaacaattttataatacatgatttacaatttctttgcaggaaattgtacagtcagactgtacaaattctttgctatttaaatgctcccttgaaaacttaaattttctcccgatcatttctaactccaaaactaggcttatttggaatatcagcaacattttatgaaatgtgatttagttaaccacatcttccttaatatttttacgacaaatctttgacaagaatataaccccttagcaaaacaaatatacctcccttaccacagcaagcaaacttacctcttgggaagaagaagcaatcaaaaattactggctcagccaaatagaaagaacatataaagcttcagttctggagtcaaggactggtgacttgtttaaataagctcaagagtcaaatggctgtgccttctctttaaagggaaaccagaaaactctgcactaatgtgtactgcttccgggcacctccctttgttctaagtagaatgctaatgctaaaattgcagtttgcattcctgcttactcagggaacactgacgcagcctgacaaagcttccagcttaaatatcctgatgggaagaaaagtcccagaagatggtatttcccttgtgcactagtaaaacgagcaacacgatgaatgtgtaaatttgaacagctggaagtttgtggtcacattaatgttaacctgatctcatttgtaacatatattagagacactgagaaaagaaatgtttcacttcttatgaatgtccattaaggaagtcaagagtgtgtgtctgaatgttttcacctcttctccttggcgtgcaaaattttcattaatgtacataaaagcagttagtataaaaggagaaagaaataccttaggggagtgaaatatagattaagcttagtataatgggatgaaaaataatgtgaaaaagttaaggctataaagagtaaaagaaaacctagcagtgcaacttattcatgtgttaacatgatatattttaaagtataggaaaaatttaatttcaaattatgtttaatattgtttttcattgtacagagggaatgtaaagcagggattgctatgtaatgtcaaatttttaagaagaaatttaagatgtgttatgtgctatctcatcccttctcctagggtctttaaaaatgatgaagtttcttttcttctttttatatacaataattggataacagcatacgtaattcaataactgggaaaaaatattctggagcaaacgatcacacatttaatttacaagcctctagatatttactgatatatacaggactggaaagcatatcaataatatgtcagtcacttcatgatatggtttgggtgtgtccctacccaaatctcatcttgaattgtagttcccataaactgcacgtgtcatgggaggggcctggtgggaggtaattgaatcatggtgtctgttacctccatgctgttcttgtgatagtgagtgagttctcatgagatctgatgttttataaggggtttctcccctttttgcttggcacttcttactgctgctacgtgaagaaggacatgtttacttccccttccataatgattgtaagtttcctgaggtttcccaagccatccaaaactgtgagtcaattaaacctctttcctttataaattacctagtgtcagatatgtctttattagcagcacgagaatagactaatacagtaaattggtacctggagtggggtgctgctatgaggatacctgaaaatgtgaaagcaactttggaaattggtagcaggcagaggttaaaacagtttggagggctcagaagaagacaggaaaatgtggaaaagtttggaactttctagagacttggagggctcagaagacaggaagatgtgggaaagtttgcaacttcctagagacttgttgaatggctttggccaaaatgctgatagtgatatagacaattaagtgcaggctgaggtggtttcagatggagatgaggaacttgttggggcctagagtaaaggtcactcttgctatgttttagcaaagagactggtgggattttctccctgccctagagatctgtgaaactttgaacttgagagtgatgatttagggtatctggtggaagaaatttctaagtggcaaagcattcaaggggaagcagagcataaaagttttgaacatttgcagtctaatgatgcaatagaaaagaaaaacccattttctggggagatattcaagccagctgcagaaatttgcacaagtaacaaggagcccagtgttaatcaccaagacaatggggaaaatgtctccagggcatatcaaagatctttgcagcagtccctcccatcacagacccagaggcctagtaggaaaaaaaggtttcatgggccaggcccagggctcccctgctgtgttcagcctcaggacatggtgctctgcatcccagctgttctaagccatggctaaaaggggctaaggtacagctctggacatgacttcagaaggtgcaagccccaagccttggcactttccatgtggtgttgagcctgtgggtgcatagaagtcaagaactgaggtttgggaatc

SEQ ID NO: 587943 - DNA, 4001 bp, Homo sapiens
cattatcttcgtgtagagtgtaaaccacagtcaccctagattattgcaatagtggtctaactcaaggtctcttgctttcagccttgcctcttattcctttctctccgatcagtgtctccatttttccacaagcctttatgaaaagctaaatcaagtcatgcttctccgtgaaaactcattaatgatttcctgattgtcctccaggtaatactgaaactccttaatgtggcacacaaggctttcctgatctggccgccttgtttacctctccgatctcatttcttgccactcctctcttttgtagatactccctcccctccctaacctgtccctttggtccctgccactcttcccttacatacaaatggatactgctcaaactgtagcactttcagttctcggaggtggaggttttgtattctctttttcgtcgagactgctgcacctgcctctgtttagaacatttcttgcactacatccacctatcctcctcaactcttaaagatacattgtttcattttagacagcttcttccaggaaacctcccctgatgattccaggacacttatttttacccccaagagagctgttatgatctcctcagaattccccatttacttgtttgttttcaccaaagcttgtaggcagtgcctagtacaattcctgttatacagttgacactcaatacataactgtcaaatgaattaatgcctgaatgagtgaattctataaccccataaggggcccatcagtgcaagataaagaacatagatacaacttgttttgaaaatgattcagataaagctgcctccacaatgtatttgtatctgatgattgggtgtgtgcctaaaaaatccaacatgtgttcagtgacagcttttactgcagaagtgcaggcactgagaggctgtgcagtagccttgctgtcgccatagcaacctagcagagggaaaggctgatgatttagtgttcagatgcctcttagctctgtacttttggaacccaagcctgtttttccactgttctaaaaggcaagttttaccgatgataatatctatgccgccttaatttcattcaagtgtttctcatgtcattagaagaaatgtcttgtaacatttggattataccatcaaagagatataatctaatacagcataatatggtcttctttcccctgctttaaaatagtcttatgcatcattttcattttttacttaaagacttactttatggtcttgttttatcaccttttggcttctttaaaaattaatgtatttctggcttttagaaaatatcaattgctttaggatttaaccttgaaatattataaataatatataataatatatatatacaataatatatatatataatatatatatatatctcctggcaaagcacaggagagatagggtattgtagactgggaaggaaggtaatgtctttatataattattccctcaaatctgggataagttacttgattgtttatgtgaaatttgtaattaaatgattcctacctttcgtatgcacaaaactttatattttcagaactctttcacatatataattttatttgagcctcacaaaaatcccgtgaggtacatgtggccaatctctgagaccagataactgaaaaagcatagatttttattaataggaatcccctagactgcaaacttcacagagaagacaatacaaatgcactgctgaaaagaaaacgcctgcaccaaacaacccagacacatcacggtccctcacattcactcttcctcacatctcacctgtgtatgcagggggttttcttgggctcaatcagggctgacaaagcaccatctcctaatcctatcagctgtgtgagcaagagctgctgtctctctcggtgacctaatgttgggtgatctgcacagcaacaaggagcagctgacgtgcttcacaacacgtcacgaaggaaagaaactgcattctggggcatcgtgagatttttttgtgtgtgtggtggggtggggtggagacccatatttttcttaccagggagagagctgcctgttttcccataagagcatgtgtgattgatcaaccctcctccttttttttttttttttttttttttttggagacagagtctcactctgtcgccaggctggagtgcagtgtggtgcgatctcaggtcactgcaacctccgcctcctgggttcaagctattctcctgccttagcctcctgagtagctgggactacaggcgcgcaccaccacaccagctaattttcgttattttaagtagagatgggggtttcaccatgttggccaggatggtctccatctcctgacctcgtgatctgcccgcctcggcctcccaaagtgccagggttacaggcattagccaccgtgcccagcccaacccttgtcttaatgtatgtgtgttatcattactataggttgaggtactttgatgctgtaaaactgaaatgactagaattgcacaagatcactcccccaggaggtggcatagaggtgcttggggcagagagggcagtgggtaacctgaggcaggccatgcttgaacattcactgggctcagaatgtgtcaattatctctgcccgacaaacgagtgttcagtcagagtattctctcagtgaataacagaaattaagggcaagtccaggggaagaggcagaggttgggggcttggaacgttgaaggatggtaagggtctaatcctctgatgccttatgggagagcagacatgagatagcctcccccaaaatggctttttgtttgtggcctttggttcatctttgaaaatagggtaggatatttgtcaaaaacataggcacggtgattgcattaaacaaaatggggacacattgttggacaagtaggtgtacacttattaggaaaatgaatcagaatgattgaaattaagacgctctggaaagtatgcgtgtaaaggttgccatctaagtaggggaaactgagacttgacatttacctagtgaaatgcttcatgtgattagacaatctgttggtctcacaggtgtacagaaaaggcaaaggatgttatctgtaagacatgaaaaggaaagcctaaatccagtagatgaattctggggctaatagagaagcaccttccttccccaagaaaccagaaagtgtgggaaaagcagctgaaagttgcctgaacccaggagggcagctatagagagaggatgcttctcagacatgccagacacagagcagatacacaggctggaggctctgaggggttcactcagcatccatagcagtctaggcttagaaaaaaaattgtaatctgggttcctggaaagcagaacaatggtagatttgagttacattaaaaacaatatgttctccataatgcactttatttccatgattttatattttttgcttccactttctagtaaacatcttaaaaaataactttgtctttatttctgctgagaaaatgagagcaggtgcaaaagaggaagactttgagtgtctcttctcaaagagcaagaacactattgccaaatggagctgagcacccccagaggccaaccaactactatgatggcagctacagcagggaatggttgggctgttggtgtgggggtcactggtgcagttgtagagctgaggatagttttgattgctgctttattcccacttcctaggttattcctgtgaaccactgtcctttatacctgaaatcttgtgaccttgtgagtaaagctagcctttgctgtgtactcccagctcctctctaacgcactgcagaagaatttgtaggaaaataaaactagaatttgggaatctggcctatgtagtttcatctgcccatgtgtcctttttagctacttctgcttatcaagagaaaaaatatgcctttttaaaatgataactatttttttcttaaaaaaggatactaaaccatgttataaaaattttagaaaagaaaaaagatactcattatctcattgccttaacatcaatt

SEQ ID NO: 587944 - DNA, 4001 bp, Homo sapiens
acaggacatccataagaagagatttttctttctccttaaaaacgcagcatgaagtaccctgccatttcgtggttttaaaaatgcgtaacagtaatattttcacaatgttttccaacttataaagtgcttttccaaccattttctcatttgatctttacacaccagactgtacatagagagcacaccaatgaatgtccctattttcagatgaggaaacaggctaaatggggtagagatgcttaggcaattctgcacaccatgccagaagtagaacgaaattcaaatccagtgctttgcagggtcaccaccaccctgccttatgaaaatggattcctaggaggagcgttttgcaaaaattccactgcttcctccaacctctgccactgaaagggactctttggcttaggtaacaaacaccctttcgaaacatgacctactgttccttccaccggcttaccaggaagggtcacggccaaaataaacacctctgggaggccggcacatggcataaattgaagggtaaacctcagcaatggggaacttcggagggccctcaggcatccactctacccgggggccgccagccgcacgcagcctcggattcgccctgcacatctgccgcccagcaggtaccatgcgccagccactccgccgggcacaccgcagaccctgagctaaggcagggtcactgacacgcgggagtcctcttttcccagtcgcggatgcatcaaattcctttcattcacatcacacacacaggatatcaactgaaagctacaccccacagtcccagtttcaggaggtgggattaaccctccaatcatgtcattctccaaaatctattcctccagtaccacctccccatctcctggatctcaactcctaagcaatgcctcctgccttctccagaccccaccaccacctccttccacctttccccagactctaaatgtcacccctccagctctcatcccgccgcttctcgccccgcagtgcccgccttccccgccctccagtgcccgcactgccccgcgctccttaccttgctctcgcggaggggccccatcgcgccgctgcccgccggctcctcgcgccgccgctgccgccgtccaggaggaggcacctgcgagcacggagcgaggagactgcgctgagccggcgcgggctgcgggcggcggctcttggtgaggctccaacgcgccgccgccgccactgccgccgattgctctgggctccgagggcacgcccgaccccgccccggccggacacgtggtgccgcactcgctagaggcagctcctggggcgcctcccacgccctccctcacctgcggccttcggggcaactcgaccgcgcctgggcgcgccccacccgcccgatttccccacggcactccgcgcccccccagccagagccggtgtccctccctctccaaggagctcggcccggtgtaggcaggctgcggctagcggcatctccagcccaggggtgaccccaccctcttttttttttgcacttgatctcaggtttgaagtgggtggcgttggatggagtgactgagaaaagctgcgacatcacagagagacaaaatagagaaagttttcccctggccacccctccttggcctccaggtcttaagtcagcctacagctccccacaactgcctcgcccgagagctgcagagatccctctcgtaccggagcccagccaagccagtgcgtcaggaccgacacagcctctgggttccgggatctgaaaggctgcgatggattctacttggaaggggttgcatcagaaaggccttcagtggtcagcgcagctccctccggcttggagaagccaggctgctatgtagccagagaacagtcttttccccagcgctgccctgcagctgcccggctccaggaagtagctccagcacactgctaagggaagagcactggaattgaactcagaaaaacgagttcaagccagcactccaatcggtcccttcagcctgagtgcctttatgcctaaagtttttgttgttgtttcgttttttgtttttttttttttccgttgctgttgaaacggcatctcgttctgtggcccaggctgtagtacagtggcgcgatcagggctcactgcaacctctaactcctgggatcaagggatcatcccgtccaggcctctcaaagtgctcgaattacatgcggatgccattgcatgcgtggcctacgcctacggttcttgacccttctgaacttcaaatttacccttgttaaattgagggataataatagtgatacctacctctaggatagctgtgagggttaggtgaggaaaacaaacagctctatccagctgattgaacagaactttccaaagggcagctaagtcaggtccagatgatccagtcaatatttgttgatgccttttacatgacaggcagaaaaagcatttgtgatgcacacaaatttgtttaagaaagctcgaaaatctgtccaactggggacttagaatagggtacatcagctgggccaagggccttgatttattacaattgctacccttaaatcttatctggtggtggaattcaccatgtataatgacttatataccctttattcagaattggagaatattccaagcagtgcgacactctgatccttatgcaccagtgtcctacataggaggactgtgctcctcgaaaactgagggtcattgtcccctttcatccatcctccaaacagcatttctgagtcctcaactctcaagcctaagaatatatgttgtgagtctagagagagcctgaagccagaggattagtggaatcaatttcccttcttcctataactccaaaagagagcttcctccataaatcttcatgccttttcaatctacttagctctctcaagcagtgaggttggtaattttaagattctttatttgggaagaagaggtgattaattcatactttctacacccacagctgtttcaaatatggacctcaggaaagtgatggtccaggatgattcatacaacttattattcctaaaattatgagcctgggatcatatactgtgagataagaacaaacttttaaagttaatggatgcttctgagttccctacttagaattgagaattgacactggggacctaatagcagaaacaccctccactgagttagccaagtcagaacctcagtgtcatcgtggacttttttctctcattcacctgacccacacatagcataaaccaccaagtgatctctatgccacccaagtaataacggtcttgaatctgattacttctgtccactatttgtctccattatcttcgtgtagagtgtaaaccacagtcaccctagattattgcaatagtggtctaactcaaggtctcttgctttcagccttgcctcttattcctttctctccgatcagtgtctccatttttccacaagcctttatgaaaagctaaatcaagtcatgcttctccgtgaaaactcattaatgatttcctgattgtcctccaggtaatactgaaactccttaatgtggcacacaaggctttcctgatctggccgccttgtttacctctccgatctcatttcttgccactcctctcttttgtagatactccctcccctccctaacctgtccctttggtccctgccactcttcccttacatacaaatggatactgctcaaactgtagcactttcagttctcggaggtggaggttttgtattctctttttcgtcgagactgctgcacctgcctctgtttagaacatttcttgcactacatccacctatcctcctcaactcttaaagatacattgtttcattttagacagcttcttccaggaaacctcccctgatgattccaggacacttatttttacccccaagagagctgttatgatctcctcagaattccccatttacttgtttgttttcaccaaagcttgtaggcagtgcctagtacaattcctgttatacagttgacactcaatacata

SEQ ID NO: 587945 - DNA, 4001 bp, Homo sapiens
gaggctggggacactttgtgctgttgttggggcatatggggccgaagaatcaaccggggaattcggcttcgagaaatctccttgtcatgatgctgcactctgtgctccttctcaaaattggacatcaaaaaagaaaacaaaaggaaacgcgtttccctctcttaactcctgtcggttccttcaaggatcaatttctaagaaatcacatttctgagtattgagtcttcacagagtagtccttcttatctcagttgctgaaatgagcttcaaaactcttccaatgagttaacctttctaatctactgaatagcacatgtctgtgtggcacacacacacacacacacacacacatatacacacctccactcactagctggaaggccatcctacttccctatgctggtcctgactcaccttcccaccctgacttctatcacattcaagcttctgcctcccaaaggctctttattaacaccacactctggcttacttgatagccttcagacttccattttgctttccctaaattagctgtgacagtctgacttgttttcttgtctcctcacaaagttgaaccctatacctggaacagttatttcctgatagctcacacacaattatctttaaaatccctcctcttctggacaggatcttaattattcgttaatatcctggtacacaaggcttgttgccaacagaaaagcaaacacaaatccgatactcgggaagatggctccaccttttacatcatctttaatttttgttttccttacaggacatccataagaagagatttttctttctccttaaaaacgcagcatgaagtaccctgccatttcgtggttttaaaaatgcgtaacagtaatattttcacaatgttttccaacttataaagtgcttttccaaccattttctcatttgatctttacacaccagactgtacatagagagcacaccaatgaatgtccctattttcagatgaggaaacaggctaaatggggtagagatgcttaggcaattctgcacaccatgccagaagtagaacgaaattcaaatccagtgctttgcagggtcaccaccaccctgccttatgaaaatggattcctaggaggagcgttttgcaaaaattccactgcttcctccaacctctgccactgaaagggactctttggcttaggtaacaaacaccctttcgaaacatgacctactgttccttccaccggcttaccaggaagggtcacggccaaaataaacacctctgggaggccggcacatggcataaattgaagggtaaacctcagcaatggggaacttcggagggccctcaggcatccactctacccgggggccgccagccgcacgcagcctcggattcgccctgcacatctgccgcccagcaggtaccatgcgccagccactccgccgggcacaccgcagaccctgagctaaggcagggtcactgacacgcgggagtcctcttttcccagtcgcggatgcatcaaattcctttcattcacatcacacacacaggatatcaactgaaagctacaccccacagtcccagtttcaggaggtgggattaaccctccaatcatgtcattctccaaaatctattcctccagtaccacctccccatctcctggatctcaactcctaagcaatgcctcctgccttctccagaccccaccaccacctccttccacctttccccagactctaaatgtcacccctccagctctcatcccgccgcttctcgccccgcagtgcccgccttccccgccctccagtgcccgcactgccccgcgctccttaccttgctctcgcggaggggccccatcgcgccgctgcccgccggctcctcgcgccgccgctgccgccgtccaggaggaggcacctgcgagcacggagcgaggagactgcgctgagccggcgcgggctgcgggcggcggctcttggtgaggctccaacgcgccgccgccgccactgccgccgattgctctgggctccgagggcacgcccgaccccgccccggccggacacgtggtgccgcactcgctagaggcagctcctggggcgcctcccacgccctccctcacctgcggccttcggggcaactcgaccgcgcctgggcgcgccccacccgcccgatttccccacggcactccgcgcccccccagccagagccggtgtccctccctctccaaggagctcggcccggtgtaggcaggctgcggctagcggcatctccagcccaggggtgaccccaccctcttttttttttgcacttgatctcaggtttgaagtgggtggcgttggatggagtgactgagaaaagctgcgacatcacagagagacaaaatagagaaagttttcccctggccacccctccttggcctccaggtcttaagtcagcctacagctccccacaactgcctcgcccgagagctgcagagatccctctcgtaccggagcccagccaagccagtgcgtcaggaccgacacagcctctgggttccgggatctgaaaggctgcgatggattctacttggaaggggttgcatcagaaaggccttcagtggtcagcgcagctccctccggcttggagaagccaggctgctatgtagccagagaacagtcttttccccagcgctgccctgcagctgcccggctccaggaagtagctccagcacactgctaagggaagagcactggaattgaactcagaaaaacgagttcaagccagcactccaatcggtcccttcagcctgagtgcctttatgcctaaagtttttgttgttgtttcgttttttgtttttttttttttccgttgctgttgaaacggcatctcgttctgtggcccaggctgtagtacagtggcgcgatcagggctcactgcaacctctaactcctgggatcaagggatcatcccgtccaggcctctcaaagtgctcgaattacatgcggatgccattgcatgcgtggcctacgcctacggttcttgacccttctgaacttcaaatttacccttgttaaattgagggataataatagtgatacctacctctaggatagctgtgagggttaggtgaggaaaacaaacagctctatccagctgattgaacagaactttccaaagggcagctaagtcaggtccagatgatccagtcaatatttgttgatgccttttacatgacaggcagaaaaagcatttgtgatgcacacaaatttgtttaagaaagctcgaaaatctgtccaactggggacttagaatagggtacatcagctgggccaagggccttgatttattacaattgctacccttaaatcttatctggtggtggaattcaccatgtataatgacttatataccctttattcagaattggagaatattccaagcagtgcgacactctgatccttatgcaccagtgtcctacataggaggactgtgctcctcgaaaactgagggtcattgtcccctttcatccatcctccaaacagcatttctgagtcctcaactctcaagcctaagaatatatgttgtgagtctagagagagcctgaagccagaggattagtggaatcaatttcccttcttcctataactccaaaagagagcttcctccataaatcttcatgccttttcaatctacttagctctctcaagcagtgaggttggtaattttaagattctttatttgggaagaagaggtgattaattcatactttctacacccacagctgtttcaaatatggacctcaggaaagtgatggtccaggatgattcatacaacttattattcctaaaattatgagcctgggatcatatactgtgagataagaacaaacttttaaagttaatggatgcttctgagttccctacttagaattgagaattgacactggggacctaatagcagaaacaccctccactgagttagccaagtcagaacctcagtgtcatcgtggacttttttctctcattcacctgacccacacata

SEQ ID NO: 587946 - DNA, 4001 bp, Homo sapiens
tgggaataaaaagctctgtcaaatgataatggtggcaccttcaggaactatcaagagatttgtgcccttaccaaacatgctcacaactttaaggaaactttcttaatcacgtgcccaaacagacatccatagttccttgtattaagaaccatcatttattaagcacttctgtaagccaggtaccgtgtaaggtgaacatttaggtactggtctcattcaacttcacagccactctacaaggcaagtattataatctcattttatggatgtaacaactaaggcttaaggaggttaagcaacttgctgaaggtcacacagtatgtaagtggtgaaagggccagggattccagcccttcaggcttgacagatcacaaagcctgggctcttccctactaaaccataaggccaggccagccttaggctataactctccttgatcttgacctcatttattaggaattgctttatctttggggaattttataattagaggtacacaggcttctagaagttgctagtataaaattcaatccaatattttttctacatttaacaaaggaatgcatctttaaaaacagtcatagaatggcagtaattaaaagatcaggaatggacagatgctggagaggatgtggagaaataggaacgtttttacactgttggtgggagtgtaaattagttcaaccattgtggaagacagtgtggcgattcctcaaggatctagaaccagaaataccatttgacctagcaatcccattactgggtatgtatccaaagaattataaatcattccactataaagacacatggacacgtatgtttattgcagcactgttcacaatagcaaagacttggaaccaacccaaatgcccatcaatgatagactggataaagaaaatgtggcacatatacaccaaggaatactatgcagccacagaaaaggatgaattcatgtcctttgcagggacatggatgaagctggaaaccatcattctcagcaaactaaacagaggaacagaaaaccaaataccgcatgttctcactcataagtggaagttgaacacatggacacagggaggggaacatcacataccagggcctgtcagggggtgggggctaggagagggatagcattaggagaaatacctaatgtagatgatgggttgatgggtgcagcaaaccaccatggcatgtgtatacttatgtaacaaacctgcatgttctgcacgtgtatcccagaaattaaagtataataaaacaaaggaaaaaagtcatagaaacaagaagttagattttacattcgaaattataagctagaataacatatgaaaattcaggtgtgagattccaataaactgaactatatgaaactgctgtgtttgtaggtcacaacagccagaaatgtaccaccttctacaattcatcctaatagtagaagtgtagttctaggctataagggacccagtatgggcccattcacaatgcacctgcagtgcacacgcttcacgcctctggtggcctcccgagggtactgtacctgagcagaagctgttgctgctaacggtcctcgctgagcgcccagagctgctggggttgaactctctgctctcttcctcagagaaaggagactcagaggctggggacactttgtgctgttgttggggcatatggggccgaagaatcaaccggggaattcggcttcgagaaatctccttgtcatgatgctgcactctgtgctccttctcaaaattggacatcaaaaaagaaaacaaaaggaaacgcgtttccctctcttaactcctgtcggttccttcaaggatcaatttctaagaaatcacatttctgagtattgagtcttcacagagtagtccttcttatctcagttgctgaaatgagcttcaaaactcttccaatgagttaacctttctaatctactgaatagcacatgtctgtgtggcacacacacacacacacacacacacatatacacacctccactcactagctggaaggccatcctacttccctatgctggtcctgactcaccttcccaccctgacttctatcacattcaagcttctgcctcccaaaggctctttattaacaccacactctggcttacttgatagccttcagacttccattttgctttccctaaattagctgtgacagtctgacttgttttcttgtctcctcacaaagttgaaccctatacctggaacagttatttcctgatagctcacacacaattatctttaaaatccctcctcttctggacaggatcttaattattcgttaatatcctggtacacaaggcttgttgccaacagaaaagcaaacacaaatccgatactcgggaagatggctccaccttttacatcatctttaatttttgttttccttacaggacatccataagaagagatttttctttctccttaaaaacgcagcatgaagtaccctgccatttcgtggttttaaaaatgcgtaacagtaatattttcacaatgttttccaacttataaagtgcttttccaaccattttctcatttgatctttacacaccagactgtacatagagagcacaccaatgaatgtccctattttcagatgaggaaacaggctaaatggggtagagatgcttaggcaattctgcacaccatgccagaagtagaacgaaattcaaatccagtgctttgcagggtcaccaccaccctgccttatgaaaatggattcctaggaggagcgttttgcaaaaattccactgcttcctccaacctctgccactgaaagggactctttggcttaggtaacaaacaccctttcgaaacatgacctactgttccttccaccggcttaccaggaagggtcacggccaaaataaacacctctgggaggccggcacatggcataaattgaagggtaaacctcagcaatggggaacttcggagggccctcaggcatccactctacccgggggccgccagccgcacgcagcctcggattcgccctgcacatctgccgcccagcaggtaccatgcgccagccactccgccgggcacaccgcagaccctgagctaaggcagggtcactgacacgcgggagtcctcttttcccagtcgcggatgcatcaaattcctttcattcacatcacacacacaggatatcaactgaaagctacaccccacagtcccagtttcaggaggtgggattaaccctccaatcatgtcattctccaaaatctattcctccagtaccacctccccatctcctggatctcaactcctaagcaatgcctcctgccttctccagaccccaccaccacctccttccacctttccccagactctaaatgtcacccctccagctctcatcccgccgcttctcgccccgcagtgcccgccttccccgccctccagtgcccgcactgccccgcgctccttaccttgctctcgcggaggggccccatcgcgccgctgcccgccggctcctcgcgccgccgctgccgccgtccaggaggaggcacctgcgagcacggagcgaggagactgcgctgagccggcgcgggctgcgggcggcggctcttggtgaggctccaacgcgccgccgccgccactgccgccgattgctctgggctccgagggcacgcccgaccccgccccggccggacacgtggtgccgcactcgctagaggcagctcctggggcgcctcccacgccctccctcacctgcggccttcggggcaactcgaccgcgcctgggcgcgccccacccgcccgatttccccacggcactccgcgcccccccagccagagccggtgtccctccctctccaaggagctcggcccggtgtaggcaggctgcggctagcggcatctccagcccaggggtgaccccaccctcttttttttttgcacttgatctcaggtttgaagtgggtggcgttggatggagtgactgagaaaagctgcgacatcacagagagacaaaatagagaaagt

SEQ ID NO: 587947 - DNA, 4001 bp, Homo sapiens
aaattaagtcaagtcttacctgtaatttttgtctccagccacaccccagtagaaagcaacttagcctgaggaatttgtgaagtcaaatataaacatgatcttcctacttcattactatacatatttttttaggggctgaggagaaaggcctagtaggaatgtttgataatgataatcttatactgcaaatgcacaaactctactcagaggagaaagcctcgatcaccacacccctaaaaatacataagccaggaggtttcaaacagctctttcttagtcaaactctcttaaatggtcctaaatttacacttttttccttccttcattgatatttttcaaaacttttgaaacaaaacaggcaggaaaaatgcaagtttttctttaccttggcttttggccccaggtcctgccaatccgagtgatggatcacaggactccttgaaaggtgatcggatcggggtttcagcttcaggagtctcaaaattaccttcagaatccgagctgccaaggaggaaaaatgaggaattaccactttcaacggtatttccgacaccctttgaaatctacatattcacagaggctaaaagtccagcacttttgtctaacttcacaaccaaccggtcctcagcagggtctgacctgcgggaggcaactgcggtctctgagcagtgccctccttgggtttctcaggctggcatcctgtctctctgaaagctcctccattccctggagcttttctccagcaccatttattttcgaggtcatccttccctcagacacctgaaaaatgcgcttttccaacagactccttttgtcacaagagccctttcccagaggctttaacaattaatactggtcccacccccgagttaggccgatgctaggcattcctctttgctcggtaggcctctacctgctggaactccctgggcccgaggctaagaatggtgtcacctgccttccgcaatcacgcggatgacagcccggcagagaccaccatttcccagcagctgccaggggcctgtcatcacgcgaccttcttcaccgcggctgcgttttgggtacacggtagggccccgggaagggccggggagcgacttcttccccacgggggggccctaagttgcactgggttagatcagtgacgttgctccagtgtggaggggcgggggctgggggtcgaagcttagagaaagtgaccgaggccagcggggatgcggagagactgcagattctgggttgggtgcggaactctcctagcgaaacgggggccagaaaccccacgggaggacagaagatcctgaactttcggacgcacacggggacccggctccgggcagggacgcggcacggccgtgaggacggtttcgcgggtggcgaccacacacacgcacacagagggagtcgcagatggatggaggcaagcgcgtctgcatctcagcggggacgccgtgtacttgcctgaaactcaaggatttggtctcggcttgcgaatcctcctcctcggggtcgccctcgggcccgccagcctcgtcctcgccggcggccccgccgcgtaccgcagaccacgtccatttcgcccactgcacgggggacaggatctgccacgggctgaacgccatgagcgcggctcctccggctccagctcctaggggcaggggaatgggtggggagagcctttttccctttcaaaatggagggaaccggtgacaggcgccagcaagcgtttccagcagaggcgcggatgtggttaaacgagtgccgtcgggggccctggtggagcgcttcctcccgccggcagccggcgctgcgtcctcctcggcctcctcccctcacggtgcggccgcagcgggccccgcgccgggctccactagccgggaagacgcccgtcctgtggcctcctcaggcccccggcccgcggcgcccggctgctagacctctgctgctcccgctcccggctcgcggactcccgcctcccggccggcggggcgcgcatcagctgccgccggagccgcgccccagaagccgccccctcggaccgtactactcgcgcgcgcgcgcgggggcggcggcggcgccggggctttgaagacggccgcgcgcccgccggatccccctaccgcggcgtcacgctggtcgcggcccgactgagggccggggcttgccggctgcgcggggagattcggtcataccccacaggtccgccggcgtccggggcagaggaggaccgttttctgagccggggcacgctgtcctcttcctctttccttattcctttttaaaatttttttaaacattttcatcttgccactgtgacttcacggcgatggtgatattggactgcacacaagccccttgttaccaaaaaaaaaaaaatacaaaccttcgcggccgctgtggactgttgttttcccctccctaaccctggcagcgtgggggatttcagcctgttcatctccatccctggcattcccgggatttgaaaatcccttggcaaagccacaagagtgaccgaggactggaatttaagatgccctccccctccccaaaccgcactcggggaggcttcccaagtgcccaggtcttgtcttaggtaaagggtactaaattccctgtgagattacagcctgatgggtttcccattctccatatttatttatttaaaatacagacaggcgtctcgatatgttgcccaggctggtcttgaactcttggccacaagcgatcctcccgcctctgcctcccaaaatgctaggattccaggcctgacaccgcgcctgaccccattctcctttttgagattttcttttcgtaacttctaagtctttgatttctgacttatttcgctgcttcagtaacaagccaagaggcctggcgacatctttaggtttgaaggcaatgggaaatagctgatgttctccatttcccatggagggatttcatgtagggattgttcctctcaaaaccaccaaagcaccttcttccaagtgaatcgattgcctcaaacaccaggcttaatgatctccttgcctggataaggtgttccaggtggtactgtaatttccgagttgtggtgcatccatgaggtgcctgcaggttcccacagagacagcagctccaaaatgtgcacgttgaaacttgcaagagactaaccgttgcctctgaaagcagttggcatgtatattcatcgtgactgttttacacatttgataacaaaaacaggagcaaaatacaagataaggcttggcagggtagttttaccaaaaccgaagggcaggagttaacctgaagtctagagaaaagaaaggggtggggtgtcaggatgctttcgaattcatcctggcttcttcccagaaataaattgtcatgagtgttctagcgactataaagaagtgaactaggcaggaggtccatgtgaaatatatcacaccacttatccaactgttgtagttttaggtttatgcttacccagtaaaacttcaggttctacagtcccccaggctcctggatttgacacagggttctgtttctgggaaataatattaccccagcaaatcagtaactagcatacactaggacctgttcttcctcctgaatagttctcttatcttttcattcctttgcatccctgtggtgactgacatagttcccgcactccccatctttcatgatctactgtaaataactcccacctggttttacctctgaaggttttcttgcctgaggtcacccctgcctggctgatcagtgactcgtgctctaatctttcggttcccattcccctctatgcccatccttttgtattcctagccacagtgagtagagaactcgttgtcaatctttaatatgcccaagaatcatccgccagccttcttaaaaaaatccaaattgccagcagagtctggaaatctgtgtgttcactaagtgtcctggggaactgttatcacagggtaaatttgggaaacagtgcctagcttgaaccaactgcttactgcttcggg

SEQ ID NO: 587948 - DNA, 4001 bp, Homo sapiens
gtaagagcctagacaggggcaagctagaaatccctccgtcaatcaactttgttccataagcagtcattttcagtctaggcaaagcactgcttgctgcaggtcagcagttctgcaaattgtttcaaaagcatgcttttaactgggaacctcgacataaaagtcaggtaaggatggagctactttgttggaagtgggaagaggaggtccctggtgcccccaggctccacgctgaactccacaaaggggacctgcatcccttccaaggagcaaggatgtccttagatcataagatgttttcttttctttttcttttcttttttgagacagtcttgctcggttgcccagactaaagtgcagtggcgtgatctcagctcactataacctccacctcccgggttcaagtaattctcctgcctcagcctcctgagtagctgggattacaggtacctgccaccacgcccagctaatttttatatttttagtagagatagggttccaccatattggccaggctagtctcgaactcctgacctcaagtgatctgcccgcctcggccttccaaagtgctgggattacaggtgtgagccaccgcgcccggccacacaagacgttttttaagttcaaaagccattttctaagagaaacaaatgtatacaataaatgtgaacccagctgagtactccttatgcagaagccatgctgagttctctgagcaggtccagtgtcagcacatgtattgccaaggctggccttccagagaccgactgccgggtgtccctcacgaagccaaggactacacgcaggctcctgggtagaccagttagctctgccccagacagaaacgtttaagacagcacctgagttctgtccataaacgcagggcactgatgctcaagggccctgaccagggtctgtgccacatccctgcacccggagaaacaactcaaggtagttgtccctatggcagtgggcagaaggaagggacggagagagcatctgggccagaagaatacatggcccaggtcccggaaaacagccgcgccccgttcaccgtggtgagaatgcttttcccagccctgtccccttctcacttctccccgaatctattcccagatgaaggtatttatgactgctcctgggcatttcaggggcggaaagaaaaaagaagagaagagagaagcaaagggaaaagaaaagaaaaggaaagagaaaagaaaataaagaaaagagcaaaatcagggattcacaatatttacttcctagaattctgccatttaatacctcccacaccaaacaaaatacgtggttccagagacccaagaattaaagttcaacttggaaagagagagggaaaaggaatgcctgaacttattccagattcgaggccagtccacccaccacccggcgcatacccaagcgagggaaacacctcagccccaggcttaaaggacagcacctcgttttgctcaataagtgtgaagtggcctcaggaacgtgcagtcccccgtttcctacctcttcggcgagggtccccagagtcggtccccagggtcgctcccctctcccttctgcgccacctgctaccgctgatttcgcatctctcctggggaagccacggggcgatcagggaggagttccgaggaaggaaggggagggcatggtctcccaaccaagcacttggttccagggaaaaggatgttttgtaactttcagcttgaatttccagaggcagaacaggaaatgtccacggggctggagctcaagtgcgaagtcagctgggtctccggctcctttccgaggggcgcctcctacgtgctcccaacgctggccctgtctggaatttaaagctccgtctgaattctggtgccttttcacctcttactccttcctctagcacttctttttttttttttttttttcttaatggaacgtcagcttcgttcctgacatgctggaaaaagtttcttttgcttcaacttggctcagaaacatcctgtccttgtgagagtatttctcctattacaaagttcagtttaaaaaagagagctgttttgccaacttttgtactgagaacatttttgacggattttttccccctgatcgcttggattccaagaaacatacacacccacatccctctgttttttgtttttttttttttccttctaattaaaaaatagtaataatagctggttggactgggcatagtggtttgtgcccataatccccgcactttggaaggctgaggcaggagaattgcttgagctcaggaggttgagaccagcctgggcaacatagtgagaccctgtctctacacaaaatttaaaaactagcctggcacagtagcttgtgtctgtagtcccaaatacttgagcccaggagttggaggttgcagtgagctatgattgagccacggcaatccagcctgggcaacagagtgagatcctgtctctaatgataataatagtaataataacaatagctggtgaaagattgcagtgcaggccgggtgctgtggctcactcctgtaatcccagcactttgggaggccaaggtgggcagatcacctgaagtcaggagttcaaaaccagcctggccaacatggcgaaaccccatctctattaaaaatacaaaaattagccaggtgtggtggtggacatctgtaatcccagctactcgggaggctgaggcacaagaatctcttgaaccctagaggcggaggttgcagtgaaccttgatcacgccactgcactccagcctgggcgacagagcaaaactccctctcaaaaaaaaaagaaaagaaaaatcgcaatgcaggtgttcttgttcttaaactgtgggcggtagggtgctgcctcactcagccttgtctgtgtgatcgtgttccccacagcacagtgtgcatcctgtgtggtaaagaggagtaacaggtaatgattcaggtcttcaaggctctctcttagttctaggtctttctataatggtcacacaagaattggctacttttttcaaatggggtcccatttcaaattacaaactccatctcctctgctccctgcccccaccccgcaccccagggataggcctgaaagacccctggttgtgatttgtggaggtgattgggtggaagtacacagggctgagaggctgatcataagattcagttgttggtaactgcccagggagtagcatgtctgtgaattgtcaaatgctaccacaaattgggaacctttagggtactcgttgacccctgcaacaaaactcagtagttttcatagtgttaattgggaatttgttcacaaacaggaaatgagaacatctcctctgttctatgcattaaaagaagccatgttggccaggttggtttcgaactcctgacctcaggtgatctgcccaccttggcctcccaaagtgctgggattacaggcatgagccacagcacctggcctgcactgcaatcttttaccagctattgttattattactattattatcattacttgcacattcatagtgcgagtaagattgtaagaaaaaatagtttgttaggccaggtgcagtggttcatgtctgtaatcccagcactttcagaggccaaggcaggaggatcacttgagttcaggagttcaggacaagcctgagcaacctagggaagccctgtctctacaaaaataaaataaaataaattagccagtgtggtggtgcctgtacctgcagctacttggcaggctgaggcaggaggatcacttgaggctgggagatcgaggctgcaatgagccatgattgtaccatggcactctagcctgggcagcagagcaagaccccatctcaaaaaaaaagaaagaaagaaagaaagaaaagaaaaaaaatttgccaattcatcaggttagaaagtttcaaatgttttaggagtatccttcatttacaaaaattatactgtacacataagagactaaagctagcaatttctagattgttgagttgatgtactgattacacat

SEQ ID NO: 587949 - DNA, 4001 bp, Homo sapiens
gtggttcatgcctgtaatcccagcattttgggaggcagaggcaggtgaatcacttgaggtcaggagttcgagaccagcctggccaacatggagaaaactctgactccattaaaaatacacaaataagctgggcgtggtcatgcacacctgtaattcaagctacttgggaggctgaggtaggacaactgcttgaacccaggaggtggaggttgcagtgagccaagatcacagcactgcactccagcctcagtgacagagcgagactctgtctccaaaaacaaacaaacaaacaaaaaacttgaatgttcaagctttttcctaaaattgattatatcagcaatccatacatctaaattgtgtcgggaggcagggggaggtagagggtttctagatctcaaatactctatctaaaacttcattacaaagcaacatcacctaaaccaagtcagtcaagaagcaaaaatggcctcttagaagccaagtcagtgagtgtattaatcttaatttttttcatagaagaaatgtcgctatgggcttatacttgtttcatgcacaattataaaatgcttggctatacaggctttcatattatacaccagataaagaggaataaaattttaattaggaaattgaaaaaaaaggaaagggagaatttgggaggcaataggtattaatagaaggaccatggaacttgtaatcatacagaccctaattttaattcttacctattcttgaaacacaattatctggaagactacaaactttctaagtactgtgaggggtggattgttactctttatagtggacttgttactatttataattgttgagaataaacttaccacaacagattttctctggaaatttatgttgttgatgcagacgacctgatgggttgtatattaataaatataaaaagaaaataaggaaaaaataatttttattattaaatcaaagtataattctatccaagtataaattaggactatgttctaagtaattcaaaattacatgtcaatatttcattttaaaactacgaattggggcctggtgcggtggctcacgcctgtaatcccagcactttgggaggccacggcaagcggatcacgaggtcaagagttcgagaccagcctggccaacagagtgaaaccgagtctctactaaaaatacaaaagttagccgggcatcgtggcacacgcctgtaatcccggctactcaggaggctgagccaggagaaaagcttgaacccggcaggtggaggctgcagtgagccgagatcgcgccgttgcactccagcctgggcgactgagagactccgtcttaaaaattaaaaaattaaaaaaaaaaaaacactctaccaattgggataattttttaaaatctagcaacagtcacgaaaacagatttgacagaaatacaatctagtacttagacaaaaactttagtaacttgcaacgggaattaaatttgctgaataacctgtcattcaaaacatttttaccttacaaacaccatttccatcacagtgagtaaattctagtttcccactaggtttcccaggcccaccaagtcaatttcaagcaatcgcaaaatataattaatggcaacaaaaccaaaaggaaggaagggaaatgaaaaaatacttataatttatatggccttgggctttcaaagcccttgtctcctttcttcctgttcattctggcgggctctacaccagtcagcggcatgaagcggtcccgcggagcttggcttcccggcttcctagggggatacggggcattactagtctttggcacctcacactctccactcccctgcggtccccaagtcacgtctcgcagctggccggtgcccaggtgagcgacctgacgggtcgctgcccgcctcaacctcgctccttcgactagctcctagaagccgccgtcgacaagcttctgtcacagagatgctcctctccgcaagggctcgaagctaccatccgccgacatcttgtctgtaacctctgacctccgacgtcagcggaagtggaacggcggcgggggtagaaccaggaagtcttgtcaatgggcagggcttgcgatcttcgcatgtgtcttatcgtaaagaattgttaaaatttaggatagggaaaaaactatttaatggatgaagcgagaacagcaggaagaaaaggagggaaggtagttttctagtacaagcatattgagaagaatggaggacaaagtttgcgaagagccaggtataaataggctggggcagggtgctagtaactgggcggggtggggtggtgggaagtctcccgaaatcaggaggtgcgtgcctctggcttgctgtgtgaacagacacactgggtccggtgatttaagctgtaaaatatgtgattagactgcaggtagtctaaatgtcaaaactgcagcactccacagctctcactaggcactgctgccttagtatttattttaaaatatagattacaaggccgggcgcagtggctcactcctgtaatcccaacactttgggaggccgaggcgggccgatcatttgaggtcaggagttcgagaccagcctgaccaacatggtgaaaccccgtctctactaaaaattacacaaaattagctgggcgtggtggtgcacgcctgtaatcccagctacttgggaggctggggcaggagaattgcttgaacctgggagacggaagttgcagcgagctgagatcgttccactgcactccagcctgggcgacagagctgagactgtctcagaaaaaaaaaaaaagaataaaatatagactacaggccaggcgtggtggctcacgcctgtaatcctagcacttagggaaactgaggcagtcatatcacttgaggtcagcagttcaagaccagcctggccaacatggtgaaagcccgtctctagtaaaaatacaaaaattagccctgcgtcgtggcgtgcgcctgtattcccagccactcgggagggtgaggcaccagaatcacctgaactcgggaagccgagtttgcagtgagctgagatcatgccattgcactccagtctgggagacaaagcgagactccctctcaaaataaataaatagactacatagagatatatagactgtgtatatatatcatataatccatataaatgcagaaacatttattgaaagacatttcgaagccatcgtgtttgtatttcatgttcatgacaataaaacttgtaaacttcagtaacagttaaaccttctttaattatggattagccattaacatttttgaaacgtggaccatttaacctcggcctaccccctccaactgtcctggtgatgagttcattagctaagttaaaattaatttgaactttgatctaaaccaaaacaaatcaggaaaataaagctgtaaaggaactttatcaagcattccaaaaccaactagaaattacttgaagttttcgagtgagcattgcctgtgccagtattcttcattataggattataaactcgtttttttcccaaagcgcatgtctacgccaggcagaggagtaattattcagccaatttcatggatgtaaacgatggatataaataattgatagcacctagaggcttccagtttgggtggaaggctaaaagtagaggggaactcactcacttgagaaatgatatttaagtgaataaatagttctcttctatgaaactattactatttagttctctggaaaacttaagtgtattaatgattagaacatcaaatcctaagtaaagaaatgacattttaaatataaaaagccaaactttaaataaatcatagagacctcagacataatataggaaagaattcttttgtccttgtttacactgtgtacatagtacaaatataattttaaagctacatcctataacatttaagaaataacagtagtttcaaaatgcttaagatgaggagaaaaatgccttagaagactaggtttctaaaagtcagaaataaaagtacaagttatttttc

SEQ ID NO: 587950 - DNA, 4001 bp, Homo sapiens
tcttttcttgcttattttatctgatgctaatccctttactaattttcttatcaccttagcactaaagccactcattcatactttcccaaacagtcattgtactacgcccctaggaaaaaaatataaataccataccagtatctgccttaagagtttgatctagtgggaaaggcatactcatatttaattataaataatgtggtataagttttaaggagtgagtaggcagacaggcaacagggtagttggtaggcagaggaatattttggccccaaactgccactctaaaaccttgtcagaggtaacaaacagcatgcacaagtgtttatagagcagcccagggatgggctagaaaagtgggcaggactggaccacagaagggctttgtatggtgtgtaagcatttaggctatcctgaggagcgtaaatgaaagatttgaagcaaaagaaacatttagctgatttgatttttagatacaccaaaatggagtctacatggaggatggatttaagacattaacttgaggcaggaatttggttgtataacataaacacacttttaaaaagttatgtggcctttctttacggagtacttcatggctctttattccatctccctcatcaattatatcaaaggttaggatggaaaggctaagacacggcaatgtcttatttgacaacccctccccaaacccctactccaggctttcccacagcaatttcaaaacctttttcctggcacttaacatattctcccctgcatttgcttttgactgtacagtacataggtcttaggtctccagtctgaaaactgcaccactagattttacagttccacaggacttagcacaacgtctttgaaaaaaaaaaatactgcttaaataactctcagatctaaatgtataatcctaatctcttgattgccagaccacattcccaattgcccagatatctctacctggatgtcctataattatctcaaacttaacctaatccaaatggacctgggtacctctcttcaccgccaaactagtcatgcttccatttcatatttaagtacttttccaaaccctgagtcatctttgttcactctctactaccggccatgaacactcagctgctaaatgctgcacacatctcttccatttctctctcttttccattaccctagtttaagctcttgaaatgcttccctacctctccctatttcccacaaaacctacataatagctatcaggattaccttgctaaagcagaggtgtgatcactgtcatttcccaccttcaggtagctggaaaccccacaaaacgaggatcatgcccatttaaatcccgcagcattctccctctcgttctactgatgccgactggatcattgtacttgccaagtacagtttgtttttctccccattacttgtgttttctagtttctccaccagatggtgatgacagtacaactgggagctttgtgccctgtgttcctaggccagtgccaggcccacttgaggcgctcactaactatgatatgaacgaatgaatgcttgagtgaattggtccccagaagcggtcagcctctccgccaaggcagaggggaagggccgggaggtgcacgtgggatgaatggaaacatagtgattggcctttttggagttttcttcttaaaaaactgaatacattacagatgttgaaaacagcacaaaaatcataactgtacggcttgttaatttttacaaataaatacaccctcgtgaatccagaacctagatcaagaaccagagcattaccagcacccagaaacctccccgcgccctcctccactgagcggccctttcaacccttacaatgccggagggcgcaattcctgggtcctgtgaccttggtgaccgacgcccgggacaagtcagaaagacccaagggcgtggaaaacgctcctcttaccgataaacttgaagcgactcatgactgcgcatggaggacctccccagcggaagcggaagtggccgccggcaactccgcccttccggctggccccgctcagtcacccgcagcaggcgtgcagtttcccggctctccgcgcggccggggaaggtcagcgccgtaatggcgttcttggcgtcgggaccctacctgacccatcagcaaaaggtgttgcggctttataagcgggcgctacgccacctcgagtcgtggtgcgtccagaggtaagggatggggacccaggactcggggaggtgaccctcggggccccatggaggtggagaggcccctgggtacctggaggttcaaggacttcgggaacggaattggaaggtggcctctcgcttcacagaatcctatggtagacccgggttcaaatccaggcttcgccacttatggccgggagaccttgtagagttgcttgtcgggtctgggcgtcagctttttgtttagtaaaacggacgcacgaccagcgcagagggtcgcaggaaaattaagtgaaataaaggaaagtgcctaaaattgtaattgtcatgggtccagcgctcgctcaatcgttttcttcacgatcttctcctttccaatattaacagcaataaactatgcattattttcttcagtctgcaaaactctaggagttaggaattatcttaagcttattttacagataagaagatgagcacagctggtaacttgcgcaaggtgatagagtttctaagtgtctgagccagggttaaaatttaggtctttctccaaagcatcatcattctcccacccctcccattagcttttctctttttagcttcatctagtccttttcattacctttacatctttttcacctcttacataattctctttcgacctctatccgtctgagactagtctgagaacatagtgttaaaatgtgtagattttaatcacctaaattcattgcagggtgggctaacaacccaagatgtgtgagtgcctcgcctccactccagtcttacgactctccaaacgtagttttataagaaggccttctgggaaaaaaactctatggaaaatggagtaggcctggaagaattacagagggtaccctcgaagcccagattgcatatatgtgactattagaaaatcactgacatacttctcttgatttggcaggaagatggccaagtacaatgtgatgggattgttagtttcttccttgagttttccttatttatttattgatttgacagaatttgcaattcagattctatgctctatgctaaatatataaatgttagtaaatccatttttgagcagcagcagctcacggattagtggggaaaatggacatgtaaacaaatcgatgatgaaggaagttgagccatcagggattcaggtatcccaacacaaatggtaaatgtttgaggtgatgaatatccaaattaccctgatttgatcattatacattatatggatgtattaaaatatcacatgtaccccataaataggtacaataattatgtgtcaaaaaaagttaaacatgaaaaaaagaattcaagcaatactgaactatagctgggaatactaaagtccatagttctagaggaaaatgatataaactagctactatgacagttatggctcagcattttttagatctgacattctttctcaatccttgccttaatttcttcctccatttgccctcattgtgctgttctctgtggttccatcctaggcatactgtgttgttgtatgtactcgggcagcctcatttagtgctgtcaccacctgcgctcatttgtctctagagctgtagttcgaattgcttgttagatcacgactgttggctgggcatgatggctcacgcctataatcccagtactttgggaggctgaggtgagtggatcacctgaggccaggagttcaacagcctggcctacatgtgaaaccgcgtctctactaaaaatacaaaaattagccaggcgtggtggtgggtgcctgtaatcccagctactcatgaggctgaggcagaagaaccgcttgaacc

SEQ ID NO: 587951 - DNA, 4001 bp, Homo sapiens
gctatgctttagtggaagaagcaaacaagacatttggataatcaacccatttctttcactttttgaatcttgcacatatatctagatattttgtatcatcaagaaagagaaggcgagtgggctataacttttagaatgtttagagaataccagaggtgggagtggtattcacacaaactcagaatttgaaaatgaaaaacttgaggaatccccactttagagaaaattttttattcaatgtagttgaggcagcggcattgataaagaggcctgacagtaaccaggaaccaaacaagctgctggtaaaacgtctcgcatcgcactttggatatacagagtaggcacttaaaactgatttgtcggccaggcgcggtggcttacgcctgtaatcccagtacttcgggaggccaaggtgggtggatcacgacatcaggagatcaagaccatcctggctaacacggtccgtctctactaaaaatacaaaaaattagccgggagtggtgcgcctgtaatcccagctactcaggaggctgcggcaggagaatcgcttgaacccgggaggcggaggttgcagtgagccgagatcgcgccactgcatccgaccctgggcaacagagcaagactctgtctcaagagaaaaaaaaaattctgatttgtcaagaagcaaccaaaggatcaatagaaaaatcactagaggccgggcgcggtggctcaggcctgtaatccctgcacgttgggagactgagacaggcggatcacctgaggccaggagttcaagaccagcctggccaacatggtgaaaccccgtctctactaaaaatacaaaaattagccgggcgtagtggcgcgcgccagtaatcccagctacttaggaggctgaggcaagagaatcgctttaactcgggaggtggaggatgcagtgagccgaggtcgcgccactgcaccccagcccaggcgacagagcaagactccgtctcaaagaaaagaaaaatcactgctagaacaagaaacacactgaaacaggaactcaagcaatttccgtgaaatcctagggaattaggagcaataagatcactctgcgtgcagaaatcgaaatccaaatggcaccgctttgtagcaaaggcttccagggaaacaagacaggctgagcctcaaacaggacaggtaactgggaacagaatgaaaagcagcgctggccgtactagaagccccccagcaatgcataatgaacgccccagcccctacatacacgccgatatgtaaactccagagaaccggaagtgtgttttgttccatcgccgtccccagcgcttagaggcgtgcttggcacacagtaggagctcaacaaatagttgatgaatgcttgtgcgtctaaacacatccaaggatttaaggatggataaactgcagcctttggaagaggcagaattgtcctgctcttccaccccgcatctcctcctggagttctgctccagctgcaactgttaaatactcactgagcacctactacgtgccagggacactagcgggataccgtgatcataaaagcaggagagtcccggtacacagcaaaagccgcaagttcccaggtctgagaaccaccggcctcctcctgctccgcgctgtcccggaccagacccccgctcccagaactcagaaggggatctctgcggaccctggcgtccggagccatctgttccaccgcaggtcatccaacccagggatgcggggcaaggtcagagccagaacccggaacgctgcctgacgcccggcgtcccctcctcgccggtctccatcccctccacagcccgcgccctcccgccacggcctttacccgtcccgcgtggccggggacggcttgcggtgccatatcttgccgctctccttgttgcctaggtcagtgctctgcatggcgaagcttgcccacgaccgccggcggcccgctgggtaaccgtcccagcgccttcccggcaggcccagcgctcccggcccgggaaatttgagctccggccgcggcggcctaggtccagcaccagcaggccgtaccaaccccctttctaataacaaccaattggaaggctgatccctcccaaaatccgcccaagcggccactccctctctggacaatgtaatcgaccaaagaccttctcttagagtccacctctttctgagctcagtcttcccgcccccggacccaaagccttctgggaatcgtagttttttgcaggtggatcatagacgcgaggaattggcttgggaattccgccctttgggagcctcgtggggttttaggctcccatcagaggcaataaaactcattttctcctgtggtccctgcattccgttctaaattgcttttagggattaaggaattgtatagaaataactaagagaagcaaggaaacaagtgcagagaagcaaggagacaaatacattgagaactgatgggttcctttcatagaacgttcgggctcaaatgaaacttacagatgaaatagttcattcttcctgaccttttcaccatcctcatggttttgtttcgtttcttcagtttcgtaatctgacaggccttccagcattatgatgtccagtccaccaatcatggtccagaaaagcaataatatcaacaactggctgcctcgactttagcgttcctttgataaaaattcacttagtgcctccggagcgcttactaggtatggggcacttttctactataccgaatatatcaactcaattaatcctcgtagcaaatttacaagttaggtagtactaattatctccatttttagtgctctatgaggttgtgcattaatttcctgaggctgccctcacaaattaccacaaacttggtgacataaaaaaacagaaatgtattcttgggaagttcttgaggccatacatcggaaatcaaagtgtctgcagcctcctttcaggctctaagcaagattcccttacttgtctattccagtttctgggagttgctggcgttctctgcttgtgatcgcatcgctccattctccgcttccatcttcacacgtctttctcctcctggatgtatcttttcctcttctgtctgtttcaaatctccctctgtttttctcttataaggaaacttgtcattgggtccatatgaataatacaggaatacaggatgatcttttcatctcaaaatccttaacttgattacatctgcaaagaccctttttccaagtaaggtaacagtcacggattttgggattagtatgttgacatatattttggggggccaccaatcaacctgttacaggtaagtactaatattatccacttttgcagacaaggaaaccttaaatctttccattcctagtctctatgttgttctacaacagaaaaatgatgttaaaaaaattatatggtcgtggtatttgaaaagttcaaactcttgatcagaaaagcaaattctcaaaaaaaatactaatgcaggtttttaaactttatgttgttatcaaggggtggctctgagagatcagacaacttgtaatgacctattgcagaggaagcaactgcagctcttatttttatttattggttttgagatggagataaactacatgtatcaatgtttgcattattatttaggaaacttagaatcttaaatttaagatacagtgcctaacctgaaacagattatttcacaacatttctatcccacaccattaaccaaacaacctttttttatcggaagcaaagatgaatctgctgaatgattttcttaacttctctagcttaacctgtctgcagctaagctagtttgggctgtctcagcccatgtggccatcctattcaatctcagatatgtgataaagaggtttatatgttagatcttctggactcccactttgtacttatcttttgatttagggggcacaatttgaaggtcaggctgaagagatgtgtacccacagctgctaaagttctactcattagatctcccagtttttacaacactaattggtagt

SEQ ID NO: 587952 - DNA, 4001 bp, Homo sapiens
gaaatacgaggcaatgcacctgttaaaggaaaaaggggaacagaggatgtttgaagtcttacgtatttagtgttaacactaattcctgatctagctgtcatgtggaaagcatgctgtccagaagaaaacctgggtcctggcttattccaaactacacagtacttaatttaagtagtagtacttaatctctctcagtgtcttaatctgtaaaatggataccctttatgtactcacagctctgtgtgagtcacaaaagaattttgagcagatgctttttaactccaaagtgctgtacaaatcagagcatcccttttctcttcacattagtttgacatggaatttacttcatagatggaagaaaaattatttcaggtacactgatgatgaaaatgtgccgaacgtggttaaacaaatttaggtgaggacaattatataagtttacctgagaggccaggcgcagtggcctcacgcctgtaatcccagcactttgggaggctgaggtgggcggatcacctgaggtcaggagttcgagaccagcctggttaagatggtgaaaccccgtttctactaaaaatacaaaaaaatagccaggcgtggtggcgcacgtctgtaatcccagctactcgggaggctgaggcaggagaatcacttgaacccgagaggcggaggttgcagtgagccgagatcaagccattgcactccagcttgtgcaacaagagttaaactccgtctcgaaaaaatatgtttagctaagaacagatgagtctgaagcaagggactgaaagtgccacacaaatgggcaagctgtagaaactggtcgtatgaggatttcttacaaaccacaaaagcatatgcttacatgaatattcatcaataacaaaaaaaatgccaccagtattaactgtaaaccacttagaaaatacccaacaatataatttgtccaaatccctctaccagcattccggtgagtgtgcgtgctgtagtcctaactcttctgtacattacgacaggacaaaacccgctttttataaaacgtttagcaactcgccaagaaactggcacactttacctttttaatcgctaagcaaacatgtagcacagttgagataaccaggcggacgttcagccctcttcaaaaataagacacagaagttttacattttaccagcccgatgtctaataccgatcacaagcctctatttgatgctctttctagatgttggccacggatcacggaagactccattctttcaagttctgaggactttctacgcttcaattcctaagctaaattgccaaggttttactagcacgaaagtttaaagtcaacggagagcgtgccctaatccctaaatcgattaggtttattacacggcaccagcgagcagggactggaaatacaagagcgagcgggtcctaacgcaggttgccgcgggacccgacgccccgggcccggacaccctccccggggacgcgggcgcggcgggcccggctcccagacgggaggctgcagggggaggggagggagaaggagggagggggcggccccctcgggccggaccgcggcccggcctccctcccggcccgcgccgctcgccgcgctcaccgcgttcttcttctgcaccatcttgtccatcttcttggcaaagcggaccacttcgtcctccatggctccggcaggtcttctccgcgcccaccccgctggcaaggggaagtgggcgaagctggagcggaagacacagcaggagcgacccccggcgcgcagcaacccccaccaccgcaggcccgggcctaggcccccttccttacgaacgaagcccgcggcggcggcggcggcggcggcggctccggctcctcctccccaggcagcgacaatcgaacaccgcgcgcgacgtgcaggcgctaccaactgactgcagatcgctggtgaggggcgagcccatgttcccgccaggcgggcgtcgggctagtgggcaggcgtggcttccggctagagggtcgtggaaggcgcccggttttgctgcgcgttcacctccggtcccgccccctcacggggcgggttttcggccccctattgcatcgggacatcccggagttttagaactcgcggaggcccaagtatctcgaaacgggggcagattccgagcatggaactttggcaggttttaaagtctgtgggaagccaagcactttctccataggagactgctacggggaaaaatggaacccgtgtcctctaagttaggttacggagttactcgttttaagagttcctttttttttgagacggagcctcgttctgtcgcctggctggagtacagtggcgcgatctccactcactgcaagctcccccccccgggttcaagcgattctcctgctttagtttcccgagtagctgggactacaggcgcccgccaccacgccctgctaattttttgtatttttagtagagacagggtttcaccatgttggccaggatggttttgatctcttgacctagtgatccgcccgcctcggcctcccaaagtgctgcgattacagacctgagccactgcacccggctaagcgttcctttttttaaaaaaaatcggccgggcgcggtggctcatgcctgtaatcccagcactttgggaggccgaggcgggcggatcaactgaggtgaggagttcgagaccagcctgaccaacatggagaaacatcgtcactactaaaaatacaaaattagccgggcgtcatggcctgtgatcccagccactcgggaggctgaggcaggagaatcgtttgaacccgggaggcggaagttgcggtgagccgagactgccattgcattctagcctgggcgacaagagcgaaactccgtctcaaaaaaaataaaaaataaataaaggtgaaatcgttcgtgagctcctggagtactaagaaccagtcttgggcatggcattttgaatagttgaagaacagttgacggaaaccttctggtcagaaattacacaaggcatcccaccagcttctgaggatcagagaggaaggtgacttaagttgtgacagggttcatagtggagaatgcaggctcctccaaaaagtctttccccacttaaacccttcacgaccaactcatgctatttgcaggtataactcccacaccacgtaactatcattcatcaaaatacaccgcctaataatgttctttctatactgagatgacaggtttttcctggttatgactcactcatttgggggagaagtattgggatcgtttccctattttgtttcatttttaaattatctttttattattgatttccagcttaaattgtagtatttgttgagatttattttgtcaatttttttttttttttgacacggagttttgctcttattgaccaggctggagtgcagtggtgccatctcggctggctcactgcaacctccacctcccaggttcaagcgattttcctgcctcagtctcctgagtagctgggactacaggcgcccaccagcacacccggctaattttttgtgtttttagtagagacaaagtttcaccatgttggccaggccgatctcgaactcctggcctcaggtgatccgcccacctcggccttccaaagtgctgggattacaggcgtgagccactgcgcccggcctatctcgtcaatttttatgcatatctatgtgttctaaaaaagaacacacagaaaaaaattgttttctacagaaaatgttgcaatatttacatccctgtttgctgtctgcttcatgcctcaattaatgagtatgtaaaaatttccctttataatgtggatttgtacatttattgtaataattctgtcatttttcttttttcccaaagaatcagttgatgtttttctttaaaatacacataacacaaaatttatccatttaactacttttcttcttttttcatgctaccttgtctaagaccatttttaactatttttttagattttaattcattttattttattttttattttttt

SEQ ID NO: 587953 - DNA, 4001 bp, Homo sapiens
attttccagtgctaaaaaatctaccaaaaaaaccaagataaacattttagaagatttaaacaattaaatatcactttagaacttgatgtataggactgactataacttctggctgtaaactagtgcctattatattacagaattaccatctggcaatgcatacacgtgtattttttgaatggtagttatcaaatttcatatttaagaaaaagaggaacggtcacttaatattaaacagggaccccaaatcatcattggcaagaaacaataaatatccattatagtacgtaccacagctgtttccttgccattgtatctccagaatgaataaatccacatgtaaactgctacgtttcaacatgattataatgtaaatgagatcagacatatgtcattttaggtaactgaatagaaaaggaaacaactttcggggatcaaaaagcaaatatggagccaagcgcggtggctcacgcctgtaatcgtagctctttgggaggtggaggcgggcggatcacctgaggtcaggagtccagcctgaccaacatggtgaaaccccatctctactaaaaaacaaaacaaaacaaaaaaaaaacaaaattagccggcagtggtggtgcgcgcctgtaatcccagctgctccagaggctgaggcaggagaatggcttgaaccctggatgcggaggttgcagtgagccgagatcaagtcactgcactccagcctcaggacagagcgagactccgtctcaaaaaaaaaaaaaaaaaaagaaaaagaaaaaaagcaaatatggcagttaaaaagtgagaaagtgaggttttaagacactaaagaatttcaaggccaggcgcggtggctcacgcctgtaaccccagcactttgggaggccgacgggggcggatcacttgaggtcaggagttccagaccagcctggccaacatgtcgaaaccccgtctctactaataatagattagtcaggcgtggtggcatgcgccttggtcccagctacgtgggaggctgaggcaggagaatcacttgaacctgggaggcagaggttgcagcaagctgaaaacgaaccactgcactctagcctgggcaacaagagcaagtctgtctcccccggccccttaaaaaagaatttcggttttctacactaaaagcaatgtggagtagaaatgctcacgctaaatggcacaaactccacagttatatgttacttaacagatctcagttccttaagagaaactcaatgggcacagtatttcacactagatacctcctttcagacaagactggacggccagtagatgcacgatacccccaactcatgaagtcgagcatagaatcacccaacaagttacccagaaggtaaacttctcgggtactgcagctagaagaagcgagagacctctccctgggctagggactgacttcaagaaaagaactaatctgagcggacacgaggaacaagcagaaaggaaaagcgacagggctaccatgctcctaactccaccctcccgcgctcagcccggagaaggcccagtctcgctggctgctgcccctccttccacctctttccaaacccaccgagcggcgccaggaaaggtcccgccgccctcttctcccctcccccaaactaggggctggggaggcccaaggaggttaacagcttccgttccttccccgcctagaagggaaggggtgggaagtgggattgcgagctcgtcccgtctcggcctccctcgccctccacccttacccggagctccgtttccgccccagcccgagactcactcgtcagtcccgcagccaccgcagccgggtccccgcgtactgccacagcccctatcccagggccgcccccccacccccagctgcctgctccggtgggttccggggcagtcgaaagaattacttccgctgggtcagagccgctttcggcgacgcgcgggagatccgtacctggtgaggcgaggacgcagagtgtgtcgctcacttccgtctggaggtagggcgtagcgccctactcttttcccctatagtaggccagcctatgaacgcaaccggcaaatttcgaccaatccgagtctagctcttctggattcccagcatgcagcgcagaccctgatccaattgctgtaaagacgcatccttagagaggctctcgggagtccgagagagcactgcattctgggatttgtagtttctctggtggataccgtcggcgttgggaccgaggcagccctgcatcctgggacttgtagtttctcgcactgcgtgttaagattttggtggttacagagactgtccgtacctctcatttagggttacgcctggaggtgggagactgctgaggaaagattgaaacgtgggagggcggtttctttgctaacgagatcgtactctttatgaagcagcatctgtccctggtgaaaagttgctgtgcgtgctgaagagccagcacagcaacgactagcgcaatcggctggcctcatttcctctcttcccggtagaattcaatgttaactgaaaactaaccacgtcccccactccacccgcgagggtcctgcctttgcctctgggttagctcagctgtcctggatccggagctcacgcacagaaaatccaggcgcctgccaaaccgttactcagtttttgggaacttctttctcattccacgccccgcttcccacccccccgcgtttcctatggtaagatatacaggcacctttccaggaaggctgaaacagctaaataaagttcaccttctactgttttccaggagtgtggcatgaagagaatgtatgtagggccaagacaacattacaaggtgctcaacgaggcactttgtgtgctcaaaaaatagataacaggctatctagagtttgttgaactgaggacttgccagaaaggctttttttttgtttaatttagttaatttggtagataaaagacattggttttttataattagttgcaataatcaaggagattgtcttggataaattttttaaagcctttacagaaatcagaacaaagattttttggctgtaatggtagctcgaagtagagtttggtggggaggacaggcatggaggtgcagatgaggaggctgtaggccccttttcttttctcttctcttttctttccttcttttttattgagagggtgtctcgctctgtctcccaggctggcgtgcagtggcgcaatctcggctcactgcagcctccacctcccaggcccaagcaattctcgtgcctcagccccctgagtagctgggattacgggtgtgctccaccacgccgggcgacttttttctgtgtttttagtgaagacggggtttcaccatgttggccaggctggtctcaaactcctgaccacaagtgatccgcccaccttggcctcccaaagtgctgggattacagccgtgagccactgcgcgcggcctaaaaacatccttaaaatcattctaaaatcccattagtttatatttaacaaatgtctctaacttactggaactggaaaatccatctaacataaataacaattctatgtaaatctatggtacagagttttcagactataatctgattttatctatttagaaattttgagaaatagatcaaacaaaagtttttattttcatttacttacagtatttgtagggggaacagctttacagaagataaaaaatttgagttctcttaatatagttaagaaaaacatttttatgtgaaaattttaaatatatcagcaaaataatagagtgaatattgattgtgagtgaattaccctaaacagaagagtttttaaaatgtaaataggccaggtgtggtagctcaggttctgtgacactttgggaggcccaggcgggaggatcccttgattccaggagctcaagaccagcctgggcaacaaaaggaaaccctgtatccactaaaaatacaaaaattagctgggcatggtgacgtggcctgtagtcccaggtacttgggaggctgaagtg

SEQ ID NO: 587954 - DNA, 4001 bp, Homo sapiens
actggatgggctttttctgctcttacttaataacaacaataaagaatttaggacagcagtttagctgaaatgcattaacacataaatatgaccatagctggccagatttggtggttcatgcctgttattccagcactttgggaggccaaggcaggaagcctacttgagcccccaaaacaaaaaattagctaggtgtcgtggtgggcacctatagtcccagctactagggaggctgaggcaggtggatggtttgagcccaggaggttgaggctagagtgagccgtgatagtgctactgcactccagcctgggagtgcagaacagagtgagactctgactcaaaaataaatatgagcataatagcaaagatttccctgattattttccagtgctaaaaaatctaccaaaaaaaccaagataaacattttagaagatttaaacaattaaatatcactttagaacttgatgtataggactgactataacttctggctgtaaactagtgcctattatattacagaattaccatctggcaatgcatacacgtgtattttttgaatggtagttatcaaatttcatatttaagaaaaagaggaacggtcacttaatattaaacagggaccccaaatcatcattggcaagaaacaataaatatccattatagtacgtaccacagctgtttccttgccattgtatctccagaatgaataaatccacatgtaaactgctacgtttcaacatgattataatgtaaatgagatcagacatatgtcattttaggtaactgaatagaaaaggaaacaactttcggggatcaaaaagcaaatatggagccaagcgcggtggctcacgcctgtaatcgtagctctttgggaggtggaggcgggcggatcacctgaggtcaggagtccagcctgaccaacatggtgaaaccccatctctactaaaaaacaaaacaaaacaaaaaaaaaacaaaattagccggcagtggtggtgcgcgcctgtaatcccagctgctccagaggctgaggcaggagaatggcttgaaccctggatgcggaggttgcagtgagccgagatcaagtcactgcactccagcctcaggacagagcgagactccgtctcaaaaaaaaaaaaaaaaaaagaaaaagaaaaaaagcaaatatggcagttaaaaagtgagaaagtgaggttttaagacactaaagaatttcaaggccaggcgcggtggctcacgcctgtaaccccagcactttgggaggccgacgggggcggatcacttgaggtcaggagttccagaccagcctggccaacatgtcgaaaccccgtctctactaataatagattagtcaggcgtggtggcatgcgccttggtcccagctacgtgggaggctgaggcaggagaatcacttgaacctgggaggcagaggttgcagcaagctgaaaacgaaccactgcactctagcctgggcaacaagagcaagtctgtctcccccggccccttaaaaaagaatttcggttttctacactaaaagcaatgtggagtagaaatgctcacgctaaatggcacaaactccacagttatatgttacttaacagatctcagttccttaagagaaactcaatgggcacagtatttcacactagatacctcctttcagacaagactggacggccagtagatgcacgatacccccaactcatgaagtcgagcatagaatcacccaacaagttacccagaaggtaaacttctcgggtactgcagctagaagaagcgagagacctctccctgggctagggactgacttcaagaaaagaactaatctgagcggacacgaggaacaagcagaaaggaaaagcgacagggctaccatgctcctaactccaccctcccgcgctcagcccggagaaggcccagtctcgctggctgctgcccctccttccacctctttccaaacccaccgagcggcgccaggaaaggtcccgccgccctcttctcccctcccccaaactaggggctggggaggcccaaggaggttaacagcttccgttccttccccgcctagaagggaaggggtgggaagtgggattgcgagctcgtcccgtctcggcctccctcgccctccacccttacccggagctccgtttccgccccagcccgagactcactcgtcagtcccgcagccaccgcagccgggtccccgcgtactgccacagcccctatcccagggccgcccccccacccccagctgcctgctccggtgggttccggggcagtcgaaagaattacttccgctgggtcagagccgctttcggcgacgcgcgggagatccgtacctggtgaggcgaggacgcagagtgtgtcgctcacttccgtctggaggtagggcgtagcgccctactcttttcccctatagtaggccagcctatgaacgcaaccggcaaatttcgaccaatccgagtctagctcttctggattcccagcatgcagcgcagaccctgatccaattgctgtaaagacgcatccttagagaggctctcgggagtccgagagagcactgcattctgggatttgtagtttctctggtggataccgtcggcgttgggaccgaggcagccctgcatcctgggacttgtagtttctcgcactgcgtgttaagattttggtggttacagagactgtccgtacctctcatttagggttacgcctggaggtgggagactgctgaggaaagattgaaacgtgggagggcggtttctttgctaacgagatcgtactctttatgaagcagcatctgtccctggtgaaaagttgctgtgcgtgctgaagagccagcacagcaacgactagcgcaatcggctggcctcatttcctctcttcccggtagaattcaatgttaactgaaaactaaccacgtcccccactccacccgcgagggtcctgcctttgcctctgggttagctcagctgtcctggatccggagctcacgcacagaaaatccaggcgcctgccaaaccgttactcagtttttgggaacttctttctcattccacgccccgcttcccacccccccgcgtttcctatggtaagatatacaggcacctttccaggaaggctgaaacagctaaataaagttcaccttctactgttttccaggagtgtggcatgaagagaatgtatgtagggccaagacaacattacaaggtgctcaacgaggcactttgtgtgctcaaaaaatagataacaggctatctagagtttgttgaactgaggacttgccagaaaggctttttttttgtttaatttagttaatttggtagataaaagacattggttttttataattagttgcaataatcaaggagattgtcttggataaattttttaaagcctttacagaaatcagaacaaagattttttggctgtaatggtagctcgaagtagagtttggtggggaggacaggcatggaggtgcagatgaggaggctgtaggccccttttcttttctcttctcttttctttccttcttttttattgagagggtgtctcgctctgtctcccaggctggcgtgcagtggcgcaatctcggctcactgcagcctccacctcccaggcccaagcaattctcgtgcctcagccccctgagtagctgggattacgggtgtgctccaccacgccgggcgacttttttctgtgtttttagtgaagacggggtttcaccatgttggccaggctggtctcaaactcctgaccacaagtgatccgcccaccttggcctcccaaagtgctgggattacagccgtgagccactgcgcgcggcctaaaaacatccttaaaatcattctaaaatcccattagtttatatttaacaaatgtctctaacttactggaactggaaaatccatctaacataaataacaattctatgtaaatctatggtacagagttttcagactataatctgattttatctatttagaaattttgagaaatagatcaaa

SEQ ID NO: 587955 - DNA, 4001 bp, Homo sapiens
ctgcagtaggtaacgaagcataatcatatataccatgttaagtgaaaactgtgaccattttaccaatatgtaaagaaattacgcaaaatggattctcttgtctaattttgtacatgagactttgaatttagtaatcaattcactcaacatacatgccaatctattacgaacgtatttaaaaacactagttttttctaacacttttggtagctgtcaagtctatgatatttaacctttatttaaacggacaaattttactccatagagatgcagaatggtctcatttgttcttattagttttaccaaaaaatttcaacagtgttttcctagaatcacttagggccattactccagtgaaatctttcaaatatcccataaaaatcaatgaaagcgtaattatgtaaataaaagatgcttaaaaactctcagagggtcatacatataactcagatattaaacattatcaggatgtgcaaccaagcccccatttctcaccttggtaggcacaaaaatccttcggaggcatcctgtaagaggcttgcgagactcttaccaagccaccccggctttaaacgcctctccagccacctgtgaaccgcgaaggagccggctttcgcggcggggaccttgccaccagtaccctcgcgggccgaggtcgttctcccggtcggcttcccgcctcacccgaaaaggaattagagcatctacccaagacggtgactggcagggcagatcaaggtgtcctggtctcggccccagccccgcggtgcgccccgcccgcttaccttgaccgggtgcaggtagccatcgccgcgcagggcgcccaacccggcgtccgccggcgcctcggcgtcgtcctgcaggctgcgggtgagatgcgcgatgtaggtggtggccagcagcagcacgtccagcttggacagcttggtgtcgggcggcacggacggcagcgtgcgctgcagctccaggaaagcgtgccgcagggtctgcacccggctgcgctcccgcgccgcattcgccgccgccggccgcccgctcccggaacgcgagccgcccccagggcccgccggccccggcccggtccgcccgggacgcgagtcgcggatggcggcggccaggggcgcgggctcggcgctggcgctgagggggctgcccgctgggcggccgcggtccatggcagcttcccgcgccgcgcgcgctgcaaaggaccgaaggtgcggtgaggccggggggcggtcgggcttaacccgagaggcgcagccccctggttctccccgtgcgcccaccagcagcccaacggggctaagggcgctctcaagcgagctcgttttgcctgggacgcgatttgcttccggacgtctggggagagttgcggaactccggagttcttgggcttcctagaaggataagaagaggcgcagtgccggctttgcttttcaggggcaaattaagcaaaaggtctactctacccgggaagaaagatctcggaagcacagctcaggatcagcactcgttcgcgcttgggtgactttatccaacccggcacgcacgagaggtggcgcggctccttctcgccgacgccgcggaaaaccacggctcaccagccgccctcggcctttcacgccaggggggatttctgcccgaggagcgggggacccttagcctcacctcggggtacggcacccgccaccgttccgagcccgagagctgcgcagtacgcgtctgacgggcccctcacctttcctggagcggctgagtggagctccgctccgtcgtgagggcgggcgaggggcgtggagcagggcctgtgtggccagggccgcgctggtcactccatcctcgtccggccgatgcccaagtcgacggctgtttccaacctccgctggctgtgacttttatgcgggcgccccgcggccaggcgtgtgtgctccgaccggctaaggcaggtcgggcggaggacctggcccaccggagaggctacgccgggggctgaggcggcttagagggtcattaatcaaaccctccggcggggcgggctcgggggcggggcgtcctcctggccccgcccctcggctcactgcctcacgctgctttccccgaggcgcctcgctgagggcggcgtgtggagagtttggggtgtctgccgccggctgcggtggggccgggctggaggccgcgggtgaggcctgtggttaacctcgcgctgccgaggtcttacctcctcgagtccagtctgattccaggccgcttccaggccggtgcccagctgaggcgggaacgctgcagtttggttgagcgtgacttttaggctctgtgaggaaaagtcgagcgcgccacatcgaggcgctagccgtttattctaccacaaggtaaaagattcatgctgtcctagttaccctaaagctgggagatacactgcacttcctaccagaccccgaatgctctcagtgtctgtaattctttaagaagttcctagagcagacagcccttggatcgtgggcacttctccccggggacggggaccctgctgaccgcctccgctgcccccgcgggggccaccgctctttaattatttgggcgaaacattcttttctggttttgcacttgtggactcacgggaagcgtgacttgcagcgaggcaggacccgatcccaggcttctttagaaagcggacgctgcgccccaaggcctgttcagagccgccccaggaagccgtgggtccccgaccgccccaaaccgcagcggtttctgcaggtcctggacccgtcgccttcgtaggtgaaatctaagtacttttcagcaacataattagaacacactcgaaacaatgcctgcagttctccgagtaggacattttctgtttttgtgtttgagacagggtctctgtcgcccaggctggagtgcagtggtgccatctcggctcacctcagcctccaactctcgggctcaagccaagagcaggatattttcttatattctttggggtcaaacggaatatcaaatttaaaatgtcactacagaaatggcgctcttgtatatgcaccatcacttcatactttccagtagatttctatgttggaactactgtaaccaagccgtcagcagtcctggtggcactatttggatgtactggcccacaaattaagtacattagtgagtcagaatggtacttagactttcatctcaattcccacccaataactgtaattagatttacactttagaaagaagtacaccgatattctattgattcaaaaaggggcccagtgcagtggcttatatgtgtagtcccagctaccccgaaggctgagacgggaagatctcgtgagcccaggaggttaaggctgcagtgagctgtgatcgcaacgtccaagggacttctattgctgaatgaaaaagtacatattttcccagtaaattgtatgtaatgaggaataaagcaactagatccctgaattcacaggtggaaagcaatgtttcagattctataaagcagcaaatcaaacaataacttaaaagtttttccttatattatgagataccataaagctacaaacccacaaaagatattgttgcctagtcatataaggttaaaaacaaaatcaaacgtttcctgtcacttgaggctgaatttactcattttccacaaacaaattttctttttcttctgggttatggaagaggtgaggttcatgcacatcattttttgtcagcaagctttcagattgcttcaaagagagattcctgtatttatagagagggaaaaaaaagcattaaattaaaaaaatgaaagtatccctaaaaggtagcaaacatacagaatctaggacacaataacaatattaaaggctaatgattaatcaccaaacagtgtgaatcttgtcgggctttaaaaaggaagcagaaacaaagattttcctcttggtgtagcgaagaatgtgaaaaatctatgatttgtgagaggtatggaaataatattagagggaaggtggaccaggtct

SEQ ID NO: 587956 - DNA, 4001 bp, Homo sapiens
aaacttcatctcaaaaaaaaaaaaaaaaaagtatagatgacaattgtgtaaagggaaaatcagaaaaggagctttaacgaaggcactgccagcaattgaatctagctggaggatacgaggaagaatctcctattcttctacttttccgcatgttagaaatttttcaaagtaagaacttaaggccaggcgtggtgactcacgcctgtgatcctagtaccttgggaggctgaggcgggcggatcacgtgagcccaggagtttcagatctgcctggacaacatagcaagaccccatttccacaaaaacggttttttaaaattagccaggtgaggtggtgcgcacttgtagtcccagctactacagaggctgagagaggagaatagcttgagcccaggcaggttgaggccgtagtgagccgagattgcgccactgcactccagcctagtaaacggggcaagaccctgtctcaaaataaaaaataaaaacttaagaaaaaaaagtgggtttcaggattcattaggaaaaatgggagaacataggaagactcagtttaaaattctcaaggctctatccagaaacaataatatggctcatctttgaccaatattagttatttgtagcttctgcagttaactctgtagccacatataaattctcatcattacattcaagaagagagctgtttagagtaactataacattctgaaattaaaaaaaaaaaaggcacgtaagcactaacgctacctaaaagaaatttctcagacaagttcagatagtaaccatatttaagcgcttaacataatcggctccattttccatgagttaggaatggaatttaacgttcatagaaaatctctatcaagaagaaacaactccagaccctaagagaaactcttctgctcagaaactatttccaagtcctcggaagacaggtacaaatccttatattccattcggccttaacagcatcaggaggaagttgccacacgtttaacagaaagagatattttatgatccagaatgctggatttctgacctaaatttcattgtacatgaaaaagagcactgcaatggaaaaagggagggggggggagggggtgggggagggcacgtctaaggcacacagggcccacctgggagccctttcaattacaaaattctagacataccaaacatatctctacactcgtcaggtaaaggcctttcagttttcagtacaaaggacttctgccggcttccttcagaaaaatcaagaatttaagaaaatacttgttatgcaaacaaacatttagcccacttaacattgagctacggtcgtccaaagctgcttagtgtccgcgaggaggccgtccggatgcgcgatgattcaggccttctccgccagctccacccgggacgcgagcacccggcgtggacctctgcgtcccgggcccacgacgcccgcgccgcggggtgcgcgcactgcgtccccgctctcctgggactgcgccccgagtaacacgtgcagggggcactgggtcccctgcaagcggcgagaacgccggcagccctggccagttaagcggggagtgggtccacgcggaccacagcggcaactcagcccaggacgagcctcgggtcaagttctccgactccgcactcgggcacctagcgggccgcgccccggagctacgcggccccaacctcacctgcccgcccaaactgtgcccccaactacccgcacctccacctgcgcgccgcccaccctcgccctccacctgcgcgcccccggcctactagcactccccacctgcgcaccccctcacctgcgcctgggcggcggcggcggcggccggtggcggccccccacgcaggccgtcctcctcctcggggggctcgtccagcagcactcggccccggcccagcttccacatggtcaggcgggctccggcgtccctccgtccgtgcgtcgggctgtggctccgcgtccctcccggccgccggacgctctgcctgcggctcctgcgggacgcgggcccagtgggccgggcggggctaggcgggggcggggcacccccagaactaggcccgccccctccccaccaggcccgccccaaaccctccccaggacccggcccgcccccaaaccatccccagaaccaggcccgctccaagccctcctcaggaccaggcccgccccaaacccttccgaagaccagacccgcccccaaaccttccccaggaccagacccacccccaaattcgacggggctccgaatcccatcccccacagaaaggtcaaccccggccccctcctcccagtgtggtccccgccaccgccccggcgagaccctcgcccttcactgttctactgaacgacgtcctcaccccaggctaccccgtcacctggtccccccaccttgacccccacctacccgcccctagctgcttcctcacccggaaacgcccccatcctgagcccccaccgagcccctagccctgccctatccccggttccctgggtcctcctctacccccgagcccccacccggcccccgcaaattcccctctcccggttctctccttctcccccgccgacccccacttactcccggactgccccctccccccaccctttcccagaccctggccggagggcgtggccacgtccgctcgggtcaccaaggcaacggccgggagcgcagtgcgcatgcgcgccgctggcgctcaggccgcggcaaggctgaggggaaggtggagggggcacagtccgcggagcggcgcctgtaccccagcgcttcagggcatccctcggggcctgggcgccgggcatccgggactcatcccctccggcgcccgaggtcgcgggatagtgggggcgccgggaggaagcctcgcccagccctggtgggcggtggggccgctggggcctggggcgccgcgggctcggcccggactgacggcggtggggggcggggatggggccgtggtgccgggccgcgcagaacccttgggacccccgcggcgcccaggttggggctcagggcccggagaacgttttcccgcgtggctatggctttgtcagaatcaggagcgggagaggcgcccacagattcctgagggcagaaccgcctggttcccaggccgaaaggagccggcgaggcgacccccgatcccgggacggagccgcgggaacgggggattctaggcgtccgctcccgcccagcaggttaatttttcccgcgacgcgcttcgtatcgcttcttacaccaaatatgtattcatgtgttcagtcatgtaaaagcgcattttgaaggaggatccagaactatgagctcccttgaaaactgcaagcttcgtaactttacgactcttaaaaaaatgaaatgtacattttgagtttcccagaagtgatgagcagcaaagcttttaagatgaaaggggctctgaactgcctttgggagatgccggccaggatcccggagaaccgagggggtggcgcccgtgcccaaggcctggggggacctggggccctggcgcgggacgcacagggagggcgggggctgggcctggcaggagcccccagccgagtgggaagagccagataataacctaacgatactaacctaactataccgtcacccagagaggagggcagcacccctcccacatgcctccctcccccggtgaccgctaaacctaccggccgcaaacatcacgaaatagaattaaacactggcgcctactaaggaccactccacccagtacaaactaaatttgagagttcatcttcacgcaaataataagaatgttaaaaatgtatatatgctccttttcaaacaaggcctaataggcctggcctcctgggctagggggcttagaaaattgcaaatgcaagatggcatggtgtggctccggggtgctgtcaaaataagcacattgcaagcacaaactgatgaaagtcaaaaactatcaaacagaggttgcaaaacaaagtcaggatccaaacacagcccatataaa

SEQ ID NO: 587957 - DNA, 4001 bp, Homo sapiens
aatccttatattccattcggccttaacagcatcaggaggaagttgccacacgtttaacagaaagagatattttatgatccagaatgctggatttctgacctaaatttcattgtacatgaaaaagagcactgcaatggaaaaagggagggggggggagggggtgggggagggcacgtctaaggcacacagggcccacctgggagccctttcaattacaaaattctagacataccaaacatatctctacactcgtcaggtaaaggcctttcagttttcagtacaaaggacttctgccggcttccttcagaaaaatcaagaatttaagaaaatacttgttatgcaaacaaacatttagcccacttaacattgagctacggtcgtccaaagctgcttagtgtccgcgaggaggccgtccggatgcgcgatgattcaggccttctccgccagctccacccgggacgcgagcacccggcgtggacctctgcgtcccgggcccacgacgcccgcgccgcggggtgcgcgcactgcgtccccgctctcctgggactgcgccccgagtaacacgtgcagggggcactgggtcccctgcaagcggcgagaacgccggcagccctggccagttaagcggggagtgggtccacgcggaccacagcggcaactcagcccaggacgagcctcgggtcaagttctccgactccgcactcgggcacctagcgggccgcgccccggagctacgcggccccaacctcacctgcccgcccaaactgtgcccccaactacccgcacctccacctgcgcgccgcccaccctcgccctccacctgcgcgcccccggcctactagcactccccacctgcgcaccccctcacctgcgcctgggcggcggcggcggcggccggtggcggccccccacgcaggccgtcctcctcctcggggggctcgtccagcagcactcggccccggcccagcttccacatggtcaggcgggctccggcgtccctccgtccgtgcgtcgggctgtggctccgcgtccctcccggccgccggacgctctgcctgcggctcctgcgggacgcgggcccagtgggccgggcggggctaggcgggggcggggcacccccagaactaggcccgccccctccccaccaggcccgccccaaaccctccccaggacccggcccgcccccaaaccatccccagaaccaggcccgctccaagccctcctcaggaccaggcccgccccaaacccttccgaagaccagacccgcccccaaaccttccccaggaccagacccacccccaaattcgacggggctccgaatcccatcccccacagaaaggtcaaccccggccccctcctcccagtgtggtccccgccaccgccccggcgagaccctcgcccttcactgttctactgaacgacgtcctcaccccaggctaccccgtcacctggtccccccaccttgacccccacctacccgcccctagctgcttcctcacccggaaacgcccccatcctgagcccccaccgagcccctagccctgccctatccccggttccctgggtcctcctctacccccgagcccccacccggcccccgcaaattcccctctcccggttctctccttctcccccgccgacccccacttactcccggactgccccctccccccaccctttcccagaccctggccggagggcgtggccacgtccgctcgggtcaccaaggcaacggccgggagcgcagtgcgcatgcgcgccgctggcgctcaggccgcggcaaggctgaggggaaggtggagggggcacagtccgcggagcggcgcctgtaccccagcgcttcagggcatccctcggggcctgggcgccgggcatccgggactcatcccctccggcgcccgaggtcgcgggatagtgggggcgccgggaggaagcctcgcccagccctggtgggcggtggggccgctggggcctggggcgccgcgggctcggcccggactgacggcggtggggggcggggatggggccgtggtgccgggccgcgcagaacccttgggacccccgcggcgcccaggttggggctcagggcccggagaacgttttcccgcgtggctatggctttgtcagaatcaggagcgggagaggcgcccacagattcctgagggcagaaccgcctggttcccaggccgaaaggagccggcgaggcgacccccgatcccgggacggagccgcgggaacgggggattctaggcgtccgctcccgcccagcaggttaatttttcccgcgacgcgcttcgtatcgcttcttacaccaaatatgtattcatgtgttcagtcatgtaaaagcgcattttgaaggaggatccagaactatgagctcccttgaaaactgcaagcttcgtaactttacgactcttaaaaaaatgaaatgtacattttgagtttcccagaagtgatgagcagcaaagcttttaagatgaaaggggctctgaactgcctttgggagatgccggccaggatcccggagaaccgagggggtggcgcccgtgcccaaggcctggggggacctggggccctggcgcgggacgcacagggagggcgggggctgggcctggcaggagcccccagccgagtgggaagagccagataataacctaacgatactaacctaactataccgtcacccagagaggagggcagcacccctcccacatgcctccctcccccggtgaccgctaaacctaccggccgcaaacatcacgaaatagaattaaacactggcgcctactaaggaccactccacccagtacaaactaaatttgagagttcatcttcacgcaaataataagaatgttaaaaatgtatatatgctccttttcaaacaaggcctaataggcctggcctcctgggctagggggcttagaaaattgcaaatgcaagatggcatggtgtggctccggggtgctgtcaaaataagcacattgcaagcacaaactgatgaaagtcaaaaactatcaaacagaggttgcaaaacaaagtcaggatccaaacacagcccatataaagacgctacaaataaaacacagaaaaccaactcagaacacttggacaaataacacaaatccccctggctaatgcgaaggaacacagggcttatgcccagacagctggcttcctctcagtctagcaacatccactccatgaattgtcattaaactgtaatcccctgcaaatctatgacaatctggaagaaggtgagccttgctaaataaaaaagctaacttactgaatattttagacatttagctttcttctgaagaagagcacagctagtcaggatatctacaacctaaaggcctggcacaaatgagagggaagggggttgggtgggagaagccggtgaaacggctgttacggagcagcaggcatttctggaattttgagaagaactttcccgagtactatgaatttgactcagttcattcattagctcctctatgagttttatataattaagtcatgctattgttaaggtccataagaggcatactttacacaatccagtgtcataaaaatacaattgttaccactaaaaatccattttgggatcgagaaagtcatggttaaacaaccttttcatctgctgaggcctcagttgaaggaagctattcattttaaactgaattgcccttattggctaatttggccactgaaaattcactggtacaggaactctaattttttagatgtaaagatcaagcgtgtcatctctctctgaattcaaaatgcataaggctcaatttagtgagattttgctctggcagacttaattttaaataggagtggggtttggggtgccatatagaactttctagcaaccaaagctgtttaaaaactacaagtttcttatccatggaggtgattcggcagaggctggatcttaagacagttgtaccctcagtcctctgacttttttaaaaaatggatacataatattttac

SEQ ID NO: 587958 - DNA, 4001 bp, Homo sapiens
tgttgctttcatgcctgataacacaacatccattctgcatcccatgtatctattgttctgtctccctgtcccagccttacaagtaactgtgaaataaccaatcttctttttgttctgtttcagcttccttaagtccttactgtctataaagccaacccccaactgctcaattcattgagcacttattttatggaataaagtattacctgaatccagaatcacaataaagccaagtgaggtctttaaactaaacttagttgtaaacaagatcggggtgctaggtgtactcattgttactagagttaggttgcttctgtgcccttttatctgacagagtaaggaaatacatatttgtatagtaacctatgtctacacatgcatatgcaaatatttctaagtcatctatacctacatgagctaaacagttcatactgatgtctccaactctaagagaactctaagagaattctgaggaactagcttcattccaggatttaattttctacttaatgttaattatccctggctccagtgttaaccgcaatacagaggaaagatccttgaactggaagataaaggatggggctgaaacactcccttttaacctatcagtaccttaaaactaagattatttgcctaactcacaggattatggtgaagatgaaatgtgtcaaaatgtctaagaattctattaaatagcataattatagtattataaatatatacttgcacagtaattttagcgccaactatgaatgaagtaccagaacatctttctgttgtttttcaaaaagctacactaggccaggcgcggtggctcatacctgtaatcttacagctgcgggtggtggtgcacgcctgcagacccagctactccagaagctgaagcgggaggatacctgagcctgaggaggtcgagcctgcagtgagctgtgatggcgccactacactctccagcctgggtgacagtgagaccccatcttgggacgggggcggggtgcagcagatttcatgaacagtttcattcattcatttatttattcatacagggtatcactctgttacccaggcaggactgtagtggcacgatctcgactcactgcaacctctgcctcttgggttcaagcgatcctcccacctcaggctcccaagtagctgggacttgcaggcatgtggccaacatttacttttattctgagactacacagaataaaagtaactgctgtagagccagcaggccaaatgagatttaatagctcacaaattaacataaaacactgatgcctcgggggttactggaggccacagggactgctgaatattactacaggaatacctgagtagaaagcgccaaaagagacaaaggtactgggttgagtggaactgtatacattttaactcatttaatgcttgcatcaaacctaaacagggtcttattttcattttatcgaagaggaaatcaatctgagaaaaactcaggtgctgacaacgggcgaaccgggattcgaacaaagttcagcccggagcctcggactcccagctaatcggccgcagcagcccctccctcggcgacgtagggaaccagccctctgccgcgcaccacggagcccgcatccgccccccgcgtagtcccggcccggacgcggtctgcactcaccctctgcgctgttgcgggtcctgcggaagtcctcggagcggccgtcgcggaaagctcggcaaagagagaggcagaggaaatcgagcatccagccggcagccacggcctcggcctcggccaccaggcccgcgtcctcctcctcctcctcctcctcctcgggggcccccacctgcacctggcactcgagcagttcctggcattcgaactgctcctcgtcgtttctctctgtttctgccatctgctcctcagtagggtcggcatccctaccatccgcacagccccgcgggctcggggccgctgaggaaacatcctccgccatgttaaatggctcgcttgggtactgccccttcaggcgccgagcaacgattggctcgcattcgagggctcggggcgtggccgcggagagtctcttccgccggcgggacatgggcgagcggttcaagcctggcttctgattggccgacacctgttccggcttctgattggccgacacctgttcctgcctctgggcgttgaatttgccgccagtctagggcagggctttgtaggtaaaccggacgactccatactgagcgaggagcgagattaggataggaggaggcagctttatcttccttattccttgtaaaatgcaaccttgactggaacaacaacacggttatttaaaatgaaaacgcatttgcctgcagcctatttcagaaagagatgggtaatgagaacttgtcactattagacaagcgtaacacttttaaaccctagttttcatctaacagttactacgtgatcacgaacaacaactattacaactgacaatatccatgcttctccaaccttaagatgcatcagaatcagcctgggggcttgctaaaacacaaattgccgggctccactcccagaattcctgttctgctggtctagcttgggatccttgaatttgaaagtccaacgctacttggctgggcaccacattttgagatcagtgctctagaaagagtatactataatggaaatgtatctcaatcaaggtttgagatcgactatagaatgcagtttgtagaaaacaagtgaatgcttattttgaattttgaaacttagcacaaaaagaaattctaaatggggatgggtggtctggttattgtttttgttttttgtttgttttttttttttcctttgagacaggatttcgctctgttgctcaggctggtctccaactcctggcttcaagttatcctcctgccaaagtgctgggtttacaggcctgagccacaacgcctggctccgttttctgttccttgatgtgggttcactttatgaaaattcactgaacatcgtttatgcacttttcagtatgtgtgtcataattgaataaaaagtttattttaaaagcctttctgtttataacgcatccagcatcatcaaagcctttccacattttcacacacttcttgttattgtctttaaggtggtacagtttaagtgttgagtaactaaggcactgtattctagtattaagaatgcttaggttggaatattccctaccagttactcactagctgtgtgaccttgggtaaattacgtgtcagttttcttgtccgtataatgtgaataataataatacctgcacgattaaagggcttggtaaatgtaaagagtttaaaacagccgggcgcagtggctcacacctgtaatcccagcactttgggaggctgaggcgggcggatcacctgaggtcaggagttcgagaccagcctcaacatggagaaacctcgtctctactaaaaatacaaaattaggcgggtgtggtggtgcatgcctgtgatcccagctactcgggaggctgaggcaggataattgcttgaacccgggaggcggagattgcggtgagccgagatcgggccactgcactccagcctgggcaacaagagcgaaactccgtctcaaaaaaaaaaaaaaaaagagtttaaaacgaaacctcaccaggcacagtggctcactttgtaatcccagcactttgggatgccaaggtgggaggattactggagcccaggagtttgaggccagcctgggcaacatagtgagatctcatctctaccgaaaaaaaaaaaaaaaaaagccagggaaatagtaagtgctcaattagtattagcaggaagagcagaatatttgtgctgccaggaaaaatgatgatgcatcagaagagatctcttcttcaggctctaattgtcccatgggaagtaaggtctgttttgaaataatacagtggaatggggatagaggctaagggaataagggttacagcacattatgaacctagtattatggactgcatatttgttttctcccc

SEQ ID NO: 587959 - DNA, 4001 bp, Homo sapiens
aagttctcatttattgattgatgaaatgattcttgtgatttatttttatccgtatcaatttcacaatcagaaaccctatgttttactaacaaaccaaaatctggactttcagaagaacaagtttctttaaactggtatatctggtgatcgtcattatttaggcttaatgcaggcatagtagcactagctatctgtattgcagcatttgaggctacacacactgaagaacttgcagttttgggaaatgtcgtggaagccaaatgctctacacttcttccagtattttcagtatctttttgtttcacggcactaatggtatcttcttcactctctaataatgcagttgctgctgacactgcattatcttctctgcaaatcaagttaaatttagtagaaaattcttcagaactcaaaatttctatattgtggtaatttttgtcctccttttcatctatattgctgaaattttcgtttgtatgagaatcctgctttttgtctccatatatgttctctatgttgttttctacacatgaagcactattctctttagcctcattttggttttctctatctgtttgttttttgaaattaacattcagccatatatcattgcttaactgtgaattacagaacagattgtgatcctgacccctatcttcaacataagcagtttctttatagtctctctgaatgttctctaatgacactggttcattttcatttttcctatggacacatatatgttctctagttatgctgcaatttgaactgtcatgagctgtttctatgttataagatgaaataactgtatcaatgaacatttctttggcctggggtatgtcttttggtttcgggaaagcttcagttataatgctagcataattttgatttattttccccaatttcagttccattagcttttgagcaatggctaaacttgtatgaatgttaccctcatactccacagagtgctgaggatgcttttgtgacaggctctcaaaacttggagtaatttgccattccaatgctagatgatctagttcatccttatcctttatggtagatgtagaagattttgttatttctaactcttgagtaattaatattttatcacagcttttcccaaaagaattatgactctcactctctttgtattcttggtgcaaaacaatgtaattatctattggactgatttttgtttcattagtgaaatcattatcaatttctttccatgaagtttgcttttcttcatgtttggaactgtcttccaggtcagcgaagtttttcatctttccagtattttgaaggtattcatcaatgcttactttctttttgagtggaaaaactgtagacgtttggcaaccagtctgataaattgtttttaaatcagaagactgcgagtcctgaaaaatgtgactactgtactcttttgtataagcattaccggactcctgttgggctctctgagccttctcctcactgtggttttggttctcaacctctgacactacatttgacacagaaattgggaaggaaaaattaccttggtccttacattgccctgccatggtaactttattgggaggtatacagtcatagtcctcagagcccatgttgtgagcccaagattgtgaatcattaacagaagttttaaagcaaggggtatccaaaccattagtaagaacagcacaatcaccagggacaacttctgaggaggaggcagaattagatggtgtcgattttatttctgaattaacattatctgaactcttctcaaattgcaaaacctcatttaagcctgcagtactactctgttctcccatactttcttctctcctcatcagtcttgggtctttgatggattttgaagtagtgactgtgcttgagccagtattgttgtgaagaggaaaagaagcattaagaccacttaaaatatttttaagacttgtccaatttaacaaaaggtcaccattaacactgtctttggcatcactgggcataagtgaaatgtctgaatcatgtgcaagtacttgagaagtgtctctaatttctgctaaactgtgctctgtctgtccactgtatgtttcaggtatagaaatgtttccattttgtacatttccataggagttagaaatatttgagatgaaaggatttatctctgaatttagtgcattgcataaacagttttcttgaacaaatggatctacaggtttcttgaaatgcacaaaggtgacagtagcatcttttccttttccaaatcttttggccactgtacagttattcagagagcatgtcctttctgtggaaataataaggaagacaaatttgaaaaaaagtgtttctatagacaactattaatacaggtacattgtgtccagtaattttaattgaaagttcagctaataacctaatgatgattaaaatgtgttttcaacggaaaaagcaaagagagaaggggatgattaacaaataaataaaatataaatgacgtagcatgaaattctcctcgtctagaaaccttaataaagagtatttgccataaaagtttaattctgacaaataatagaaaaaaaatgacaaataatagaaaaaaactaaataggggctgggcacggtggctcacgcttataattccattactttgagaagccaaggtggacagatcatgaggtcaggagttcgagaccagcctggccaacagggtgaaaccctgctaaaatacaaaaaaaaaattagccaggtgtggtggtgggcacctgtaatcccagctactcaggaggctgaggtaggagaattgcttgaacctgggaggtggaggttgcagcgagccgagattgcgccactgcactccagcctgggcaacagagcaagactccatctcgggggctgggggcagaggtggggaagaataaaactaaataggaataaaaacattttcccaatagataacagctctcttatattaattttctatattcagatgtttaataatagcatgtacatataagaaggcaaaataatctccctctatctaccattaccttgcttctccctctaccatgggagaaaaaaaaggaaaggaaaggggtgtgaggtggaaaaacagggaaaggaaaacccaaaaagttccataaaatctttcccaggagccaaagcaaactactattcgtcttttgcagtgaaatgaatgttcctgcaaataatatatgcaaataaaaacctggaaaataaaagcaaacttttaaaataatttataaaaattatttctaaaatttcctaagaaacctcatgtaataatgaatttacaaaatgcatatttaacaagtaaataataatttctcataaatgttcaccaaacattcatagctaagtaacaccctaaaaatacctttcctaaaacaggaattaatgatgagaaattgcttgtgacatctataaaacatatgaagttatcatgtcactgacaagtaccataaggttctttttcacagtaagagagctatgttgaagatttctaaattctactaccatttgtgattttattacttacagtaagctatcatggaaatatgaccacatatgaagagatgtagttctttagagtggggagtataatggagaagaaaatggaaatgtagattcctacacctacaccaaaataaaatttgctatttaaaaaactccataaaagtactagaaaaaaaaatgaatggatgtttttataatcttggcataggaaagtacttttaaagcatgactgaaaatcagaaaacataaaagtaaaacatgatgtcaattacatataaattattttaataggtcaaaatgcatgataaacaatactcaaaggaaaaaaataggtaaaattgtcaacaaacacaaaaagatgccccaaccccactaaataaacagtaagatccattaaaaaaaactttttaaactggcaaaaatttgaaagaatgattaatactatacaaatgtaagcactttttaatatggtt

SEQ ID NO: 587960 - DNA, 4001 bp, Homo sapiens
gggagggaggtttcacagacatttcccagaacgcagttatataaatggagttcccctgattcaacatgactggaatagcacaaggaaatttcaatgcatgcacattgcaaaggattcctgtctattctgcagggaagaattgtctagattattaccacactctccacagagagggtctcaggccccaagtctgcattagggcagctggagaaacccctttcagagagcagctcaatgtggagacagcgacccagaagcccagaggcagcctagagagctagtccgggcagggtcggtggcagctaaggactaggaagtcaaggcagcctctgcttccaccaccccagcttctcaagaggatacttggaggagggagaggtcccaaagcacagatcatttgacactctcctcaacctgccccactccccacacgtgccgtttattcaagccatcacagaaaaagtgatggcaagaagagaagggagggcagtgggaggatgaagcatggattggggttcacttggtcagattgtccagtgttgaacagcttggggaactgaaaggcaggcacctccaaatgacagtggaactgaaaggcaggcacctccaaatgacagtggccaagcctcacatgcacaaaggagttgcagggcagagctcaggaagaggggggaaggcacaagatgctttttatggcatcttggaccttgagagttcgctgctgacataagccttactggaagctgccatcctctgcacactggggcacgtagtctgcttgcttcagaaaggccgtttccctctgcagctcacagggacgaaggggctgggcatccacctggtactctaggaaaagaaaagtggttcatcaaagaagagtgtggactgggctgccaggacagagacgggctctcataagcacagatgcttttccagggtcatcatcattacctatgacagcctattttaaaatttggcagctaagcacactttcttacaagtatgacattagctcatttaatgtgcaacattctcctaagaggtgacaggcaatatatccttgtcactcatgaggcaccaagtctcaggcagcgaaagtcgtctgcccaaagtcacgtaactggcaagtgaaggatcccaaaatcaacgctgggactacacgttccccgcccgcccccaccctgccgcaattcccatgaggctatttggagtaagttagagaaccgtaaggaagttcttcttgaatctatcaagccatgccctgcagatgtaacatgttccagataaacattgaaataccaattaattaataatgtacatgacttatttttccattgagaactcttgtaacacatagggtcctacccagaaatcacaaccgcatcatgaggtgtgtgttatttgtttactttttaaatgaaaaaaaaaaaaaaaaaacagaagcttggcactttgcccgaagtcatatgggtaagtggctgagccaaagacagaacttagggctatttcacttcataggtagatttctttttctactgcttctaaaatacctgttatggatgacacagactttggaatagctaaggggataaaaacccaaggtcaatgccaaaagtttgccaaaatggtggggtgaggaggacctagaattgaattaggaagatcaaccacatttcccatttctgctccatcaatcactagctctgtgacctcaagtaattcagttcggctctctaaatctgcctcttcatctgaaaaaaaaaaagcaaatcactgacatgtgggaatttgtgaagattaaattagatcgcacctgttcgaaggcccagggcagagcctggctgacactggagctccctccccaccgcctggctccatggcctcagaacttaccgaagatattggccgacacccagcagatggaggccagcagggtgaagatctccaggaccagggccattttcctggcccttcctgggaggaaggaggagaaaccactgcttgccctaggtcccctggccagggagcttttatagagctgccgttggcactttccttcccacccccaggtcctcagtgaggcagtgccccatcctgttttctctgctggtcaaaaggagctccctccacctgtgtctactcctcctgagggcactcgtgtggccagtggagcatgaggatcttgtctaaactgtgggggaacagaacggggtggggtgacttcaaaatccttttttatgggtaaagaccaaagctctgtatctttggagggaacaggctcaagcccacagtgagggaaaagcaatcctttgttctttccttccccaccctaccctttctccttctccttcctccttccttctttcctttcttcctttctttcttctttccttcctttctcccttctatccttctttcctttcattcttccttctttctttccttccttccctctttcttttctttcttccttctttccttccttccttcttttctttcttctattctttctctaacaacctcttagagctccacagtagcaggcacctaatctagacaatgaggatatggcagagaacaaaacaggcaaaatcgtgccctcattaatatagactgtgaaaactttggtgagggaagcaaaatacacacacactcatattcatatttctattactttcctctctttcctaggacctcagactttgtcaaccaaaagatagcaggaactgtgtattccacagaaagcctgtatgtccatttggtttctcctggcaaacatggcttccttccttcagtcctgttcctgtgagacctggaaaaactcacctcatctccctgagccccagcctccttctctggaaagcaaagttaaaaggagaataataatatgtccctatttgttaaggtagttgtaagagaatagacattgaagagcacatgcttattagacactagcagttattattattattattgattttcttattttgcaaaagcatcatgccagggaatggcaagtattcagaagaccaatccagccaggtaaggagctagtgacagatagggtcaggaactggcaggtaatgagggcaggttgctgagcctggcacctgaggagagatggagggacctgtgagaatctggaggatatggtcccgggtagagtgaagggcaggaggacaagctggaaagtggaagagactccaaaccctggggaaaataaaggggccgatatagctgccgtgccgtagactgtactaccttccacaaatagggttgctatgaatattaaatgtgttaaaatatgcaaagtgcttaaaacagtatttgacacataataagtatccagtgttagctactgtactagtctgctatgggtgtcatcacaaactatcacagactgggtggcttaagtaacagaaatttattttctcatagttctgaaggctggaaatccaagatcaaagtgtcagcactgttggtttctttggagactcctctcctgggcttgcagatggccatctcctccctgtatcctcacttggtcttccctgtgtgtgtttgtgtcttaatatttatttcttttaagtacaccagtcatattggattagagcccatccttgtgacctcattgtgcacttaattacctctttaaagaccctaccttcaaatgcggtcacattctgaggtcctggttttaggacttcagcatatggatttggggggagaacacaattcagtccataacagctactgtcatcattgttgggttcctgatataaactagagaaagtaaaacacaacagtcatttgaagtgtcagggtatgggattaaaaacaggggagaacccgtgctctgcccgtccttcttggggaccacacatgcctggaactcccacatctctctctagctcagtctccagccagacttttttgagctcagatccactctgcctggacaccctacaggtatttcaaattcaacatatcccaacctgaac

SEQ ID NO: 587961 - DNA, 4001 bp, Homo sapiens
agtcttgctctgtcatccaggcacgacaatggctaactgcagcctggatctcctgggctcaagagagcatctggcccaagcctccagagtagctgggactacaagcatgtgccaccacagctggctaattttaaaaaaaaatttcagtacagatgaggtgttgttatgttgcccaggctagtctccaacttccgggctcaagtgatcctcactcctcggcctcctaaagtggtgggattacaggtgtgcaccaccgtgccctccctcccagccattttgttcagtttcccaggctttcttttgctccctcaaggcctttactgagttcagcctgcagagaacgctttctcccactgaaactcaccccaatttatcccccttagacctctttccaaaagctacttcctcaaagaaacctctgtgacccttggaaagttatttgttttcacagcatcctgcacttctctctcatagcacttataactataatcaaccaagtaataatgtaaccagttatcttaatattgatcttctctgctaggaagtaaactcaatacatgtaaggacagaatgtcttgtacctcagtgcctaccagcatacttgatatacaagagcacaaaaaacattttctgaatgattgtatgactacatgcatgcctgactaaaaaggcgacaatactttttacattaaatttaacaagtttaacttctttttgcgttttcaaattactccacaaaattacacgagaaaaatgaattccttcaaacttaaatcctactatattaaactatattaaaagtctatcacataaaattcacttccacaaggatttaactctaacaaaataagcatgtgagattaaatatacccgttatagagatgaaaaaaaggttcaagtggtttaactcacgcatttaatataaaggaaacaattcctagaattcaagtctcttggcggtattattcctgcatactagctatttttcatgtggggcaatttttacctgattcaaagatttccccaaaataaagatatcacaaaaactgatgtaaatatggttaagtcttttatctcaactagtttgaagttttaattatgtgcatttgggcttaagtagatttttaggtttaaaaaaagacgttaaccaaagcaagtcactcaactttaaactttcactttatgacatcatatctactagagatttcattttacatgtcgctttcccccaatttttaaatgtcccctcgatttacaaatatgagatgacatatagcacctacgacattttttcatagcagcctaccaagtagatgtagtccttcacataaaaataatggcagtgggcgaccactccgtcatgtctgagggttttgtttttcttaaacatcaccgtgcccaagggtcagatgttctggctgctttcagggatcaattacaaccacgtttgcaatacctacatttctgggtaatgactgtgctagaacatgaagagattctcttttctacttactccacaaatgccctggagcaaaggcacagtatcttacaatcctcccgctcctcaatgaagagaaacatttccgccacgcggctccacttctcgcagcacattttaccacttcggaggcagctctgacgtacgcagcccgggtcgcgcctgccgggcctccgctcggttactggagacttaaaacaggcctcgcccgcaagccctggatgaggagatagaaactggcccgcggccgctcgcgccgggaactagcccggacgctgccgccggaagtggctccgaggggccacgggaaggggcgggaccacgggcggtgtcacccccatcgcggcccgggctgcagccgccgcttggcttctttcacacgggttgcttcggaggaatccgccgtgcaaatctgtccgcccccttggccactgatcccccgaagagcttctgtcgccgctctagggtaaaggagagctgcccctgcccctgcccccgcctatccgaggtgcgtcggcccccgcgcttctccagcccggcatcgggtctggcgggactgggagcggcggaggccgcgcgcgtccggtctcccaggagccgcctcggaatccccagtctcttcgcgggcaggctcggcttcccgccggcctcagtgttgcgccccagcgccagagtggccgggtgtggagatcctccctcctctgggtcaaagagcctgctctccccgcccctcttctcccctggcgctctaaaccttcggttcggcgcgtttcatcctaatgcatctggtggggcgaggcgtctctagcctctgtagaggcctctaggcttgcccagtggcttcgctggttccgggacccaggtcgagcctccggtgtaaaagccaaggggaagtgtgtggtgatcccgagagtgtagggggaaagccgcgtgggtagagcgttcgtatccagaccgatcaggcttggaatcctggtcctaccttgtgacctgggcaggcaacttcacctttctgagcttacctttgatcacctgtgaaatggggttgattaatagtaactactacatgaggctgcagggaggactaaacgaaatgatgtatattacacctttcctttgtgcgcttaatcgttggcgtcggtttggaccttgtaggcgttaagtgctgtctcggtccctggggtttgcagcctgtaaaacaggtctctgccttcaagttactaattatctaataagaaaaaagttcatgtgggcataaataggatggagaaaatggaaacagcagcgttgctggatctgttaaaaagcagttagtatttggtgtgtggtattcatggaggctgcacgggcaacttcttcagagacaagctcagacttgaaagttggagcgcttcggacgtggttggtgctacgaaatgccaaaatagtattggtacttcttcagaactatataaaaactgagctaaaattcatgcattttgaatggtattttcaatagtattttggccacatttactagttagtggaaatattcattttcaaatgtttattcccacctccttactgctgccctactttgaggtcggagataggctgattttgttggttcaagaaggtaagagtgctgcacggttacagatataccagtatagatgtgcagcattattgggatgagtagctgggttacgataataagggtagaacagtaattatgaaacagagtggaagattttagctagaagttgggcattctaggattaaagaaaagtcttgaagggtaatttgtatcagaacctcgagtttaaagcttgaaataaaaaaagtattaaagctaaaaggattagatttaccagctatcttgacaaatactaaattgcagctttattcatggtttgaagtagaagtcctattcagtaaaacagtgctgtatctctgttaaaccattattaaatatgcagaaaggaaacaggaaaacttgtttttcagtgactatatcttttaattggcattttcagaatgttctcaatgtgacttatatactaaaagtaaaatggaaaagtactggtaatgggtgttcaaaatagatatactttatttatttatttatttattttttttgagacaggatcttgctctgtcacccaggctgtagtgtagtggcgcgatcgcggctcacagcaacctctacctcccaggctcaagcaatcctcctacctcagccccccgagtagctggggctacaggcatgccaccatgcctgcctaattttgtgtgtgtgtgtgtgtgtgtgtgttttgtagagacaaggttttgccatattgcccagactggtcttgaattcttgggttcaagtgatttgcctgcctcagcctcccaaagtgttaggattataggcatgagccactgagcccagcctaaaatagatacactttcttaaggttttattgaaagccaaaaagttctctgttctgatttattagtttttgaaatactctgattttaa

SEQ ID NO: 587962 - DNA, 4001 bp, Homo sapiens
cactctgttacccaagctggagtgcagggcaagatctcagctcactgcaacctccatatcccaggttcaagtgattcccctacctcagcctcccaagtagctaagattacaggcgtacgcctgtattttgtatttttagtagagacgggattttgccatgttggccaggctggtctcgaactcctgacgtcaggtgatccgcccaccttggcctccccaagtgctgggaattacaggcatgagccatcgtgcctcgacaaaaacagttatttccgacgtgtgaataccctctttaaactagtttccagtgccaatgaaacattttccataattttagattccttctgccaagccatcagaaatgtgggtggggagctgggcatgtaatcctgttaccatcacctgacctttccctacatttagaaagaacatgtttacagaaattccaattaaatcaagagataatattaggatatcctgaactgaatcctctaagtgttctatccccttctccaaggggtaacattattactctggagacctctctatgttctacacactcttatttctatagggtccatctcacatgatatcaaacatatttaaaaaatgcatggacactcccctagtaaacacagatggccccacagcaaaaaaataaattaactgaaaagatatttaacattttgcttttgtaattatttacctaattataaaagataattagctaattacctatggctaatctgtatagtttacccctggatctgatttcttacctatcatctgcgtatagctgtcaggaattcttgcaaagaaaacttaacataaatgtaattaaaatttgtaaacaaattcagctgaatgaaaatgttatgtcacattttacaagcgtttatcataagtaattacaactctgcacttttttcctattttcaagagaatatttttgatcctatcacttaactgtgctacctactggataagacagctctgaaagctgtggggcagtttctttcgaaagagctttctctatgcacaggtaatgccataataaataaagatccgtgtgagtcattttattatgatccatgttgtaactgtccatattatcattattgtgtgctgaaaagataacgatttatctcggcagtacctgaagctttctccaaaatacagggtccttaaagcttagttcctagagattgggggcaaaaattctccctgatttcccagccaaaaaacccttaattgctacgatgctggcctcccatccacggcaagggcgaaaagtagtgatttcttcgtttaaaggcctttgtttctattttaaatttacccctaagaccatattaaaacacctggctgctctgtgaccctggtggtggcaaaacccgcgccaccctaggcatcgcccgtgggctccgaacgcgtcaacccaggccgtgagcgaagcctgcaaccagggcctgttccaggagcgcgagaaacggctgccgcggcgacgcgcgccgagaacgcgcgatcgggcggcggttcccagcgggacgcggtgggaaacgcccgacacggccggccccagaccccacccgcccctcgcgcggacacgcgcctggctccgcccccggccccgccggccgcgcgcccccaccccggctgagaccggccccgcgaggcgcgcagggtcctcacttgtggaaagaaacgggcttgtccttgtcgtagcggttcttgcagccgtaggcggagcaggactgcaccatccttccggtcctcaggcacttcacttctgccgccgcagaaggcaggggaagctgttctcagtgtcgctgcgctcggttggattccctcgcttcttttgtagctttggccaacagttacagtgatggtggcctccctcgggggtgactagtgtgcccgttttgttgtttgcattagcagaaggaccacagccatcgcccgtctcccatctccaagatggcggaggcagcttcaacctcacctctcgcgaggggtgcgtcccactgtctctgattagccccgaggtcagaggtaacgtttcctgggaagctaactattggctgaggccaggtgtttccggcggtggcttcagagttgccgaagtgggcggagccctgagcttccggcaggcaggaaggaactgcttgtggggggaggaggcgcggcgggaggccggattcctggggcatcctccagccccgggctgttcccgtgggttaattgatgcggaccttttctggggcagcttacagtagggaacaactagggcctcttggagaacaggtgtaaagccgaggtcgttggctgattgcgcccatttctttaaaagggcggacacagatggtgtatgattaataaaattgtggaaccttttcccagagtgctaatctttatcccattacctgtgtcttcaggtatcacaagtttctgtgagagccaacgtgacagatttttagcaatgaaaaaagacacactcgccaaatcatctcaattgccaacgcagaagcgttttatatatatgtatgtatatgtatgtatatatgtgtgtatgtatatatgtgtgtgtgtatgtatatatatatatatatatgtaattttttaaataaatagaggcgttgtctccccacgttgcccaggtcagtctggaactcgagctcaagggatcctcccatctcgacctccccatgggttgggattacaggagttgagccaccaggctgtccctccccagaagcttttctgaaggctctccattgctgtgatttccatgtgctgtgttgcaaatagcgaactgctgcagcaattttcacacctgagagagaatatgttagaggggttcgaactagagcgactctgtgttgagtgagggctaggaaaatgaggctgggacttgctgggctgcattcccgggaagttaggtattcctagcctctagatgtgtataccattaaggcaacagattgataatgtttactacacagacccagactaccaagtgtccagatatcccgatattttgagaacagaagcattcctaattttgctttaaagataataatattgggctgggcacagtgcctcacgcctgtaatcccagcactttggaaggccgaggcgggcggatcacttgaggtcaggagttcaagactagcctggtcaacatggtgaaaacgtctctactaaaaatacaaaaattaaccgggtgtggtggcacatgccctcgaatttcagctactctggaggctgaggcaggataatcgcttgaatccgggaggcgggggttgcagtgagccgtgcttgcaccactgcactccagcctgggcgacagagtaagactctgtctcataaataaagataatatcgattcttacataatatagtaattaatcctttatcacaaacccttgtagcaaagcacatctccccatgatctttttttatcctatatataaactaagtgttgtacttagggtggacgcgttcctcctcttactttcgggaatgccctactctgtctgtggagtagctgtactttcaccactttacgttcttaataaacttgcttttgctttgtactgtggacttgccctgaattctgtcttgcgtgagatccaagaaccctgtcttggggtctggattgggacccctttcctgtaacagttttacttcattccctgctccttttctttatatagatctgagccaggcagacctggagagcggactgttgagtaatcccttggcccttattctctacctttcctgcccttttaaatgttgctgtttccccagggttccatcttctgccctcctctaactcctaaacaccctgctccttaaactgaaccaaataccataattctctcatcttttatttcctttgtatatccgttctgcctttgggattatcatctgtgaattatcatctgtgaattatctgttcaacagttgtctaaaccagaaaccttggagtcatcttg

SEQ ID NO: 587963 - DNA, 4001 bp, Homo sapiens
aaagagacccagacttgggagtgtccagatatcccgatgtctggagaacaaaggcattcctgattttgaaaccccgtctctactaaaaatacaaaaaattagccgggcgtggtggctggcgccgtagtcccagctagtggggaggctgaagcaggagaatggcgtgaacccggaaggcggaggttgcagtgagccgagatcacgccactgcactccagcctgggcgacagagtgagaatccgtctgaaaaaaaaaaaaaaaaaaaagaaaatagtaatattgattcttgcaaaatatagtaattaagaaaattactcctttatcacaaacccttgtagcagatcacatctccccatatatacaagcattgcacctagggtggacgcgttcctcctcttacaggaacatgctactgggtctacggaccagctattctttcaccgctttaccttaataaacttgctttcactgtgcgctgcagactcgccctgagttctttcttacacaagatccaagaaccctcccttgaggtctggatctgaatccctttcctgtaacatcaggactgagatgagacgttgaccctcgtctgctcgggaggcacctgtccgagaccggagagggcagtgccctaagggcacaccaggggtgcacaggccctggcttcctgcacggacgctccaggcaacttttctggcaactggtctggccacatcggcctggtggccgtccccagggccccaggtgccatgctgcaggggcggttctgccctgctgggaggagcgagccctgggaggtgcatggccctcctctctccaactgcagaaaggccagaaggctttcagctactcggctcaatacctcaaccccaaacccaggtgaccagaacccagcccttcagctctaagctgtgtgaaaggggggctcaggtcctcgggaactcctaggaacctcttctaactgatcacctctccaacctatattcaggaccaaggaccagagaggtcaacactccagccacagaacagagtaccaggagagaggagaggggtgaacacgaaaccgtgaggggccaggttaagaaatggcaggagggaagcacgctaagcccgactatgaagagttgattcggggaccctaggaacccccacgaacaaaggcatcagtgaggaatgcccccggtagagagggaggggcgggagcggtaagaggcaggactccagcagtatccgaaagaggtgcaggcagcgggccttccctaggggagggggccagggactaggaggagcccccggaggtcccacaaaggccgtgctccggggccaggggcgggggccgctcaccctgcgctggcacaggtgctgcacgacgcgctcgggtgaggtgcccagcaggtgctgccggaagcgcagcagcgcgcacacgaagccgtcccgcaggctgacaaagcgcgcctccaggtagaacgcgcggtcgtcccagcccagcaggcgggtgcgcacctcgaagggctccagcaggcgcagcgagcggcggtggcgcgcgcacgaggccgccagcaccgtgtgcgcccgcaactccctcagcgccccgagcaccccgcagcgggtcaggtgcgcgacgcgcgcaaagtcggcctcgcgcaggtagcgcgcgttgttcatgtgcagcagcaggtccaagtccgagggcagcacgcggcccgggaagcgctgctcagctagcaggtcacggacgcgcggctgcagcaggcgcgcgcgcagcacggcgcacggaaggcgcaccaggtaccagacgtccagcagcgcaaagacagcgagccccagggccagcaacgccaccagcagccccagcatagcggcggcggcgggcgcggggtcctgcggagtccgtggcgccggtgccggtgtccgcggcgctggttacggtgcccgccaggcctcctgggaactcacgagcgcagcgcgcccggagcgaaccacagcgcgagggcggccgagggggaggggcccggagccccgcccaccgtggcgcgaccttctcagcgccctacgtggtccgtcccgccgtccaggcccgcgccactttcgcgttccctggggcggggcgggcggcgcgctgagcgccacagcggcacctggcggccgtgcgcggcgctgcaggcgcgagggtgcacgcgcgccccggcgtctccgccttcccagcagcgcgagaccctcgccaggctctgaagacgcggcctggccctggccgttcggcccttcgtctgagcgcaaaggctccagcacctccgcggccgaagccgcgggacttttcgtggaaaatgggacccagcccgatcgccagcggcgctgcagcggactctgcgggaacctagcttctgctccaggacctccagggccaccccagctcgcagggcgttcgcagcggctcagggcgaatcacgctcatggtccccgtgcgcattttcagccccagccggtacctccttactcgccctcacgacattcattccaccccctaaaggtcctgccaaccccaggctcttcccgagcattcccgcccttcctcccttttgaaaccggagcaaatcacggccgggcggaagcgggggagcccgggtgagagtcagtgactcagctgcggactccaagtgtcgccggaggccctggggcgcaggcccagcgggctgtcgcacagctcggctgtcctgtgccccttcctgacgaggctggggaggaaaggcggcccagagaaggccggaccagctctccccgtcagccccaggctctcgaatgacagcggatgccagcgaccggggatggggtcccggaattgctgggttaaacaagctccggattcaggcctgggcctgggctggggttccagggttctggaccgccctcaaagaaggagctccctggggcggcacctggctctgcttgatagccccagggacagggagctcactacctatcagggcagctcccccagtgccgagaccagctcggtcctggagaccctaacccagcggtgctagaggaattaaagatacacacagaaatatagaggtgtggagtgggaaatcaggcgtctcacagccttcagagctgagagcctccaacagagatttacccacgtgtttattcacagcaagccagtgataagcacagtttctacagattatagattaaaagtaccccttagggaaacaaagggatgggccaaaataaaggggtgggtttggctagttatctgcagcaggggcatgtccttaagtcacagatggctcatgctattgtttgtggtttaagaacgcctttaagcggttttctgccctgggtgggccaggtgttccttgcccttattccggtaaacccacaacctcccagcgtgggcatcatggccatcatgaacatgttacagtgctgcagagattttgtttatggccagattttgggggcctattcccaacaccctagcattgctcacacttgtccctgaagtgtcaccttgtcgtagctgggctctgagccctctgccccagggaggggtggccttttgggctgaagggactgaggacatagccgttgagcctgttggccattgctcaaagaatgcagcctcctggtcacccatgttgtccccttgccaacaaaaagagtgaaacactgtgcaatgtttgaagagatttattctgagccaaatctaagtgactgtggcctgtcacacggcctcagaagatcctgagaacttgtacccagagtggtcagcctgcaactgggttttacaaattttagggagacataagacatcaatgaatacttgcaggatggacattggtttggtccagaaaggtggggacaactggaagtgacagagggacttctaggtcataggcagattcaaagattttctgattggcaattgattgaaagagttaagttgaccgggcatggtgggccatttctataatccttgccatggggaggctgaggac

SEQ ID NO: 587964 - DNA, 4001 bp, Homo sapiens
gagagatgggagactgtgtgtatgtcccctccctccaagtgcagcaggagaaaggtcactgggctggcctggtcacacaccgtcataggggcctgctggggtatgcccgatgccccccagcctccgggccatgctgatgagtgagcgcaactgcaccagcctcagtggccccacctctctggggtcctggttctccagccaccgcagagctgtttctagcccccgcacggcctccccggcagtcggcactgaggtccctccatagtcggtggcctcctcctcgtcctctccgccccccatggcagagggcagactggctggggccggaggcgctgcagggggcagggctgggcccacctcctccctgcagccctcgggcggacccccatcatcgtccaggtgcagccactccgcaacctcctccggagccaggcacttgtaggccagagccgccaggtgggtgaggtcgctgagcaccctgctgtgctcggcggcttcctcggcctgggccggctgcccagcactgtcctcgccgggccggggctcgaaggcagcccgcaggcccagcagccagcagcgctcaatgctgcccgcctgcaccaggtcccaggagaggccagccaggtagagcatgtccttgagcatgaagctgcgcatgaagtccagcggggagccgctggcgcaggacacagccagtcgcagcagctcgcgcttgtacagctgtttgaaggcggccaccacgccctgctccagcggtgcggggatatgtgcccggctgctgcctttggacaggaacagcacccgcacagcgccatccggtgtctgcagctcctccgggggaccgaggggctccggcctgcaccgcacgggggcatcctcgctgtccagggcgggcatactggcagctgggcttgggcagggcgggtgggccaccagcagcacggccttctgctgcaggcagcttcggcgcaggtagcgtttgacgcctgggacaaattcctcaaagaaccagccccgcagcagcgggcggctgagccaggcgtcggggctgtagcggtaggaggccgggaacttgtcctggttgtggtggcgcaggctgggcgggtccggcagccgcccgatgaccagcggcttcagcttgtggctgccggtcaggtttgcggccagcagcaccgttacgcggtcgccccgccagcgccggccacagccccccgccccggggtcccctgcgcccgggggcgcagcctgctccggaagcagcttccagtagaggccggtgacgctggcgctgtaaatctgctcgtccccgtagccgccctcggccgggggcggcggggccggggcgcggtcgggcagggggccggcgccggagggcagcgcgggctcctccttgacgggcgggccgggcgcggggctcggggctgggggcccggcctcgccgtagaagcgctggctggagatgccgtggcgcttctgccagcgccagaaccagccgtggctggccttgaaggtgcactcgggcccgtagatctggcgcgcgaaggcctcggcctgcgcctggatgagcgggccagacagcggcaccccgtgctggcgcagcgccaggaaccaggcgtacacggcgcggtcgatctcctcctcgttggccagccgcatcttcttgcgctgagtgcccacctcaccgcccagctgctccaggaaccagcgcagcttgggctcgtccttgagccagccgcgcagcgtcccgcccggcacgccgaagtcgcggcacacactggcctgccgctcgccgcccttgacgcgctcgatggcctgcagcttgtccttgatggagtaggccttgcggaaggccatcttcacggccacgcggggccgcggcccgggcgcggggggcggcggccgtgcagcggggacgggggctggggcgggcgcggggggcccgggcaggggacggcggccgcggcgcggtaccgggccggccggggggcccgcggggtacatggctgcggcgggggggacccgggccgcgcgggtcgcgggagccacacgcccagccgctcggggcggggcactcgggggcggggccgcacgggtccctcccctttgtcccgcagcttggcgggcgcacgcgcgctgacctagcccggcccggccccgccccgcgcctgcgcgctggccgcctcgtgcgtcactcggcgcttgccggctgccggacccgcccccaccggcgacaccactggccgcgaagcgcagggggggcgcgcgcgctgccgcccgttcccagcacttgtgcagactcctccggggaagagcggcctccgcggtcatctccaacggaattctgcctttgaagtgtcggggcacggcgcgtcgagggtcctggcggccaggcggggcgtgtgcaagggtcgcgtcccccccccgggcccccggcccgtggctcttggtagagcccagtgcttcatttcccgtgcgcggcccgggcggccctccctttcatcagtcttcccgcgtccgccgattcctcctccttggtcgccgcgtccttggctggcgtgtgagtaccgcggcccccgccggaaggagtcgggcgcgacagagacgcccgaggggccgggagggcgggcggcccgggctgcgccagaagctcgcgccgttagggactgaggcacaagtgcgccagcgcgggcttaggggccgtgggccaagtgcggcacttggggcgagcgcagagaggcggggcgacggaggccacgtggccggcttggagggcgtccgcgggacgggggcgccgggagcactgtctcacggcgcatcccggtcgtggaagcccctcggccaggctgctggggcctaaggcctgtgtttgctgccgtctccgtgggagaccagacatctgccccagctgtttctctggcctgcagaccttcgtacaccacgtctttgtcaagcaccagttactgcacgcatcagctgagcacggaggggataggcacggacgcaacacttttggaacttagacgctagtgagcacggaaaggaataagcctgtactgtgactgggtcaaaatttctgtctcttgatttggatagggtggtcgggcagtctctgaagggggcggggatgctgttgctaagaagtagtactttcagaggctttaagtggaaggaagaaggcaaagggggcggagtgggttggggacctgatgagacgtcaggattggtttccagaatgaaggaccgcctggcagcagaagaactgtgtagctaaacttggggttgtccctgcccgacagggcggggtgcttcttaagttgacactgcctgcggctcacctcccagggaggcaggccaggccatctcacctgagcagcctccttctacagctccgcccaccccgtcatctggaccccatgagccttaagcagctggctcgcaggcagttggttacttccggagcccgtgtgtgcccagccccgttctgggggtgggggatgcagctgaggggctgggcaggtgtggaaggagcccccgagcgtcctctgaggaagtagacgctcaccttcgccttctcaccacatgcctcaggcccagccaggctcctagacctgcctctgtagaggctttctgggcgcagtgccaatcctgtgagacagcagcatctcccctgggctgctgcagggttcacacgcagtcagtgctggcagagtgagcgcccagccgacagagcccccgctgcctcccgcctcctctggaggactaggccctctgggctttgctcccgggttgctgggtgaggctgcaaggtttagcacaggtgggcacacgtgcttgatgatggacaaagagtacctgggctgtgccgtgcactggcgtcagccttctgggggctgaggacaggaaatgtggcattgaggatttgtgggtcatcatcctgtgccagtgtgttaaggtgacatcagcgtgttggaagctggtggcagtgagttatgctaagtgct

SEQ ID NO: 587965 - DNA, 4001 bp, Homo sapiens
ttcagtaagagttgcccttttagtcttattactgtcaggtttattcctctgtgtctgatttagtacaaaacatgccttcccatcattctcttaacatctgaccaaatcttgacttgcattatgtggcataataggatggcgagtccatggtggggaggagatacatgaacttcattggttattttgagagattgattaggaactgtacactcagctttagggatattactaataaaccttaatagcgtttttccattccaagaagccactgttaaccaatggcttccgctggaacgctttaatgtcctacaaagacatataccggtagactctatctgtctcctacggacatggtggaacctgtttgcctggagaaaagaaatgtcattggcaagaaaagctctgccccaaatgcatgtgtaacaaagatactgcccaatccatcaccagtgttgcaaagtgcacagacttccttttgctctttcaggaaaggttcatgccttgaaggagagtcaggggtgacattttagtttcaaaatctgtcagtggccaaaggaaccaaagacaggttggtctttgcacctgggtggttttagcacagagattgctccttcataaggaaaccaaatatcttgttcagtcactgaccctggccatactggaaatttccagtaacggtctttctgaggaaattcttcaaaaaactttgtacctcttatacttttatgtaatagcattcagacattcctatttcgttatcgaagggtttgctcttacgacaaaacaaaaactcaccttgagacaaccataaccaagttcctgggatgcagttgcatttccaacatgatccactgggtcttcacattctataaattcatcaggtctgtaattcaccagtaagatcatgatcatcatcatacggtctttgcaaatcgctgtttgcatgcacgtaatcaaaacgggcaaaagacatttcttcatcaagttttctggggttcggtttcaccctgctgacccctttccaagccaattaaactgaagcacagcaggtcaaacggacagccaccaaaatgaaccttttgttggagaagggaggtgtttctggtcctgtttctataaggattctacttctgccatggtttcatctcttcagtaggcaaacaacaagattctgggggcaaaatttaagccaaagtattctcagtcctctttgcatttcccaaatgccttttcttgtttgatcaaaaagagatgttaaaaaatggcgtgattctgcaacggtaagaatattgattgcttttttaaaagatgccttgtaggcagagacaagtcatttactccatttatgccttactcagtactggcaccgaatcgaccgactaatactctccttgggctaaagggcgcagggcaaagaaagcacaaccttacgcccttcttccagaggctatatgatgttactcctacccagttttcctctttggggatctcaaagcctctgtcactgacacacaagagttttctctgcacgggctgtgagaaacctggttcatgatatttgcctccggaacgacctcagagaggcagggtctgaaaaaatgcagcgtccccccaaccctgccttcccttaacacccatatattcctggcacaccctccacgtccacccgcctcgaccactggtagcttacaggtaagagcagaggatgaccggagagtgggggtcgccatattcccagctcgcagcacccccggggccctccggctgggcggcgccagcggatgtgagctcaggctcagcggtcgcattttgcgagtggctccgagacacacaatgcagcagaagtaaattccccagcagcaaagccgcctggccgcacagaagtaagtaactaaccgggcaaccacctagcaccatcttcccgggcacaggagcggagacccggcctcaaccacaaccccaggccagcagcacagacccaagaactgcgtggtcaggcctttccgcgtagccccgcccgcgtagccccgccaaacagccaatggacgcgcagctcgacgctccgcgcacctccgccaaccaactagaaaaggtcgagcagacgggcggggctactccgccctctgcttctgcttctcgattcctcttctgggtctcatgctcctccttcttttgcgccgaatgcgttctccaatcggatccgtcgacccccctaggtgggcgtgcccggcagccgacggggcggggcggatatgactggcgggccgactagtgctggttgccaccgccggtttagaaatcctattctcgcgccggggactggatttttccctacgtcagcgcagctaggcgatgtcgggagcgagctcggaccgagggctcagttgcgtcagtgccgcgcgcgtgctcgtcgggcgcgcgtgctcgtcgggcgcgcgcgcttcccggccagacttggggccccggcagggttggaaaatgatggaagaggcggaggtggaggcgaccgagtgctgagaggaacctgcggaatcggccgagatggggtctggcgcgcgctttccctcggggacccttcgtgtccggtggttgctgttgcttggcctggtgggcccagtcctcggtgcggcgcggccaggtgggtgtccgcgccccgggtcggttgggacggctgcttcctagggacggggcgctcggagtgaacctgtggtgcctgggagtggaggggcccggcctggggatcggacccggggtcggggggcgcggccgctccaggtgtgtgcggaccggggtcgcacccgaggcgcggggtttggcgccccaagcccttcttggcccgggtcctctgcccggcaccgcttcctccgtgtcctgttcgatggagccgttcccagcgtccccccatccctcgccgcctcgcgcgaccccgggtcccccagacgccccgaaacccgctctggggcgggcgctgacctcggcgggccggagccctgcaggctgggcgcgcccgcgggcgttcagtcctccaaacgcctgcagggagggagctggctctcgctcgtggagttaatgtcgcttggaaagagactgagagatgaaacttttgctgcaggttataatttgaaattttgacgttcatggtatccttgggtcaacacagctaaatttaatggtggaataaaggtgggtgggaggacgctcatttctcttgggtcatttttgtagtaagaatattttgtaaacgatgtgctacctttctatagccaaaccattcttaaaaaatctgtgtttttattgggttcgtactgtgttaaatccggacagataatccctgctcttttgaactcacaggattattgtaggaattaaatcatttgtgtgaaatcgtttttgaattgtgaaactgcccttgactatgtaagatacttgtattggagatgcccaaacatagtggaagcagattgtcagcacgctggcgtctttctggaaacaagttgtttattttggattttgtatgatataattgtttgcatggctgtattttctctatcagcgacagaggatgatggagaatgggagtttttactaaatcattgattgaaagttattcaaaggtgatgatagaagatttcaacgcaggactgttgaccttcaggaaactaattacttgtttttcttatctttggctgctttatttgaaattaagtaaatttgccccagtgtggaaatgttgaaactctgacaatgttttgaatgggaagttgccaaatttcttctggttaaaactacttttccggtggtattctagatggttaacactcaccgatgtttaaggtgaagacgattatacatccggagttttattaatctgtgatttttttttgtgtttgtaaatgtaaataagactgtatttttaaatgttaatataaattgtcagtcattaccgacctgcattaggtgagtggaatatcctgatggtctttaactgtggttttggccag

SEQ ID NO: 587966 - DNA, 4001 bp, Homo sapiens
agattctgactcctggattccacgcattggtcagcacctctgaggtcaggtaggacaagttaagtgctgctggctaagaggggatggagttcccagcctctctagtgatgggccgaacctcagaggcctggctatatgccatcccttgctctcagctgttcctgtcttcgaacacaagctgtggggtttgcttcagtcagctggaaggcacaggctctctgaggtcctaggagtgcgcaacagtggaagacctaggcaccagagggcctcccctgccccctaaaatgatccgtgtggaagctgaggcagctttattgaaaggaaggccagtgagtgggactcacatttgatctgccccagagtggggctgggaggttaccgagaacacagtcccgaggtgggggaggccctcagagtcacacctccaggctggactgagaggagctgggcttgtgacccatggggctcttgcccatcacagtgccagcgccagggggtggccagtggcgaaccacgtgccggtaggaggtggccaggtagtcgaagtagttgatgttgagtttccgggcgatgtaacggcccaagtattccatttgctgtgggagcaggtggcgctcaactggggccgggacaggacagacccgagtcgccgtccaggcgtctccttcccctaccaggctgcatcccccgtcctgcccgaagccccggcgccctctccacggcccccagcaccgaagaccgtgttgtatttaccctctgcgtgcggaaacggccccacccaaagaccttaaacagtgatcggtgtcatcgtgtcctgaggagggcgcgtgtctgggcgggacccacctcgtagtgctccgacagctgcaccagcaccaggggctccaacctgtggccgccgaggaccaggtggaagaagcaccttccgtgggctgcggggagagcggacttagccagcctggccgcccctccgacctcccaagctgcctccccgtccctggcgcaccctcccggcccgttaccatcggagctgagcgccaggcgcacgtagaccagatgcaaggggccctggcacacggtgcggccctggatggagaagtggtacacgccgcgcgtgtggttcagcaccaggcggcgccgcggcagcgacgagatcacgagccacaggcccacgcccacgccgtacacgaggaagacccaggtctcttgcttctgcacctgcgggcgccacgcggagagtctgagcggcgcggggccggccctcaggggaggagggcggtgggggtcgggcccaggggctcacacctctctcagggagctgaagctgaccaggaccacgctgatgatgaagagcagcatccccttccacagtgtgtccaggtagtattcgagcacgaagactgggggtggcgcggcgcgtgaggacgccccggccctgcccgcagccgggggtggcggtgccaaggcttggcccggactagctgggtccgcgcagggctcgcggaggcgacgtctcgcctgcggcctctccgtccccaggagcaccggccggccccacccagggccctggccctgcctctgcccacctggctccgccccattcaggcctcgggcccgtctccctcctcccccgccccgcccttcccagccccgccccgccccgccccgcccagcctcgcgcgcaccgtttggctcctgctgcacgaatgggtagaagctattgttcttgaggcgtctggccaggtggcgctccgggcaggtgagtcctaggaaccagagctggaagcgccagccgatggaggtcgtgggcaggctgccggcccggcccttaggcatctgagtcaggcagaggtggtcagcctggccgctcgtccgctgccgccgcccactgcccacagcggcactcctacctcggtgagcaaattctccagggctgcaggcccaggaaggagcaggagctcacaggcgactgacagggcagcgaggccagggagcggcccagggtggaccgcggatgggttctagaagttctgggcaggttctagaaggggctgctctgttgaccacctcttagggagtccagggtgaggtcctgcggtaggcattaacttcttggccagtccatccactggaggccccctgtatggcctgttcacagtccccatgtgaagggtggatgggtggacaccctaggcctgagctggagagaaatttgcaggcggcgaccactcagtgagccccacagctgggcggggccccaccccctcccaccccccacccacatgcaaccacagacaagctcaccagtgtccccgaggacggaacacacacactggacccagcagtgggcaggcaaaggcatggccacctgcaggctcaagagcccatgggaccaccctgaccccacaacacacaggctctgggccggctgtagccccagtggctccatcaggtataacctgttgcccaaccctaccctgaggaccacacacacagaactcctaaaaatgttttattttaacaaaatgctcaaatatctgaaattgggcaaaggtggagggtgggcaagctggctgaggtgtcccaggtctgtggctgcctagctgggtgaggggctggtgagcagctgctccagacaccactggacttcctccaggccccggtaggcccgcttcagaccccggggaaggcagcggcaggactccaggttgaggtagagcaggcccgggcagccgctgatcacagagctgtggggagggcagaccacaggaagttgagctgttgcctcagaagggctgggccaggctagggagctgtgcctgctggtgttcgacacctggctctgccacccatagccaccaaggccaagcccagttcccctggtgtcctcaggcccaccccacgcaggggcttggacagtatgcatgcccctctgacccctggaggtctcaggccaggcaggacacaacttccaggccccaggcagacacagtgacagccacactggctccagggactggggtaggggatgctgacctgacagtgcttggtgtgacccgggtgcccctgaggttaagagagcacagggctgggtgtgagcccccaggggtgcttaagaaggcagccagggcctgctccaggtccttctcactgaacccctggccactcaagtccagttctcgcagtgtatggcaccacttctgggtcaaaaaggggctgccctccttggctagagtcagccggtctgacgtgccatacaggcccagatgaagctgctccagctctgcagtgaaaggagtgagcataagctacaaggtgacaagggcccccacacctcacccgcccggccaccacccaggactgctgaccccgacatggcagatcctgaaggccagccggcgtgatgcgcgcacagccacgaagatccagtaagcgcaggttgggagagccgtggagtaggcggcccaggacctcgttgctcacaaagttgcaggttgagctcgccaggcagagctcctctaggctagggaagcctggtccgggagccacccctcgtcccggaggcttgggcagccacatcaggttcaacagccgcagcacctgggggcaaggtccaggctgtagatgggggagggtgtgacaggtgggagaggcagggcgccaggtacctggagctgagggcagcctttctgcagagcctcgacaggcagctgaaggggaatgctattacggttgatgccggtgctcacctccaggacctggagctgggggcagcagctgccctgcagagatggggggagggggtaggtcacagggtcagtggcctggcagtccccagctcagcatctgcctctgctcccaccaatgccaacttaccagcagtgcgcccaggatggctgtcgtctgggagctgtaggtcagccacaacttgcgcattcgggaccctgcctcctccaagaagctcaccacagctgtggactccacctggggccccaatacaa

SEQ ID NO: 587967 - DNA, 4001 bp, Homo sapiens
ctgcatcccccgtcctgcccgaagccccggcgccctctccacggcccccagcaccgaagaccgtgttgtatttaccctctgcgtgcggaaacggccccacccaaagaccttaaacagtgatcggtgtcatcgtgtcctgaggagggcgcgtgtctgggcgggacccacctcgtagtgctccgacagctgcaccagcaccaggggctccaacctgtggccgccgaggaccaggtggaagaagcaccttccgtgggctgcggggagagcggacttagccagcctggccgcccctccgacctcccaagctgcctccccgtccctggcgcaccctcccggcccgttaccatcggagctgagcgccaggcgcacgtagaccagatgcaaggggccctggcacacggtgcggccctggatggagaagtggtacacgccgcgcgtgtggttcagcaccaggcggcgccgcggcagcgacgagatcacgagccacaggcccacgcccacgccgtacacgaggaagacccaggtctcttgcttctgcacctgcgggcgccacgcggagagtctgagcggcgcggggccggccctcaggggaggagggcggtgggggtcgggcccaggggctcacacctctctcagggagctgaagctgaccaggaccacgctgatgatgaagagcagcatccccttccacagtgtgtccaggtagtattcgagcacgaagactgggggtggcgcggcgcgtgaggacgccccggccctgcccgcagccgggggtggcggtgccaaggcttggcccggactagctgggtccgcgcagggctcgcggaggcgacgtctcgcctgcggcctctccgtccccaggagcaccggccggccccacccagggccctggccctgcctctgcccacctggctccgccccattcaggcctcgggcccgtctccctcctcccccgccccgcccttcccagccccgccccgccccgccccgcccagcctcgcgcgcaccgtttggctcctgctgcacgaatgggtagaagctattgttcttgaggcgtctggccaggtggcgctccgggcaggtgagtcctaggaaccagagctggaagcgccagccgatggaggtcgtgggcaggctgccggcccggcccttaggcatctgagtcaggcagaggtggtcagcctggccgctcgtccgctgccgccgcccactgcccacagcggcactcctacctcggtgagcaaattctccagggctgcaggcccaggaaggagcaggagctcacaggcgactgacagggcagcgaggccagggagcggcccagggtggaccgcggatgggttctagaagttctgggcaggttctagaaggggctgctctgttgaccacctcttagggagtccagggtgaggtcctgcggtaggcattaacttcttggccagtccatccactggaggccccctgtatggcctgttcacagtccccatgtgaagggtggatgggtggacaccctaggcctgagctggagagaaatttgcaggcggcgaccactcagtgagccccacagctgggcggggccccaccccctcccaccccccacccacatgcaaccacagacaagctcaccagtgtccccgaggacggaacacacacactggacccagcagtgggcaggcaaaggcatggccacctgcaggctcaagagcccatgggaccaccctgaccccacaacacacaggctctgggccggctgtagccccagtggctccatcaggtataacctgttgcccaaccctaccctgaggaccacacacacagaactcctaaaaatgttttattttaacaaaatgctcaaatatctgaaattgggcaaaggtggagggtgggcaagctggctgaggtgtcccaggtctgtggctgcctagctgggtgaggggctggtgagcagctgctccagacaccactggacttcctccaggccccggtaggcccgcttcagaccccggggaaggcagcggcaggactccaggttgaggtagagcaggcccgggcagccgctgatcacagagctgtggggagggcagaccacaggaagttgagctgttgcctcagaagggctgggccaggctagggagctgtgcctgctggtgttcgacacctggctctgccacccatagccaccaaggccaagcccagttcccctggtgtcctcaggcccaccccacgcaggggcttggacagtatgcatgcccctctgacccctggaggtctcaggccaggcaggacacaacttccaggccccaggcagacacagtgacagccacactggctccagggactggggtaggggatgctgacctgacagtgcttggtgtgacccgggtgcccctgaggttaagagagcacagggctgggtgtgagcccccaggggtgcttaagaaggcagccagggcctgctccaggtccttctcactgaacccctggccactcaagtccagttctcgcagtgtatggcaccacttctgggtcaaaaaggggctgccctccttggctagagtcagccggtctgacgtgccatacaggcccagatgaagctgctccagctctgcagtgaaaggagtgagcataagctacaaggtgacaagggcccccacacctcacccgcccggccaccacccaggactgctgaccccgacatggcagatcctgaaggccagccggcgtgatgcgcgcacagccacgaagatccagtaagcgcaggttgggagagccgtggagtaggcggcccaggacctcgttgctcacaaagttgcaggttgagctcgccaggcagagctcctctaggctagggaagcctggtccgggagccacccctcgtcccggaggcttgggcagccacatcaggttcaacagccgcagcacctgggggcaaggtccaggctgtagatgggggagggtgtgacaggtgggagaggcagggcgccaggtacctggagctgagggcagcctttctgcagagcctcgacaggcagctgaaggggaatgctattacggttgatgccggtgctcacctccaggacctggagctgggggcagcagctgccctgcagagatggggggagggggtaggtcacagggtcagtggcctggcagtccccagctcagcatctgcctctgctcccaccaatgccaacttaccagcagtgcgcccaggatggctgtcgtctgggagctgtaggtcagccacaacttgcgcattcgggaccctgcctcctccaagaagctcaccacagctgtggactccacctggggccccaatacaagagcacccgtcaccccggcctgggttttttcagggccccttgggacacagggctcaccatggagtgctgtaggtccaggctatggagctggcagcaggctttggctagcatgaccagagcgtcagcagtcacaccgtggcagccggagagcttgaggaaagtgagccgaggacagcactcacctaccagctgcggggagacagaggggcagctggggttgggagacgacaggctaagatccacaagggaaacagacaagtggctggtgccaaccccactctaccgccttagctgtgacctcctttctgcccatgccaggcctacttgggtgtccccgcctctgatacctccctgctggaggaaacagcaggaaaagagaaccaggcaggcaggcagacatccccacggagcagcgttgggcccccaaggtgcctgacccacttcctagagtactgaacagtcccagagtgtcacagctgatgtgcaggacagcctggagctctcaccttcaacacggggtgtacctgagacttccagtggatgagggtcagcctctggagctgtgaaaacctgggccgacagcggaggcagagctgcactaatgttcccacacgagtccttcccacccaacaccttggtgcagggagacggaaggagcctggagccaggggtaaggaa

SEQ ID NO: 587968 - DNA, 4001 bp, Homo sapiens
taggttaaacaaatatatggaaaataataaagatgtctataagctgatccctgagtgtagccatttttaaaaaataacttatccactagttgagggcatgaaaataggttataggacaaatacttaaattgaaactttgtctcctaataaaccgccaaacattttgccataaaaggctgacttgatgaagttgaaacattcattagtgagtgtttaagtctattctacataatacgatttagataacagtaaaatattcatatcaaattggcccattagaggaaattctcttgcctggtgtcctctgatacaagtttaatgctgaccaacaaaaatgacctgtaggttttctgtgggcaagtctctctctgtgccttatttctcaagccatggctcacactgaattatttacagctaagcatctttttcctttgtttttcttcttgttaagtatggattaagatctagatagtttattttgaagttacaaaatgttaaatagaaattttaaatactaagcaagttcaacctgctctacatcagctctaattccagacttgaacttaaaaacttgtattacaagaaacattacctacttatattttcaaaatcattaacttttgcttccttgggtttttaaactttgctcatatttagccaaaaaaagagagagatgcacttaaggaacatttgcaagtgccattttgaccaatcttttcactaacctaagtgggtttttttaagtcttgccttccattttcttgtaacgcctgactccaccttatttatttactatagtaatcaactaaaaggcttagaacaacgatcgatttttaaataaatcgaatagtatggtaaatagattccatatttctccagatcccattgcatttaatctttttttattcttcttgagaaaaaaatagaaatatatgtattattaatttgggttactttttacaagttaatttcaatctcacccagatatgtgttaaaaatatcccatcttcccttctatgagaagtaaggtccttccttctcattcacaattaaatctaacacatactccttgaaagtaggagtaaaaaggaggggcaggaatttcagacatattaggaatattgattaactgtattcattttggatatggcaattcactgagtgaacagagcactgttgggtgaatggtagcagaagcatattgttcaagctaaagccctttcaaggacagatgccaaggtgagcaatactcctggtttctcagcaacggaaaaagatttgtgaatgattgtgaaagatttgcaccacctcctagctgcgcttaggggctgttctgaaaacagctaagcagagcttgggaaattcatgtcacatactgtagccctgggtaagaagtggtgaaatacacacacacaccatcaccaccaccaccaccaccaccatcaccaccaccaccaccaccaccatcaccaccaccaccagaaaaaccctgcggagaagctatcaggcaggcgggcttgcctgggaaggcacagtcagcatccttcctcagcccaagcgagaggctcacctccacctccaagctagagctcccaggtctttatccttctgggcgtttccttgcaaatctacttccttgcaaagtagagggatctacgctggccttacctctggggctgctttcttgcaagtacggtggggcggtgggagtgacatttccggagtgggatgctgacagcagaggcgagcgttcgtccaccccatcagcagccatgactgcggcagcggcggggcctggggaggccgagccggggttgcggcctcggcggagtggtggctactgctgctgcctctgctgccgctgctgccgctgcagctgctgctgctgccgcctccgggagggcccgggatgtgtcacaaggcaggaagcggggggaggggaggggagggtgcaggaccaggaggcgggggaagggaagcgcgctgggaggcatggctgggggaggggaggggagggagaaagaaagaacccgcagagtgggaggagcagcagtggaggagcgggagcccagccagccagagaaaaggggaacaaattaggaccaactgggaaacgcgaggaaaagaagatgccaagtaactgaaagggggtcgagagtaaatgggatggagggggacaagtcctttgctctaggaaagacggataaaaagcagcctgaaaggggctagcgaagaggaaaggcctgtgacttgattacaagaaaactggagcaaaagcagattatcaagtttatctcccctaaggaggaggagggactgactctttgctgtcaaactttgcagcagttatataaagaaaacatcttcctggggttatcaattcctctagggtttttttgtgggaaatcagttttcaacatctgttatctaagagaaagtagatctttgcggaagtgtcagcattccctacttttcctgattgattttttttaacaacaggaatgttggcctgaccggtttggaactctggtaacagtacctttttggaactatgcagtgtgttgccttttacaagtttcattttacaaaataggttgtcatcttagttttggttttgtagcctattgtccctgacacatatacagtaagtaggtttatgaataacgtcaaacaacgaaaaacaagtttcttgagacaaaagttttaaaataatcgtttacttgtaaaacagagttaaaacacaaaaaaccctaagcactgacaaagattctttgcttggtcaaacaagtaaggtttctgaatcttatgctgggcccatctgcacttccttataaaatccagttttagcaaagaaccctactaacttaatttagcaagaagccccattctcaatattgatatttgatcaggttcctcatcctccagcatcccccatgtgaggcctgaactcctgttctgtcttcagcaagaatcccgtttgcttggtttagtcagaatcccccttatccctgatatttccttggtaattttccatctactgcccctgtcctgcatgctcctaggctataaattcccacttgtccatgctgcattcagaattgagcctaatctcttcttcaacatggcaagaccctgctgccatggtccctatacctatcactatagccctaaatacagtcttccttaccatgctttgacaagaatcactgaataacttttttctttaaaaacacagttcttgccatgttttatatgtttttcttttcttttttatttggtggtttgtcatattatccaaaagtagtttacatgaatatgaaaacaaattaaagttttgaggccaggcgtggtggctcacgcctgtaatcccagcactttgggagtccaaggcaggcagatcacctgaggtcaggagttcgagatcagcctaaccaacatggagaaaccccatctctactaaaaatacaaaattagcgaggcgtgctggcgcatgcctgtaatcccagctactcgggaggccgaggcaggagaatcacttgaatccgggaggcagaggtagaggtgagctgagatcgtgccgttgcactccagcctgggcaacaagagtgaaactccgtctcaaaaaaaaaaaaataaataaagttttgaacatgtctaaataaaaatgcaatagaaaaatagtaatgatctaggatgataatttttctgcaataatttttgagtcactcaaaagaaacatttattactcatttactaagtctaaaagataactacgacatgatctcaatcctcaagatgcctgagagagtcaaaaacaagtggaaaatgaggctagctgtagatttcagtgagcatgaggcaaagcagaagttagacatacgaaactatgtttcaaattacattaggaaggatcctcactctgctttctaaagatacattctttcttccagaaaaatccacttaggcatcagctggaaatcctaaggggaaatcaaataatg

SEQ ID NO: 587969 - DNA, 4001 bp, Homo sapiens
tttgcaaaaggcatttaaaagaaaagaaaaaagagaaaggttttaatttcatcacaaagaggcagattggttagtattattcctaattcaaaacaaaatgagaaagtttccagaaactaacaataatttacgttttgaaacaaaataatgcatcagaatcacttaaaatacatcaattcctatggttttgaatgcaattatctctttatttcagtaagttttctttaagtctagctgaagggttaagttcctgggaatctacataaactcttggtagtttagaatcactgaatttggggaacatggtaatctacttttttaagtccttcactttcgaaaagagaaaagtgaagccagacagggtcagtaacttgatccaaagtcacaaagtttgtaaagaccagattcctttcttccaataagatgatctcttcactagcagtgtttctatcctaaatcagttgcatggagatgcacactagctatagaaacctgagtaagcaaaacatatgaatacaaggacagaaaagagtctataatggtgcagatacagaagaaaaatatatgctaactgagcaaaagattatctgttctgttttattcaccaccccgtgatttcgaaatgaagttcctccaaagaaagaaagataaacagtaggattttcttctttacatcacattaaagcacaattacttgaagaagaaaaagcccatttcaaatttagcaaactccaaaatctggagtctgcaactagctcctccactgtttactgaaacacttcctttggtccatgtcgctaaaaacttgaatcaaaaccctggatgtatttatgtaagcaagagagaaagctttcctccctaaatgttgccaaagctgctacaaaagatgacaagtattaaagatgggcatttccattcatgtccctgcatgcctattgttaagagggcttttcatttttaattacattcccatccctaaaagaaacattagttttttatctaacaaactctctttcgaggctccgcgttaggtatgttttatgtgtaggacagacttcccaggctgcgatggaaagtaatcgtaactcctgccgtcaatgtcacttctctgctggtatttatctgatagagcgccctcctagggccgccacaagaccgctcaaaaacagacttggagagggataggccagcgggaccccacttaccgaaaacactgcattctgaagcccaaaaggtatgggtgtcagtctggccagcgccaccactttcaggccgcttcctccctccactacgcgaataaccgcgctcagcttctcgctgctctggatcctggcggccacccaggcggtgaggagccgcttgcagaccacatgggcgatgaaggtgccgatgaggacgcccaccatcatcagacccatgcccagcacgaagccgtacaggtagccagcggccacgttgagcacgatgtagccccagccgcaggggaaagagaccacgatgaagcccacgacgaagagcaggacccccagcagcgagtcaaggctctccacccacagcaggaggtggtgaaggtagcggcggaccagggccagggaagcgaagcacagggcggccaacacgcagaccagcacgaggctccggcaccaacaggtgctgccgaggcagcagcagcgccagtttctcacctcagccacgccgaccaccacgccgccgccgccactcccggggccgcccgccaaggccccgcccggctccggcagctccgaagcctcgggcggaccgtggcgctccagataggcgccgagcagggcgcccgaggccgccgctgctgccgccgccgcgctcgccccgcccccgcggggaaggcggtccgccgggccgtccccgcccgcaccccgcggcagggcccagcgggccggcagctcggcgaggcccgggagggcggcgtgctgcagcagccggggcagcgcctggagcaggatcccgcccgggctccgcatgcctcggcccagcgcgggccctcagccggccagcccctccgccgcggcgcccgttaggcagctgcccttcatggcgcccggttcgcccggcatcgactccctgcgtccgctcagagggtgggagacggcccgtagaagggcgcggagtcagcggaggagcgacggccaggcggggagtgaggaaactcctgccccagcacccacggagcccactccggtggtgcccgccccttgtcggccagagggggcggggccgcgggcgatggggcggagcgggctgtgttctggtccgctcccgtgacgcgctgcccgccaggctgcgggggtcgcggggcgtccgcgtgggccagcggaggcccacagctgcggagggaaaccactgggaggggagaaggagctctagggagagcgaggctgcaacgaggggagagccgggcgacgggcaggggcccaggcgcgctccccgacttcccacaggcgcgcgcatgcctgcgtgtcagggcgcgcgctccccctctcggaccgaggcgaccccagtccgtgagcggcttggatcctcgcccgttccctcctggtcgtttccgcagtaacctcttatcagagcgggcagctgtgagtggcgctcacatccgccgctgccctgtcgaatgggggaaagagttcttgtgttctgaggagggtttggctatggtccttgaccctattcttgtctcagacttgcctcccaggtatcgaggtctccctgtgggtttcatatggcttggtcctttaggagctggaaaaattaggcataaagtccccccacccccttgacagaacgccccttctgactccagaggtcctttatcgagtgccaggcattggtctaggggcatttgaaaaagattcactgaaggacatttttaagagttcgctttctcagagggcagcttctcaaactcattcgctggtttcttttcctctttccgcctgtttaaggttagtgttccccaggtcctcttgccgtcttccttttcagagtttcctgagccatctcatccaggcccaacagctttgatcctgccgtgccccccataagaagtgacccctaagtgaatgtctctgcccacacttcccagcttgtggtccggcctgtggacacatccaggtggaattctgcaggcagctcaaactcagcagagcttggtagatagatgatcaacttgggctctggtgcaaatcacgtttagtaactggtcaaacaatcagtccctgaatctcattgtttctttttaaattgcaaaatggagataatggtacaacttagcttcgtaagagtgttgtgaggattaaacaaaatagtaaagtaaggtgattagcactatgcctgaaatcagtcgtcagtaaatgttaactatgtgatggtatccctcattaaaagtgtgatcccccatagaccgactcttccttctgggtttcatatctcagtggatgaccttccacccagttgcctgccagataacggaccaggacaccttaggtcgttgctgatcaggctcctgcttgctggctgatcaggctcctccatgccattccctcctatccaccctggttgggctgagtcaggtagagtccctactaggtgccaggcaagtgctacatccttcaactctcttttccaagccttgtgactcacacggaggagcagctcttactgctgccacagcatttacctaaagttttacttccgtaaaacagtaccaaggagggatagtgctaaaccattcatgagaactccatttccatgatccaatcacctcccaccaggcctctcctccaacaatggggattacatacagtttgacatgagatttgggcagggacacaaatccaaaccatatcagtcctgcactaccttcccttcaccatcaccctcaatttggtatttcctttcctttcccaggctactttctgtatggccattatcacatttgtcccgttgtattgtaattttttgtttac

SEQ ID NO: 587970 - DNA, 4001 bp, Homo sapiens
ctgcttacatgaggtagataattctttcctccattcctgcacatcagctaaagatatactttcaagtctggcaaatcaaatggcatgatccgaatcaatgtgctctacactttggaatctatgagatgtttatgtacctaccaagtttagagaggagagtaaacttttttaaaactttcaaacacatcagaatgtaatacaaactgaagcaatgtgttttgtttacataactgtatttaagtggcagaaatattttaagacatccattttagtcgtttgctcctttcatcctttttattttctgaacttttagctttttcacctagactcaaattctgccctaccccattctggactccttttagaaatatcctattttaacatgctagtttaaaaatcgttttgctttcatcattcccaattacttttgagcatcagtctgacttttactacagagccacagatttccaaaaaatatacctccttatttatttcattctttcaacctctgggaaaaaccaaaactggagtttaacttgaatctgtctttccatttctggagaaaatgtttcctttggctgctgaaattaacgcaatcagacatgtgtggaaacaagcagctatgagcatccctgactttcgaagctacaccccttcttttggctacccacccatacgtcttcatttgataaccgttcaaaaagtttcttcctgccaggcgggtttgcagcactttctcggagcaggcacagcatgccacctgcacgggtgcacgctcgcaagaaagcagcaagggctaagggacaggagggctggggaggggaggcacggggcaaatcaaaactcaatcccaacagcgttaactggcattttaggccgaagctccggattcggaggctggggaggaagtagctagcgctggcctcggctgcctggcacgacccgcgcccgtcctacctgcctgggggaaactcgggcggcggaaagtctccccgcccccagccgtcccaggcgtggggccagacaggcgaggggggcggaaggggggcggcggcgggggtccaagatccagggccgcagcgggctcccggtgggctggcgagaagaggagggcgtcggggcccccgggctcgccccccacctgccccccttaccttgggcaatggcaatagactcgaagcggtgcagctctttgagcaggcagctcctctccgtggagtgcaggctgtagatgaagtcgcgcgcgccctgcgccgtgttcagcgcctccatgggctccttcttggggtgcgtgcccagccgcctggggccgcccggcaagccgccggggggcgcgagcgccagcagcccccgcccgcagcagcaccaggacggcgggcggggcgcggcggcggcggccgggcccggcctcaggctgcgcgcggtccggctcctcagcagcggcagcagccgggacatggcgagctgaggagctgggacccccgcggccgtccggcaaggcggtttctggcgcggctgaggcgagaaggagctgggctcagctcgaccccgccccgaggtcctcctgccaggcagccgaggcgccgggcaccatgcactccgcgggcccgcgcggctctcgcctcctgttccgtccccacttcctttccaaaaggcccgcggcggctcccgcccctccgatgggaaaaactttctctgagacggccgggcccggacagcgcccggagagggcgggcggtcggtgcgggcgggcgcctcccggctgaggaggagcggcgcgggcgggcggggcgggctagtgtgtgtctctgtcagtctgatcttccagaggatgagtcagccacgcaccgccctcctccagcgccgccctactctcccgccagctttctcaccctctagcctccccacgtccccactctgtaaggttcccgagccctcaaagcagccgcgctcccgagccgcagccgccgccgccgccgctacccctagcggcagcagaagtgggaacggggcggggcgaaaggggaaggaggtgcgggggggcggggaggtgtgtgagcgaggctgcgcaggcgcagtctgcaggctctcgggccgccctccctcctaggggaggagcgtgcacacgcgtcccctcccgcgctggtgcgtgaaggtggaaggaggtagggtgcgccaccctgtgctggcgttaaacctacagatcggaatagggaaaacgagctctggacccctcgcccgccagggtagtacagctgccacccggcccccaacctggggccacatctggagcttgttctgaaaggtgccccggcgtgcggccccgctctggacaggcggagagctgcgctgccaccccagccccgacgggatcacggcgctctgctccggaacgaagcgccccagctgcgcccttcgccaagtcagcgcccaccgccgcttcggccgagcaggccggctctaatgcagtcgctctgggcgccccaaagagaaagcgaagccagttccacccctgcccaaggagggtctgagactgagcccttgacacgagaacagtcctccccgttcagattccagcagctggcatgcaaattgttaatgctagaggcagaggcaagaatgtcatagacctttcctagtggttgcttgtgatttttttgtctctgtgctaaagcgggaagaataatttgattgtccacgatttcccctgatccaggtcctaggcatctttcaaggcccaggtgaaaggtctcctacttcattaagctgtccctaatctcttctaagggaggagatctctgctttatctgaacctgtctaatgacgcttaggcacccttagagaataaatccacttaataaatctgctggagcgtaatcaagatctaaatcccatccttatcataaacagtgctgcactcagcccggaaacttgtaggtagtaaatgtgctacatgtaagtagaatattaaactgaataatggaggattgttaccactaaagcctcctacttctctaactctggttctcaaagtgtgtcccagagctttttagacgtgagaaatagtggaccccacttcacacctcctgaatcagaacgtagacattggacccagtcatgtgggttttaacaagccctccagtaataacacacacgaaagcttgagaaacactgatgtctcttaaacattgaaaggaatcgcttcttttttaaattccaaggtgatgcctctgtgatgtaataacaacaattaagaatgctctctgtggaaatgaaagctttttgagtgcataaagtatatcttccttgtctttgaaacccccttcattccctagtgtgcactggaatcctctgcagagctatttcagtctcaggctcatgggagtaccaccccatcccccccacaatttcctacccccaagatattctgattcactggggtggatcacaggccccagacctgggaagtgaggtttgaaaaaagttcttcagtaagaacccattcccaaccacctccagaatagtagtttagtgtgtagcctccagagacagactgtggaaagttcgatccctggatcaaccgtctcctaactatgtgttagtattagattgttatagtagtgatccccaatgaactacaccttctattatccgctccgttgtgtggtccacctctacattgactgtgggcttggctatttgacttgttttggtcaataaataggaggacatcataaacgtgatatgatacatgtttgctcattggggtttgctgtaatgcttttgctatattactatagaatatttaattctattataaaacaagagaaactaaaatgtagaagcaagtcacttatgagaaaggttacacatagaatgaatggatatgggttgaacatagataaaaaggatggaacaaatgaaaatgctgctttagatagaggcagaaagacaaagtggacttttaagtattaataaggtacagatcatactatcttcag

SEQ ID NO: 587971 - DNA, 4001 bp, Homo sapiens
ctcagcctcccaaactgctgggattacaggcatgagccactgtgcctggcctatacaggacaatttaaaaattacaataacttaaacaatgtcactgaaaaagaaatctgctgcgagaccactttttattagcagctttttatcatgggtaattcagctaggatcaatatttgcaaagatataaaataaatggtaatctattataatctattataaagatataaaataaatggtaatataaaaagtggtaatcagacttacaagtaatacagatagctataaattgggacaattgataacttcacattaaattcccagaattaatattttttatatgacaatgagaagaaacattactgtaaatgtcacaactgttacacagacttttaattatccaacatgattgaaaaatatatttatgttgagaattatatatagtaactatttactaattttttttaaattacgatacaatgaaattactaacaaaacagaaacagacattatttaatctattaatgcaattggtatttcatgaaataattacaccttagatatcattatgaacatcaataatcatataaactgttgacatggtaggtctaagacaactccacttgcatcagtcaaaagaatatacacatcccaaattgcacacatcccagactgctctatatatgccttattcatctaattttcttcataaccgagttattctacgagtaaaaacaaaaacttaaatttttacagctttgtggtttttggatttcagattttaaaagaaatacatttctgttttctccaagtttgcatgaaatttcgctgatctcccaaaacttactctagtaaaaataaaattagcatagtaattttaaagtctgtggggaaacattaaacattaaattatattttgaaaaataaagatatttaacttactactttttacaggtaagttattttaaaataaattatgcgcaccatgttttctgggcactttttacaaataatagcaggtcctccattattagagatcatctgaaatcctggtagacatacacatgaagttcctaaaaaaaaaaaaaaaaaaaaaaaagccaattttatccttgataaataaaaataaagttcccagatagtgaaacttttaataagtctgaagatcttgagaagcagtatagtgattaacagcaggattctggaggcagtactgcctgggttcaaatccagaaatacacttcttgagttccaatcgtagtaatcctactcagttgcatgaccttgaacaagttactaaactctctgccttggcttcctctacaataaaatggagaaaaaaaattggtacctacctcacagggttagtatgagtacaaaattagttattatacgtagaggtcttacactggcacacagctggtattatgctgctaccattttaagtgcaagtataactaaactattaaactacttaactgctgctggaaattttacatttctacgtcactaaacaatatacatgtattcgggccaggcgcggtggctcacgcctgtaatcccagcactttgggaggcggaggcgggtggatcacctgaggtcagaagttcgagactagcctgatcaacatggtgaaactccatttacggggactaggggccgaccaaggcgggagtgttacttttgccagggcccaccgcaaaccgtcttacctcgggcatcttgcctctggttagctccacaaggaacacacgagagggcggagatatcaaagtactggttgttgtcgcacttctccggctgctggaaagggaaagagaaggtctgggcctgtaagaagcgagggaggaacaacagaaggaacgcggtcacggcccgggcggataagagggaccaaaccgccattgccaccccagccccaccgcgcgtcgccatggtaccgacgctggaagcctcacagcctccagccccccatcagcctctgcggcggcttcgctgagctgattggacaacccaagtccgggtaccggaagtcactgctcgtgttgcttggttgctaggttaccaaccctgcgcgaagttggcaggtccagtaaagaatgggttagagaccggttaaccctggagcccagcgatattttcaaacgtgtatagagttcctctacttacgatagggctgccccctccccgcaataaacccatcgtaagttgaaaatatcataatttgtcgagttatagttacatcagaatttattcagactaggtaattttcacgttaaaggaaacatgacttgtagtttaacaatttgatgtcaaaaaaccccactgacttaaaacccagtgaaggattactatagctcaaagactgaaaaaataaaaaaactttcctgccaggtttgagcataggaaatcatgtatgcgagacaaagtacgaaacggaagaaaccatgtttgctcattctgttgccagcgaaatttcacaaagcccctgactcagtgactgaacgcagtcctccagaagaatgccctgaagacaataagtaggatagagcacaagttttcacatctgttgcttgaatcacttcattttttaaaaagatacagtcagcgatcctagctcttgcctcttcctgtacgtaagataacgtgtgacaggattaatgattatgcctctgtaatctataaccagatgtagtctccaaacaaaactttgatgagattttgctccaacgtaacttctgagcacgtttaatgtaacttttgagcacatgcagaactccatcccttgatgtagaaactgggggcagaacagctgctttggaccagtataacataaactctttgaaagactctccagggttgcattcctcagtaagactccgaataaaactaactttgagtctttaaaagcctgatttttttctttagttgacatgtatataaaatgagatcacctttacaccttttgtgaataaaggaatctaagcctggtgctgtggctcacacctctaatcctaacattttgggaggccacagtggaaggattgtctgagcccaggaattcaagaccagcctgggcaacatagtgagactccacctctacaaataaaatttattttaattagctgggtgggtggcacatgcctatggtcccggttgcttggaaggctgaggcgggagaaccacttaagcccaggaggtcaatgagcccaaaggctgcaataagctatgatcgtgccactgcactccagcctggatgtcagagaccctatataaaaaaaaaaaaaaatcctggacaaaaatatggaaacgtttagagttagagaccacttgcgaggctaaggtagaaatctagagtctaaattggagccatggaggaagggagaggcagaagaggatgaataaaggagctattcaggaagaagaattataagaattttattatttggacataggaagtaaacaaacagaatcaaggataacttccaggtttctgatttgggtggctgggtagacggttgtgatattaaaggaagatacctgtggtagatagcttctaagcgaaaacttattggataaagaaaattttaaggtagaaatgaaagttataggaatatttaacatggtgggagctagaggtatggataataatagaaataataggtattaatagcttgtttttgttatcaagcaaatgagctctctatccaatgcatgcacagaagccaatactatgtggcacaagcttttgaggaaaaaaagtctttatttgcacaactggtcagcaaggagataggagtgcattcaaatctgtttccctgatttagagtctggggtaaacttatgggcttggaaagccaagggaagaatttaggaatgtgtcttggcaggcagaatggaggacttgaaatttgaccatttagaaaaaggtacgtagaggccgattttaggcctgatcctccaggcaaatggacccaacacttttgaaagagttccaagttcaggt

SEQ ID NO: 587972 - DNA, 4001 bp, Homo sapiens
aaaagttggtagagtgaaacactaaccacttaaaaataggccaccagaaggcaattttcatgatggccaaacaaagaagaaccaccaatcattaagtatacaacatcaaaatttctcgagtaataaagaaaagaatgactatcctggagagaaatctattgctatcttatttattcagaaagacacaccaacctcaggaatgaatcaacagaaaatgcataaattttggtatgcaaattatatttaatgtaatattatttaatatttcatttttttaaatccacactggtagagtcaaacttattttgaacagaagtaaatgctaaataattgaagcatttttaaagcagttttctacagctttatttagtctcttactcttttagatgttttaaatataaattttcttatttcaacttatagtctacagtgctgcgtggttctttgtttaatggaaaccaacgtctatgggaaaactcattttaagaaagacacatacatatgcacaatgcatgcaaacaggtaacagggaatagtaaatatcacttctattatatttttcagtatcttctcaatcaataaaatggaatggtaacacagttccaatgcagcacacatgaatggcaacacaaaggtgaaagtatccttgcttaccatgccaaacggctgcatgtccatcccacagagttgccactgttttccttgcaccatcccataaattatgagagtaggcttctttcaatacattctttctcttataaatgtgtaagaaaataatagtaaggtagagaagaaagatagtaaagtaaggaagtattaaaagtattagtggtgtaaaaacccacaagagatagtttgcaaaattcaaatagtcctccaactgctccacaccaaaccattcttcgagtatgtgaatcagacaaatcatatagggcacagaatcctgtcctacaccacaggtttgatttttgtctatcatttttcttcaggtgaaaatgacaaattcagtttctttcttcattgccatagcaggtcgctaattttgacactagaagggaaaaataatccagtattattttctccacagctataaagttaaatgttttactctacttaaatagcatatagagtcatttcttaatacccaaaatgagtagatggttaatggttaactttgttgcagatttaaatgtgaaaattataaggtttcatctgtctgctcatgaagtatgtcgtgtttagcttttgaaataattcactataattgagagaagaaaataaagctataattaagagaagaaaataaagctgatgaggaatataatttcagattgattttaataatttgactcacatcttaattggatcatgttgaaaaattagatcttaaaccaggtcacattgagataatttttttttcttctttgagatggagtctcacccttttgctcgggctggagtacagtggcacgatctcagtcactgaaacctctgcctcccaggttcaggtaatcctcctgcctcagcatcccgagcagctgggactacaggcatgtgccaccatgcctggctaatttttgtatttttagtagagacagggtttcactatgttggccaggctggtcccaaactcctgacctcaagtggtccacccacctcagcctcccaaagtgctgagattacaggcatcagccaccatgcccagccatattgagataactctgcacaaaagaaaacatcaatatctacctaattcagtaaaagtaacccaattctttacgaaatgattacatacattaatggatattgtttttttatagagaaacagatttacaaaagttcattatgcaataaaaatttatcagtactgtttttatcttaaatcttaaatgactgaaaatatagctgtataattattttacaaattcactctctaaaacagtcattggacttaccagaagttagataaatatcttgtcccaaacttcaatgtctctattctggaaagcacagtaaacaaatgtaagaaataaattactaagaaaaaaaaagataatcattaatacctagagttagcatttctataaaataaacagcaagagacattcataaatgtttaagaaatatgattataggcccacactggtatattacaattaaaaagtacactcatgctaccattgctttggtgaagacaactctacactgtttagtgccactatatagagccccacctaagaatttattttaaacaaagttttcaaaagctttgtttcttaggagaaaaagtatgaagatatataactgactatgattctttttagtaactttgccagataacctgaaggtgaaacataacattcaattatacaattatattagccctatgataatattttcctacaaaagatttcctttctccatactttgattgtattcttagaactattttatcattattccatactatataatcttactgaaaattatctcaagtcctttgtagctgaggcaaaaaatgaataaatgaaagcaaaggatgaaaggagaggaggagatgtacatataagaaaaatgtattgtttttattctaagattatcttgctaactggcttattaggagggcaggcactgacttgttctcccaggaatgaaacatttcatctaacttccttgtaaccaatagcatttacttgtgagaaatctggtctgttatggttacaggagatgaacatagcaaacattgagcccacaacttgggctttatttacatcatcatctaatcaatccatataaaaagtcaaatcaccagctgggcgcagtggctcactcttgtaatcccagcactttgggaggccaaggcaggtggatcacctgaggtcgggggtttgagaccagcctgaccaacatggtgaaactccatctctactaaaaatataaaattagctgggagtggtggtgcacgcctgtagtcccagctactcgggaggctgaggcaggagaaacgcttgaacctgggaggcggaggttgcagcgagccgagattgcaccattgcactccagcctggacaacaagagtgaaactccgtctcaaaaaataaaaataaaaaaagtcaaatcactataatttacccatgtttgatcatttagaatgcaacatagcaaccatccatcagaactactaaaaaggtcttccttatacttaacttccccgtaacttttccctactggacctagttttgtaccacagaccctcttccattaaacaaccttgtaagtttaaaaacagctgccatgagccacaaaattccttctccagtcagaatccttaattctttcaactacttctcagcccctggtttcttaagctttcagcactcaagaccactccgagttgctgactccagttatctgatactgacaacaccatgtacggtaacccctgtgcctccgtttgctaaaacctataaaactaggataataatcctaactacctcatgagattactgtgattacatgggctaatctgtgtaaagagcctagaataccttacatgtaatcagtgttacatgtttgctatcgctatcattcatagaatcacagcagcttttttggtaactcgatcatactgactcattcagctaaaaatatgctactattttctacatctctacaaactacacttgaaaaaaacctttttgagcccagcaaagattatacatctcatctgcttattaactttcatgaggtgggctaagacatagcctatcctttcagtctgtttcgggaacacagtggatgacatgaatgggcttaggagccagactgaacatactggaatactggctttacaatcttaagcaagttacacctctctgtgtctcattgtttctctgaaaatgaagatgataaatcattctataaagacctatttagcacctatgtaccctaatatgtaccacccatttcctcagcagcaaataaagcaaagtctacaacct

SEQ ID NO: 587973 - DNA, 4001 bp, Homo sapiens
tctgggcaatatggcaaaaccttgtctctacaaaacacacacacacacacacacacacaaaattaggcaggcatggtggcatgcctgtagccccagctactcggggggctgaggtaggaggattgcttgagcctgggaggtagaggttgctgtgagccgcgatcgcgccactacactacagcctgggtgacagagcaagatcctgtctcaaaaaaaataaataaataaataaataaagtatatctattttgaacacccattaccagtacttttccattttacttttagtatataagtcacattgagaacattctgaaaatgccaattaaaagatatagtcactgaaaaacaagttttcctgtttcctttctgcatatttaataatggtttaacagagatacagcactgttttactgaataggacttctacttcaaaccatgaataaagctgcaatttagtatttgtcaagatagctggtaaatctaatccttttagctttaatactttttttatttcaagctttaaactcgaggttctgatacaaattacccttcaagacttttctttaatcctagaatgcccaacttctagctaaaatcttccactctgtttcataattactgttctacccttattatcgtaacccagctactcatcccaataatgctgcacatctatactggtatatctgtaaccgtgcagcactcttaccttcttgaaccaacaaaatcagcctatctccgacctcaaagtagggcagcagtaaggaggtgggaataaacatttgaaaatgaatatttccactaactagtaaatgtggccaaaatactattgaaaataccattcaaaatgcatgaattttagctcagtttttatatagttctgaagaagtaccaatactattttggcatttcgtagcaccaaccacgtccgaagcgctccaactttcaagtctgagcttgtctctgaagaagttgcccgtgcagcctccatgaataccacacaccaaatactaactgctttttaacagatccagcaacgctgctgtttccattttctccatcctatttatgcccacatgaacttttttcttattagataattagtaacttgaaggcagagacctgttttacaggctgcaaaccccagggaccgagacagcacttaacgcctacaaggtccaaaccgacgccaacgattaagcgcacaaaggaaaggtgtaatatacatcatttcgtttagtcctccctgcagcctcatgtagtagttactattaatcaaccccatttcacaggtgatcaaaggtaagctcagaaaggtgaagttgcctgcccaggtcacaaggtaggaccaggattccaagcctgatcggtctggatacgaacgctctacccacgcggctttccccctacactctcgggatcaccacacacttccccttggcttttacaccggaggctcgacctgggtcccggaaccagcgaagccactgggcaagcctagaggcctctacagaggctagagacgcctcgccccaccagatgcattaggatgaaacgcgccgaaccgaaggtttagagcgccaggggagaagaggggcggggagagcaggctctttgacccagaggagggaggatctccacacccggccactctggcgctggggcgcaacactgaggccggcgggaagccgagcctgcccgcgaagagactggggattccgaggcggctcctgggagaccggacgcgcgcggcctccgccgctcccagtcccgccagacccgatgccgggctggagaagcgcgggggccgacgcacctcggataggcgggggcaggggcaggggcagctctcctttaccctagagcggcgacagaagctcttcgggggatcagtggccaagggggcggacagatttgcacggcggattcctccgaagcaacccgtgtgaaagaagccaagcggcggctgcagcccgggccgcgatgggggtgacaccgcccgtggtcccgccccttcccgtggcccctcggagccacttccggcggcagcgtccgggctagttcccggcgcgagcggccgcgggccagtttctatctcctcatccagggcttgcgggcgaggcctgttttaagtctccagtaaccgagcggaggcccggcaggcgcgacccgggctgcgtacgtcagagctgcctccgaagtggtaaaatgtgctgcgagaagtggagccgcgtggcggaaatgtttctcttcattgaggagcgggaggattgtaagatactgtgcctttgctccagggcatttgtggagtaagtagaaaagagaatctcttcatgttctagcacagtcattacccagaaatgtaggtattgcaaacgtggttgtaattgatccctgaaagcagccagaacatctgacccttgggcacggtgatgtttaagaaaaacaaaaccctcagacatgacggagtggtcgcccactgccattatttttatgtgaaggactacatctacttggtaggctgctatgaaaaaatgtcgtaggtgctatatgtcatctcatatttgtaaatcgaggggacatttaaaaattgggggaaagcgacatgtaaaatgaaatctctagtagatatgatgtcataaagtgaaagtttaaagttgagtgacttgctttggttaacgtctttttttaaacctaaaaatctacttaagcccaaatgcacataattaaaacttcaaactagttgagataaaagacttaaccatatttacatcagtttttgtgatatctttattttggggaaatctttgaatcaggtaaaaattgccccacatgaaaaatagctagtatgcaggaataataccgccaagagacttgaattctaggaattgtttcctttatattaaatgcgtgagttaaaccacttgaacctttttttcatctctataacgggtatatttaatctcacatgcttattttgttagagttaaatccttgtggaagtgaattttatgtgatagacttttaatatagtttaatatagtaggatttaagtttgaaggaattcatttttctcgtgtaattttgtggagtaatttgaaaacgcaaaaagaagttaaacttgttaaatttaatgtaaaaagtattgtcgcctttttagtcaggcatgcatgtagtcatacaatcattcagaaaatgttttttgtgctcttgtatatcaagtatgctggtaggcactgaggtacaagacattctgtccttacatgtattgagtttacttcctagcagagaagatcaatattaagataactggttacattattacttggttgattatagttataagtgctatgagagagaagtgcaggatgctgtgaaaacaaataactttccaagggtcacagaggtttctttgaggaagtagcttttggaaagaggtctaagggggataaattggggtgagtttcagtgggagaaagcgttctctgcaggctgaactcagtaaaggccttgagggagcaaaagaaagcctgggaaactgaacaaaatggctgggagggagggcacggtggtgcacacctgtaatcccaccactttaggaggccgaggagtgaggatcacttgagcccggaagttggagactagcctgggcaacataacaacacctcatctgtactgaaatttttttttaaaattagccagctgtggtggcacatgcttgtagtcccagctactctggaggcttgggccagatgctctcttgagcccaggagatccaggctgcagttagccattgtcgtgcctggatgacagagcaagactctgtcccgaaaaaaaaaaagaaaagaaaagaaagaaaagaaaaaaaactgggaaagaaagaagatagggtgtgcacagtaggcagggtcaaaacccgcaggactttgtagactataggaaaaccttaagctggggaatgacatgatcagatttgcatatttaaaatactactcagg

SEQ ID NO: 587974 - DNA, 4001 bp, Homo sapiens
tgtactccaacctgggcaacagagcacgactccgtctcaaaaaaataaaataaaattgtaatgaaaagaacttgtcacatgaggtgacataaggaattctcccaaataatctacagagttaaagaaataaattggctgacagaatggcttgccttaattctagtcacaagtagaaaactgcagagctggagtttgttagcttagcatcccagctctcaggtttctaggtctagtgtgaccttgaacaagtaaaaatagtaacagtttcttctactccactgttaatgacgacatcatttccattctatttaaatgcaacaccttttcaaaaaataaatacatttagctggtgtaatggaacacgtctatagccccagctactggggaggctgaggtggatcacttgagcccaggagtttaaggccagcctgggcaacatggcaagaccccatctctaagaaataaaatttaattttactaaaataatttaagtaaaatactccgcaaactcacattatatttaaagtccaggccttttacaaatactgctaaaatatttatatgatagtattaaagagatcaaatctttctctaaagaccttgtaaataccgtgtatcccctggtcctcttatttcttgacaagaaataaaatttggctgggcacagcggctcacgcctgtaatcccaaccctttgacaggccgaggcaggaggatgatttgaggtcaggagtttaagacgagcctggccaacacggtgaaaccccgtctctactaaaaatacaaaaaaaaaatcagccggggtgtggtggagcgcgcctgtaatcccaactactggggaggctgaggcaggagaatcgcttgaacccggaaggcggaggttgcagtgagccaagatcacgtcactgcactccaaccagggtgacagagcgagacttcacctccaaaaaaaaagaaataaaatttacttgaaatcctacatcaaatttcaagggaacagaagcgttccccatacatctgaaaatgagtttcacagtgtatacacttcaaaatgtaaaaggcatgcctaattcctcaatgctgaaatgtaattagattccaatttccattttaagcatttcttccaagttttaaccaggtttgccaatcctgatattttacagagtagaattagaagacaatttattcagatcaaaataaaagaattaacatctgcatcccccttttcccagggaccaaagtaattcttaaaagtacagccacctcataaaagtagaacaagctcaaagtcaggttaacctggctctttcggttctatttccaggtgctgcatccaattttttgcaaattaacacttctaagcttctactcaagggcagaaaaggaactacatatagttgtcaccacaaaccctctggatttggaactaccataaaagtaagcactttccagccgttctcctggactcgcggaggctgaggaccccggggccctcggcctgctacttctgcaagccccgcagagggggctcctcccgcgctccagccacggacacctgggagaggtcgcgaagagccgctggggctccccaggcccgacacgacgcccgccctccccgcctcacttgggacaccagacctcggacgccctacctgcgctcgacccggacgccggagaaggcgcgcggctcccgaaggccccgtactccagccggctaccggccccgaaggcccgctgctggaggacgcccgggagacagaggcccggggacctcggagcgcggcggccgcacacaatgcagtcctccttccgcagagaggcagttcgaccgcccacgggctgcccaacgccagaaacagcatcacgcgggtgacgagcggctgcggacgccccagctgcacgagtccacgactgcgagacacggcttcccacccgactgccgcacaagtggcgcatgcccagcccgggacgcctgactggcagctgggctgcctgcgcgtgcgcagaatctgccgcccgcctgccgcccgcctgccgcccgcctgccgcccgcctgccgcccgcctgccgcccgcctgccgcccgcctgccgccttcccggccgcgcgcgttatccgccagctgagctgggagcccgccgctctgtccttggctcagcggctcctccttcctagaattttaccttctttataacagtgtggaggggcagagggctgtacgagaatgacaatgcccagaagccagggttaaatatttttttttctcgtggacgacatcactaaaaactgtttcctttgcggaaaatgattctagcctgttggcacagaagaaagaatatacgatttgaacaaaaatgagtgataacttaattgaatcatcgggttggaggaaaataaatggaattgttcatgtaatattgataggtgttaccagatttgtcttcggaaatcattcacatccatatacacattgattcattacttgttaaagaggtactgaatctattgccaggactgagctaggagcagaggatacaaaatactagattaaactgggaatccacagtgcttaaacagtggaggaaaatacctgaaaattggctagaatataatgtaatacaattgagacaccgcaatatacaaaatgtggctggccgtggtggcttacacctgtaatcccagcgctttgggaggtttaggcaggaagatctcttgaggccaggagtttgagaccagcctgagcaatacagggagaccccgtctctacaaaaaaaaaaaaaaaaaaaaaacctaaaacaaaaataagccacacatggtaagtgtgtgcctgtggtcccagctacccaggaggctgacatggtaggattgcttgagcccaaagtcgaggcttcagtgagccaagaccacactactgcactccagcctggaccacaaagtgacaccgtgtctcaaaaaaaagaacaaacaaatgccacagaagtacaaagaagaacatgattaattttgcctcagaatgtcttcagactggcttcacatttagctcagtcttgaaggatgagcatcttagtaatagaaacacacttttgtttaccactgcagaactatacatgtttttgatttgacatgttatttgcaccggagaggaacaaattcatagtctaaaataatgtgtggccaggggcgggagctcacgcctgcaattccaatactacgtggaggcccaggtgagaggatcacttgattccaggagtttgagaccagcctgggcaacaaagtgagaccctgtctctacaaaaaatttttaaattagctgggcatggtggcacctgcctgtagtcccagctacttgggaggctgaggtggaaggatcacttgagcccaagaggttgaggctgcagtgagccctgattgcaccactgcactgagtgacacagctagaccctgtctcaaaaataaaaataaaaataaatcaatagaatatgatcatgttggcaactccaaatactgtctattggggggagtattcagaaggagataatgataatacctctatatggataactttattttataaaaagttagcttctacttacattttgtttatttttattttaatatttgttttaatagtagagatggagtttcaccatatagcccaggttggtctcaaactcctgaggctcaagctatccgcccacctcagcctcccaaagtgctggaattacaagggtgagccactgtgcccaccttttattttgtttttgagacagggtcttgctctgtcgcccaggctggagtgcagtggcaccatcatagctcactgcagccttgacctcccaggctcaagtgttcctctcacttcagcctcccaagtacctgggactacaggccacgtcaccatgcccagctaatttttgtatttttagtggatacagggtttccttttgttgcccaggctggtcttgagctcctggaatcaagggatcctcccgcctgggcctcc

SEQ ID NO: 587975 - DNA, 4001 bp, Homo sapiens
gaaaaaaatgaagttaaaatcattgccaaagtgaacactggcatttaagaagcacaagctactgacagatggttaatggtctgagtatcagcaaaatcaaagcaaggaaattgctaaaaggagtctaatcgttcaaaagataattgcgtatcacagttcttctacatttacttgctactggtgttgacatcagttgagatattcggtacatcttgggaaggccgcttgctcaaacttcacagattctctgcaaaagatgttaaaaaaaaggtggactatatattaaaaatagaaaaattatgccaaaacagatggcatctactaattgcactagtcagatttgtttactgaaataatacagagatacagaattgaaggtaggagaccagactgaagacacaacccctctaaagttgtgtctgcctctatgactgaacattttccattgcctcactcagtgcatctcaataacatttttctgtaaataagaaccacactttatttggaaaatctagacttaaaaaggttgatttgtaatccaaagaaaataatgaaagtgaggtatttgattaagaaatcttaataaaatgactggttctaacagtcatttagccccaaaacaaacttacgtgtattttaatcatctgacacaagtcaacttcattatcaagtttcaaacagtgcttggagattggtgtctgtctttttcccaacaacttgaaccattgacaggtagtcacagagagtgattttaatagtttttatcagcctggacattcctaaacagcataagtaatgttgcactaaagatagcataccattgggaagattttagaacttagttcccatgaagacatgatttaatttctcaattactaattaaaaacatatcaaagtatgtaaattatgcaaactttgatcatttactgttcatcaaatagaaccaacttctgttgactatgaaactttgtatatagtatcactatcctaatcgctttataaggtaggagtaaattattttctgattcaccacttatggccacattttgtaacatgagaactagtaatggattgtttttgtagctgtaattcaatcaatcaaaccaggctaattctacagcttcaagttgaatatttcaataaattatatataaaccctattaggaaaatataaacctggtttatagagacctgtaaagatgtcaggagaactttctggccttccttggaagatttctaaatcaaagcacacatttacaaatttcatttgtttgggatataaaataatcccagtgtaatgtaatatattagtatgttacttgttcttttcatttttgatcaatattgtacgggtatgcccagcccaaattaccttattttagtgttccccaagtattaagcttaattttaagcctataaatcctgcagcaaaagaaggtcttattgctctatctcacaagtgcttagaagaatctacaggcagtacactgacattcaatagaaaattagtaacagtaggaaaaaaaaaagcccttcagttacagatctaaaacttttcaagaaacagaatctgccagttccatcaaagcgacacatctattctgaaaaataatgtgtgcatacgtgttccttccaaagggagttcccagcctcttcttccaattgacaaaggacaaaattattactgaaatacgaagcttcctgtggttgacagtggaaaaattgaggactgagcagttcctcggctgaaaaatgtctgaatgtcaacaggtgcagaagtctcttaataaagggaatcccaccctaccttcttctcacagatgcccacgcacattgctgtgcacaggtgcttgcagagaagttttgtcttcggcagcctcttgttctcttgtctgtttcctggtataaatgagtgtatagttcttgggaaagtcagtcttacaacttctcttgttttcttttgaaaacagcctgcgtaaccagaggcaaagaagcagaatgaggtcacacttcctgttgggctcacatcagtggcattcacactgaggagtgtgctgaagatttcagagagtttcctgggccagcagcagggaatgtgcagcccatgtgtcaggccagctggttacaccctggtcactggaggggtggttttctgagctaacttgtcacctttggctgcgagaacgtgagaaagactcagcgaactgacatttcttgctcatcatatggccacattcagttataagtagtgcagagtagtgatctttgtccaaatcacttaaatttattgaggataatgcactgatgctattaaattcagaatactattaaatagcaagagcttgatcttatgaaaatttctatagaggcaataggtttatctaatgaaggttggacttcacaaaaaactctatagatggcattttacatttacattatagtagagctcaaagacttgatggtgtttatgggttcatacacatctgtactactgtaagtgataaaagaaatgtacattcaaatatatattccagcaacattgaggtaccactgcatagtggaaagagtgcggattctggggtcacaagacagaaattcaacctgtctaccatcctagctgtgtgacctcagatttgtgacttacccctctgagttgcagttttctcaattataaacataaaaatatatatgtcatatgatggcttgaagaattaaatgaaataaaagaaatgagaaataatcgagtcctcagcacagatgtgcaaggtgtattctttatttgttttcttaaatcaagttctcttctgaggcaccagttggtccggctggcggaaaagttaatctcatcctttcctggggttccctttccccctgaggttctgccacatggcaggatcttctgtagaacatgttctaggcagcaggaactgtcaggaggagggcccatctaatttcaaagttctctgtctctggaacttcatgtctattctccatcccttgagtgtagactgaggctgctgacatgctccttgtaaataaagtaaggcaaaggtgctgagtttccactaccatgatgaggcttccatcttgttggactctattactttcttgcttgcctgctttgatgaagcaagctgccatggtggagaagcccatgtgtcaaggaatcaagagtggtctcaaaagccagtaagggtctgatgctccatccaacagccaggaatccagccaaaaaccaagtgtgtgagcttggaagtggatccttctccagttgagccttgagctgactgcagccccatctaatgctcgattggaactgggaaagacccagaagcagacaacccaggctagccctgcccagctccctggcccacgcaaactgggaagtgacaaatggtatttcaagccaccacgttttgaggtaatttgttacacagcaacacatagcagatgcatagtcctaacacaggtcacttcctgagccatctgtcattgctgactctctgctgctttagtgactcctgtagaatatagtcacatttactcaaggctactcctggtcacatctgcctaaatttaacagacagctattctgcttcacagctgtctggtattctctttactggaattcacagttctcttcttctccttttcctgtttttcttatccctcatcctccctcttccagccttggcttatctcttctagatgagggaggaaaatctttctgacttattcgagaccctctgctcttcctgtgcccacaaatccacttttccgaagagctcacatcagaaagactttggtctactttttttttttttaaagatctggcacatattagaaccttattattaatgatcataataattgctaactttaaggagtgcttactatgtaccaggcactgttctaaggtctttccacatatcaacacattaattgttacatcaattccatgggagatgctgtattattattctcattttacagaagagcaa

SEQ ID NO: 587976 - DNA, 4001 bp, Homo sapiens
ttctggaggacttggggaagcatagacttgttaattcagtaagattgtaagtgtttacactctccctagttcagagcaaattctaatacagattagctttggagcatcaccatcagtgaatgactatacacccctatcagctgggcaggaactcagcattttgattccatagctctgaagtagatgaaaaaggccagcttaatcagccacctctgctaagcttacacctcatacatccaatgaccctagtgacacagccctgtatttacaagaccatatgctgcttattcactgtgcttccacttagccctattccctcactgctccatgggggaagcatgttctggaccccaaagcatacaggcaacagaccttacggcaatccctgcaaaatacaatgggccaacccactcctccacacacacacctgcctgctccagctgcaggatctgctactcccgttccctgggtctgtgttcctccctctctgcatgctttgctatcacacaatgcacaagaaattgaccatctggatagttttacaaacccaatctagaagtgaactgataataaaagacaaactataaacccacagagtaagagttctgtggagacaaataggtgagaagctatttccaaggttacctctgtaattttataaacatgtcactcctcacccccgactgcagcaaggggcatttctgggagagaactttggtttgagcagaaaaccatcggcttttctctgcctctgccatgtttctaaggaataaaaattcactttccactatcattagagattttaaccaaaggctccttttattttgcttccaaatccagggtgataattgatttaacccaacggcttgaggcttcttataattcaaaatccacagctccaaagctggtaacagaaacacaggcaagggtcacctaaggtcaacctggcaactcaaaatatgggagagggaattgacatgttttctgctacacctaagagtttgtttaaaacaaaacaaaaaaagcaaaacagaaaacgtttttctcctgttatcggagtttctctacagtgaaaacagcaaaaaacaacagggcaaaagaatcactactaaactagaacaaacccccactaaaggatccctcaatgaatgaagtgatggtaacaggcttcatcaattaccgataactcttcttccagttttctcaggcattaggggctctgattaacctttggtaccattaactcatcacactagcctaccttggataaaatcagcagggttctttgagactttcagtttataacaaaagaagagagaaatccccacttaattccctacggccgcctctacctctctttaaagaaaagctactcccgcttgttcgcttgttctaccggaggtatgctagcagcacagtcgatttcctttgcagctccctaatccggggtttccattctcagtggagaatggataatcccaggggaccagctaaagactcttttcttccgtcctctccctctttttcctctgatctgcttaaaagcccagttaacgacattgcaccttaaagcgaggggacacgcactttccctcgtccatctgtcatcaattaaaagcattaatatttgctttaaactgacacaggcaaggctgatctcggggaggcgacctctggatgcgccctgtgcgagcaaagccgggagagcgagccccaagcacctggcagcggtgcccccagcaggcgccgaggaatccggctatccatttctggtgaactctgcgcccactgaggcattcgaggtacggatgtgtccgcctagtactcggagacgaaggagagagagcggggatatgcgctccagctctgctaggctccagggctctcacccttgcattcaaagcctccaccccatcccactccccgccactcaccttctgcttcggccacccggtgcggctccagcaccgcgcgctctcccggcacggttcccggagaaagtcccccaatcaccagctacggcacttgtagcctctgcacgccgctcggctccgccgggtgggcagcgcccgccacggcgggcggggtggggcggggcggggcgctcccggagcatcccgggagttgtaggccaggggcggtccctgcatccctcctgtctctgtctcctcccacgccttctgggttttacccttcctgcagatgagttcccgccataccctcttactcctccccagcacttaagaagacagcactgttttctaagcctagagtggagttccctagcctcaggtgtggccacaagactgtgaaaaggaaagtatattcgacttcaaatgtgccagataatttgcatattttgtctttttaatagtcaaaacaaatcttccaagtagattttattaatcctcattttacagatgtggaaacaggctcagagagggtaagtgcctcatccacagttaccaacagcagcttctgaaattgcatccaggagtcagattcgaaagtcattgcgtgtctcacaaaatcagaagaaatatgaccataaggggtaagagattgtccgatgtaccaacacatcccctgtatttagcacagtggtattcgttgaatgtatgaataataatgactcaaaataacagttaacataaatagcgcttattattgccaggctctcttctaagcactatagatacattatctcatttaatggtcacaatttattgttaaagtactgtaaaaaaaaatcctcattttaacagaaggcaaaactgagttacaaagtagaataatttgcccaatgtcacacaactaatacttagcagaggtggggggggggggatgaacaccaacagattctaagcgttatgctatatggaatgaatggaagaaagaccagaaggccagaataaaagggctcaggaataaaggaaatctgaaggttgaatcttctgagttgtgactcttaggataggacaaggtaactgtgtcaccagcctctttcaaccagagtggactgcaatagccaacagccactgaaagcccagggtatgtgtagcttgcagataatctccagttttccagcatcctgttgggacaattctaggggagcaaaaaaggattatagtatggatgggctgggcacgatggctcacgccagtaatgccagcaatttgggaggccgaggcgggcagatcacgaggtcagaaaatcgagaccatcctggccaacatggtgaaaccccgtctctactaaaatagaaaaaattagccgggcgtggtggcgcgtgcctgtactcccagctactcaggaggctgaggcaggggaatcgcttgaagccggaggcggaggttgcagtgagcagagatcgtgccactgcaccactccagcctggcgacaaagcaagactccgtctcaaaaaaaaaaaaaagaaaaaaagaaaaaagggattagggattatagtatgtattatgacattgtgcttgtagctcacataaatactgtggttgcttgctttcaaaagagagatctatctcctttaatgacaattatgttggtatttcattacattggatagaatctatagtcacatgattacaggagttcacaatgctccctctttaaaattctttttcccccatatgattatatttgtagccagtgaggcccatttgttgataaacatgacagatgtattatgacttctcctttgcttactacacggttctccagcatgaatatctttcctccactgccctattccatccacacttcaaggactagtttgtcaagccaaatctacagggatgcatccagttcttagtactacatatgcaaaaagaaataaagagagaaactaagatgtagaaggaacttgaatttatgttgacgaggaaaaacttaggaacttaggctatttagccataggagaatactgagaggaaacaataaactagcttcaaatattctgaagtttctaaaaatagaagaagaattct

SEQ ID NO: 587977 - DNA, 4001 bp, Homo sapiens
ccattctcccgcctcagcctcccgagtagctgggactacaggcggccaccaccacgcctggctaattttttgtatttttaatagagacggggtttcaccgtgttggccaggatcgtctcgatctcctgacctcgtgatccgcccgcctcggcctcccagagtgctgggattacaggcgtgagccaccgcgcctggcctcaagtattcttttatagccacaccaacggactgtgacatttccaaaaccaccaaattcagatgtttcaccttgtctatacaggtgagccctacatccacctggaatcgcactagcctgtcaaaaagaaagccatttaataagcgtattaaaaataagagtcaaacgtgggttccacctaacataaactgacgtttaaaacataaattctgtaattatttggagatttcaaaatgctattggattcctggattttgtttagtttgttaaacaaaaacacgtaaaatttcctgacacttgtaagactggtttatccttcaggtacttagctttcgttttgtttttccttaacatagaaggaatctggatgagaacaattggtagagccttaatgaacttgaaagagaactgaaggcattggcatttttccagactgagtgattgctttcacaggaaacgctgcctcctgaaggaagggcgtgccccgctcctggctgcctgcctcgtggtggtcaattcgctgccctgtacctgttgatgcgcaagaaagtggctggaaggaaactgctgccggtgtgctcagtggactcgaaacggaagacaacgagcagaggagagaaagttactttttcctgccgggctgcgtgtttaaccaatttgtctaagaaaagaaggatggagggccgggcgcggtggctcacgcctgtaatcccagcactttgggaggccgaggcgggcggatttggctaacacagtgaaaccccgtgactactaaaaatacaaaaaattagccgggcgtggtggcaggagcctgtactcccagctactcgggaggctgaggcaggagaatcgcttgaaccaggaaggcggagcttgcagtgagccgagatcgcgccactacactccagcctgggcgacagagagagactccgtttcaaaaaaaaaaaaaaaaaaaaaaagaagagaagaaaagaaggacgggggtggggagggaatcagggagtggggagaatggcgctccccttcacgcagctggtgtggctgggagttggcttggaagtttacacacttgagctctatcgattccgaaacttcccgatacatcgtgaggtgtgggcaggagggagacgcgccaggcagcagccaacggggtggagtccccgggcccagcctcctgcgggagggggctctgctgcctccaggcccgggtcgctcctgcctggccccggggaccccgttcttcctccgactccgacgacgggctcctcctgcccggacatgccccgccacaagtgacccgggccaggcacccccgccgcgtccccctctctctctgccccctcccggtgccaggcgcgcttttccccaggcaggaccgcggtggggactcacctgcagcaggaccccgacgacgacaaacttgaaggtcttgtggacccggagccgagggctggcttcccgcgccggcctgggtcctggggcgcgccctgcccgggcccgggcactgggtccgtgctgtcccatggaggtagggagcgctcctcggcccccgcctcgtggttcaatcctccccgcggaagagccccacactttgctgggtgtggccgcggctgcctctgtcccactcgctgcgctcccgggattcggagtcactgccaggaacgcacctagatgtactctagctggtggtggcgccatcctgccaggtcaatccaagaagcagcgtgcttggctatgacaagacagaacttcgcattcggagttcagggcacccctgaccccgcccccttttcggggcacctgcggctcctgttggctaaccctgaacttccttcctctgtgaccgcccttgccgctctcagcttctgttcctcaaccacggccgccgcgtggatgccgctgcattcggagtcgttttgccacttggtcccagcgccaggcttctcggtcgggagttgacctcagcctttctgtgacccagttcctggcacccagcaggcgctcggtggacggatgggtggcggaatgaaggacacagaggccactgcggggtctggcctctaagaggcttttacggcctcctccgtcactaccgggcgagtgattcagcctgccttttttttttttttttttttttgagatggagtcaagctctgtcgcccaggctggagtgcagtggcacgatctcggctcactgcaacctccgcctcccaggttcaagcgattttcctgcctcagcctcctgagtaactgggattacaggtgcccgccaccacgtccggctaattttttttctatttttagtagagacgggggtttcactgttttggccaggctggtctcgagctcctgatctcgtgatccgcccgcttcggccttacaaagtgctgggattacaagcgtgagccaccgtgcccggctcatcctgcttttggtttcaggtctccatgccagtgaaatgtcacctcaactccaccgtccctggtgtcaggcaagcccgagggacccaattctgcctttcttctggattttcctaacctgttaagagtcttgaaagtccttaaaccacgggagactatctggcacatgacacgggatgagacttggtgggggtcccacgggggacaggtccttccagcggttcctctgcacccagcgctgcacgggcatggggcgtgggtaatcagcctcccgaaagccacgcgagtcacggtcctgcctgcgaagaactcccagggcgaccttggggctgaggagtgggtaagagaaagggggcgctgattgatgttcatttttctccatattttaatggtgttccggtaccatttgttgaaaagactcttttcgaccgggcgcggtggctcacgcctgtaatcccagcactttgggaggccgaggcgggcggatcacctgaggtcaggagttcgagaccagcctgaccgacatggagaaacgcagcctctactaaaaatacaaaattagcggggcgtggtggcggatgcctgtaatcccagccactcgggagactgaggcaggagaatcgcttgaacccgggaggcagaggctgcggggagccgagatggagccattgcgctccagcctgggccacaagagggaaactccgtctcaaaaaaaaaaaaaaaaaagactttttttccttatccaatagccttatcacttttgttgaaattaaattgaccatatatatgtatgtgtccatttccggactctattctgttccgtttatttatttggctattctcatgctaattaccacattgtcctaattatgagctgtatagtcagtcttgaaatcaggcagttcaagtcctccccctactacccacctcccaaatggtttgcatttccgtatatattaaatatagaataatttttttcagttaaaaaagcctactggaattttaattgggattgcattgaatgtagagatgaatgagaataattgacattttaacaattttgagtctttcaatccatgaaatttatttatttagatatttgttacttaagcttgacaatattttgcaaactttccatgtacaaatctttcatatcttttgtaaacatatttctaactatttttgttactattgctaatggaattgatttagcttcccttattttcaaattgtttgttgcaactatacagaaatacagttgatttttgtccatcggccttgtatgctatggtactgctaaattgatatatttctagttgttattttatagattatttaggattttctatgtaagcaatcctattgtcagtaaccaaaaactgtct

SEQ ID NO: 587978 - DNA, 4001 bp, Homo sapiens
ggctggtctcgaatccctgacctcatgtgatctgcccgcctcggcctcccaaagtgctgggattacaggcatgagctaccagacccggctgttgtggctttctttacagaaaagtctccaaggagaacataaactctaaaaccccaaatccaagaaattcaacacaacccagttgtggctttctttacagaaaaatcttccaagtagaaagaacatgaaagtctaaagccaaaaatccaaaaaattctttatagagataaaaaaaaaaccccacaacagagcaaacaaaccaaatcactgcaaaccagtgctaagaaaaatctttaaaagcagccagagaccaaagatccaccacccaaagagaggcaagatgccctggggacctaggcccacagaaaccacagcaggagggggaggcagaggcccctgtacactctcctcactaggacagttaggtcctccctccactcagaggtgagaccaaggacatactgtggtgtggggcggaaacagtgaaaacatgaggtgtgtaacaatatcccatgaaactccaatgcttcacactgacattcttctaggtcaacaccagcattctcttgaccttcctttcactgttcctcctctcccttccagcccctctgtacagtcttgagttaggtctaggcccacacacttccccactctgagctgcggtctcttcctctgtaaaatgtgatgattcagaacctctcctggccccaagcgcagttccaggcgctgagcacaccatgctgttccctacaaagccgactctttgtcccttccccattatcacggatacttgccaagaggtggcaagaaaggctcttcccaggccaaaatgcagctgctattatcaagcaggtcaggccccaagtgccacaactcccttctcctaaatctcgttttcccaaggaaccccaaacaatggcattggcgatgagcggccccgcacgcgtaggggcgcagccgctaaggaggggaaggggcctctccagctgcgcccgcgacgactcccgcgcacggaacggaaccactgggccgcagcgaccacaggggagttcttcgccggccgcaggttcaaagcgatctgcaatgagcgcctttaggaattcattcgaaggcgcaaaagaaaaagaaattaaggcaggaactgagcgaggaaggaagggagggaaagaaaggaagaaagagaaaaagagaaagaaacagaaagtaaggaaagaaaacaaaatcaaagtccgacgacctctccgtggcttcacgcagcttactcgggaattccctccttgtcgccctcccccactggattcgggaatttacaccaagtggagcgcgcgctctgttccctggcggcccaggtcgctcctgcccaacccggggacccatctcttcccccgactccgacgactggtgcgtcttgcccggacatgcccggccgcaggcgacccgggccacgcacccccgccgtgtccccctctctccctgccctctccaggcgccaggcacgctcttccccagccagggaccgcggcggggactcaccaacagcaggaccgcggcgacaacgagcacaagggtcttggggacccggggcccaggcctggctccccgcgcctccctgggtcctgggccgtgccttttccgggcccccgaagcggccggggcgttctgtccccgttgttccatggcggtagggaacgctcttatagtctctcaggcccgtgggtttcagcccttaaagtagatcgggcatcgtcggtgtattttgtgggcgcagagattgcggggttctccggccgcgtgctgatttatgtgtccaggctgacttggggcggcgcggctgtactttcactgcctccgggcaggcgtcattcggggcggggcgaatcagatccaatgtgcaactgcaaattccaccacaggttggtgacaataaataagagtctcgtcaacgcaatcctccgcaagcgcgtccaagtggggaggggaggggaagggaccggaactaaccttcgccctggcggctgcgccccgggctgtggtttgtttctgggtcctgtccgcgccaggacaggcaccgaaacttgggggaaatgagttgagggaggcacttggggagttgacgcctcccggggtcgcgcgcttggctgtgaacagggtcttgaggttcagagtccgctttccaggcgcgtcttgatcttctccccttcccaggggcacctgccccttctgttctctccttctctcttctttccttttttctttcgttttctttcgttctttcgtcttctttccgtccttcctgctttctctttccttcctttctctctttctctttcctccctccctccccctccccctacctcccttccttgtggtttattttttgagacagtctctctgtggctcagattggtgagcggtggtgtgatcccggctcactgcaacttccgtctcccaggttcaagcgatactcccacctcagcctcccatgtagctgggactacaggcctgcaccaccacgcctggctaatttttgtatttttagtagacacaggggttcactatgttggccaaaagaccatcgaacccagcttacactcacacctagtccacaaatgtgcctgtgtccctgcacccttgctacacttagctttcatttgtcactagtctaggaaataaaacatgatacatcacattgttatgtattttcattccttcatggtactgtgtccggaattggtgggttcttggtctcactgccttcaagaatgaagcctcggaccctcgcggtgagtgttacagttcttaaaggcggcgtgtctggagtttgttccttctgatgttcggatgtgttcggagtttcttccttctggtgggttcgtggtctcactggctcaggagtgaagctgcagaccttcccagtgagtgttacagctcttaaggcagtgggtctggagttgttctttcctcctggtgggctcgtggtctcgctggcttcaagagtgaagctgcagaccttcaaggtgagtgttacagctcataaaggcagtgtggacccaaagagtgagcagtagcaagatttattgcagagggaaagaaggaagcttccacagtgttaccactgctggctctggcagcctgcttttattctcttatctggccccacccacaccctgctgattggtagagcggagtggtctgttttgacagggcgctgattggtggtttacaatccctgagctagacacaaatgttctccacttccccaccagattagctagatacagagtgtggacacaaaggttctccaaggccccaccagactagctagatacagagtgtcaattggtgcattcacaaaccctgagctagacacacggtgctgattggtgtgtttacaaaacttgagctagatacacagtgccaattggtgtatttacaatcccttagctaaacataaaggttctccacgtccccaccagactcaggagcccaggtgtcgtcacccagtggatcccgcaccggggttgcaggtggagctgcctgccagtcccgcgccgtgctcccgcgccgtgcgcccgcactcctcagcccttgggtggtcgatgggactgggcgccctggagcagggggaggtgctcgtcggggaggctccggctgcacaggagcccacggagggggtgagaggctcaggcatggcggtcccgagccctgcccgtcgggaaggcagctaaggcccggcgagaaatcaagcgcagcgccagtgggccggcactgctgggggacccagtacaccctccgcagccgctggcccgggtgctaaacccctcattgcccggggccggcagggccggccggctgctccgagtgcagggcccgccgagcccacgcccacccggaactccagctggcccgcaagtgccgcgcgcgcagccccggttcccgctcgcgcctctccctccacacctccgtgcaag

SEQ ID NO: 587979 - DNA, 4001 bp, Homo sapiens
caaaaaactcctatatccttgaaaattcctaataccatgaggaaacaaaaatacatagcaatgtgatgtgttatgttttacatcttagactagtaaagaatgaaagctaagtgtagcaaaggtgtagggacacaggcacatttgtggactaggtgtgactgtaagctgggttcagtggttttttggaggaaaattcgtgaacatttaaagaaacttctgaagtcatttatcccacagaaggagaagtagaattcaacttgtaaggagttgcccaataagctggtgtgcatggatatgtggacacacgatacatacaagggtatttagtacaatgctgttggaattagcaaaggccgtcaggatgggatctaaccagctgcccctaggcggcaacagtgaattaaaatgtggcttacccatgcagtaaaatacaatacccttgtttaaaagaagatcaatctgaatgtactgccataaaacatctaatgtgatttgtgttagctccaaaatttaacaaagtgattgtacatttaaatgcatttaataaggcaagactgatggagggattaaagcctcctttgggacgcatagagttcacattcccaaaaccgtgaaactgatgttgctggccttgtctacactggtcatccatgcattctctcttcagggccactgtcctgacacagccattcttctagctgcctcaggtaagtccacccactataaactattttaaaagtcagttgtgtaatttttgagaggtgaaaatgttactgcttttctgaatttagcattaatttgtagaaagacaacatgcaaactctcatggtttctgtaaccttgctttggccttttctttttcttttttcttttttttgtattacataaagaatcttaaaaagggctgttagcaaaaacctcaatcaatctgaaagagacctagaagtctgcatattttatacataatatgtccttgcactcacactactaccaatctcagtttccaaagccaactcacaacaactttacaccgtttatgctgaaggaaggggccagccccggtcctgcctatgggatacagaggggacacacgggtggtagtggaagacattaaccaaggcagcaccttggttaaccgcttcctgccacattccggcttcctgccactttcaggacagaggaggtgaaagttgctaaagacagcgctgaaaagttttttcactggctgttggttaaaccgatctccaaggaacacgtttaagaatgtaaacatggggttaattttattaactaattaattaattaatgagagaggcaaccgctctgtgtcttcaggaggctcactctatgggttccaccttgactccctccctctctcgattctggaacttccctcccttcgcgggctcggggcagccagggggaccgcctctctgctccctcgcggccgggtccctcctgcccagcccggggacccagttcttcccctgactccgacggcgagttcgtcctgcccggacatgcccggccgcaggtgaccagggccaggcatccctgccgtgtccccgtctccctgccccctcccggcgccaggtgcgctcttccccagccagggaccgcggccgggactcactggcagcaggaccgcgacgatgacgacgacgaactttagggtcttggggatccgggccatggtatggttcccgacgccgtcctgggtcctgggtcgcaccctgcctcggccatcaggcggccggggcgctctgtccccagagttccctaacggtaggaagcgctccttcaccccttgcatctctggtcaaactcccaaaaatctatcagaaatcgttggctgagttcgtgcgcgtggagaggttcccacagctgcactgccagaatcggagcgcagcgcctctgaatttatacccgcgggggaaaaggcgtggtcacttgtcacttgcagcagtcacttccaagcactcagaaaaggggcatggcctcccctagcacctccaggaaggcctgggttttggtggtgggtgcatggacggacaggaactggctctttccggcagcggtgacccagggcctgcggtttgattccgggtcctgtccaggctgtaggcagcagaaggggaaggagctgaggcgctgcccactgcgctgctgtagtctgggtagtgagctccagaggaggcactggaggcccatcctgagcctgctccctccccgggacgcctgtctctcctcttcttaaaccctgaactacctcctggcctaaggacttcagtccactcttagcttctgctcccactccctcctcccacagcggcctcactgaccagtgcactgatgccactgatgtctccagcctccttgctgctgtgacccagctccaagcttctctggcaggggcttggtatccctcagtagcgggtgcctggcaccaaggaggggcccagtgaacacatgagtggacagaatgaaggacacaggggccatgacgggcacatgcagaggctgaggagtaggtaggagggagaggaaccccgggggcatccctagccacaacctggcaccctttgcatggtcgaggcacagacactctctggccgaccttgtgggctctagtattgaggccccatggacagaggaggcccaggggagtggcttccaaagcctgtcccccagtcaagtgtctatccaggtccaactatctgaccttgggctactcacctccccattgagttaagcacactgctgctgtgtggagagatccaatgtgtggtactgaagggtgccagcctgtgaccctaggcagtaaggtcaatggcacaactcctagacccttggggtgagtcggctcctgacctctcacatggtggataaaagaggatagcactatagaaacaaagatttttttttctgctcatcagaaacctgggaatgatatgtcatcctctccacaggcttggatttgagcaatggagtgccctgggcacctgccaggccccaggcactgagttcggatcagaaatgtgtgccaggtcgcaggcactgagaaatgtgtggagtcaggaatgtgtgctgggggcagatctaggcaggaggtgagaggacaggacttcaggaagactgacagcattaacacagagccacgagggcctgcaggaaagtctttagagcactccaggccccttggccctggagggtggactacacagtgtagactagaaaccagactgcaggtaacacacattctctgtgccctgtgtggagcactgcctagggctaatggcaaaaggctgtgagcacctccagggaactgggcctttagactataaagtttccatttgagaggcacttactagcttacgatggaacactagctgaagctccccctgtgactgaaggacataaaataatcttgaaacctgaaaaactcatgatgtcttcagagatcttggaaaagctctaacggggagggcagtccccgaagagttctattacaaaatggaaatggttgatacgggatcctggtgcctgaggaaggcaaagaggagacactcatgagcagggagcctctgttccccacagactgagtctggaactgagtgaggagctgctggattctgtggtcacttggacactgccctatacgcagctctttactgaccaaccaagagctacttagtttgtagacagtcattcctaggtgaatggtcaacatcctatttggaaggccacccctctgatggaagaaggcaaaggcaaattggctaggtgggttggattgcatgctgttttcctagcgtgatggaagatttgacagcagcaaaagcccctgtacttgagttgttttctggctcatgaacagtcctcaacgtcttggtcatagagttgggaagcagaatgtgaaagttgattgcacaaattgggtcattcttgtcacacccaactaaaacagagtcaagaggccatggggaagaaaaatcactgta

SEQ ID NO: 587980 - DNA, 4001 bp, Homo sapiens
gcctctagatggcaacagtgaattaacctgtggcttacccatgtagtaaaatacaatacccttgtttaaaagaaaatcaatctgaatgtactgccataaaacatctaatgtgatttgtgctagctccaaaattttaaaaagcaactgtgcattgaaatgcatttaataaggcaagattgatggagggatcaaagcctcctttgggacgcatagagttcacattcccaaaactgtgaaattcaggttgctggtcttgtctacacaggtcatccacacattctctcttcagggccactgtcctgacacagccattcttctagctgcctcaggtaggtccacccactataaactattgtagaagtcagttgtgtaatttttgagaggtgaaaatgtcactgctgttctgaatttagtattacttcgttgaaagaaaacatggagactctcatggttcatgtaatcttgttttatcctccccgttttgttttttggtattacgtaagaaaccttagaaagcactgttggcagaaacgtcagtcactcagaaaaagtcctggcagtctgcacatcttatttttatgtccttcttgtgcaccccactaccaatctcagtttccaaacccaactcacaacgagaactttacatcttttatgcctaaggaaggggccatcccgcggtcctgcctatgggatacagaggggacacacgggtggcagtggaagacactgactgcaagcaccttggttaaccgcttcctgccactttcagggttctataggaaatgaaagttacaaaaaacagcgttggaaagctttttcacaggctgtttgttaaactgatctccaagaaacacgtgtaacagtgtaaacatagggttaattttgtttgtttgtttgtctgtttttgttaaggcagagtctcgctctgtcgcccaggctggagtgcagtggtgcaatctcggctcactgcaacctctgcctcccgggttcaagcagttctcctgcctcagcctcctgagtagctgggactacaggcgcaggctgccacgcctggctaactttttttttttttttttttttttttttgagacggagtctcgctcttgttgaccaggctggagtgcgatggcgcgatctcggctcactgcaacctccgcctcccggattcaagtgattctccttctgcctcagcctcccgagtagctgggattacaggcgaccgccatcacgtccggctaatttttgtatttttagtagagacggggtttcaccatggtggctaggctggtctccaactcctgacctcaggtgatccgcccgcctcggcctcccaacgtgctgggattacaggcgtgagccaccgcgaccggcctgggttaacgttatgaacgaacgaacgaacgaacgaacgaaagaggcaaccgctctgtggcttcctgaggttcactccggggtttccatcttgactccctccctccgctgattctggaacttcctctggggcagctcagtgcggtcctcgccgcacgggacagccagggggagcgcgcgctctgctccctcgcggcccggtcgctcctgcccagcccgggcaccccactcttcccctgactccgacggcgggttcgtcctgcccagacatgcccggccgcaggcgacccgggccaagcatccccaccgtgtccccctctctccctgcccactcccggcgccaggtgcgctcttccccagccagggaccgcggcggagactcaccggcagcagaaccgcgacgatgaagacgacgaacttaaggatcttggggtccaggagccatggtctggttcccgacgctgtcctggctcctggatagcgccctgctcgagcgctcgaggcggtcgggacgctttgtccccaaagtcccatgagaagggaggagggtggatcgaaagcgccaaaaatcaatcagaaatcgtccccgtagtttgtgcgcgtgcaaaggttctcgcagctacactgccagaatagaacgtgctcctccgcttttataccccggaaaaaaggcgtggtcagttgtactcccttcccgcagtcacttccaggcactcaggctgggtctcccccagcacctccaggagggcccaggttgtgtgggtgggtgcatggacggacaggaactggctctttccggcagcggtgacccagggcctgcggtttgattccgggtcctgtccaggctgtaggcagcagaaggggaaggagctgaggcgctgcccgctgcgctgctgtagtctgggtagtgagctccagaggaggcactggaggcccatcctgagcctgctccctccccgggccgcctgtctctcctcttcttaaaccctgaactacttcctggcctcaggacttcagtccactcttagcttctgctcccactccctcctcccacagcggcctcactgaccagtgcactgatgccactgatgtctccagcctccttgctgctgtgacccagctccaagcttctctggcaggggcttggtatccctcagtagcgggtgcctggcaccaaggaggggcccagtgaacacatgagtggacagaatgaaggacacagaggccatgacaggcacctgcagaggctgaggagtaggtaggagggagaggaacgccgggggcatccctagccacaacctggcaccctttgcatggtcaaagcacaaacactccctgaccaaccttgagggctctagtattgaggccccatggagacaggggaatcaggggagtgccttccaaagtctgtccccaagtctattgtctacccaggtccaactgtctgaccttgggctacttacctccccatccagttgaacacactgccgctgtgagggcagacccaatgtgtggttttgaagggtgccagcttgtgaccctaagcagtaaggtcaatggcaggactcctagacccttgggatgagtcggctcctgacccctcacatggtagatagaagaggatagcgctatagaaatgaaggttttttggctcatgagaaacctgggaatgaaatgtcatcctctccacaggcttggatttgagcgatggatcaccctgagcaccttccagggcccagacaatgacctagggtcagaaatgtgagccagggccgggcgcggttgctcacgcttgtagtcccagcactttgagaggctgaggtgggcgaatcaagaggtcaggagttcgagaccagcctggccaacatagttaaaccccatctctactaaaaatacaaaaattagctgggcgtggtggcgggcacttgtaatcccagctactcaggaagctgaggcaggagaattgcttgaacccaggaaatggaggttgcagtgagccgagattcgtgccactgcactccagtctgggtgacagagcgagactctgtgaaaaaaaaaaaaaagaaaaaaaaatgtgtgccaggtcccaggcactgagctagggtcagaaatgtgcgccaggtttcaggcactgagctagactcagaaatgtgtgtcaggccccaggcactgagctagggtcagaaatgtgtgtcaggccccaggcactgagctagggtcagaaatgtgcgccaggttccaggcactgagctagggtcagaaatgtgtgccaggttccaggcactgagctagactcagaaatgtgtgtcaggccccaggcactgagctagggtcagaaatgtgtgtcaggccccaggcactgagctagggtcggaaatgtgtgccaggccccagacactgagctagggtcagaaatgtgtgccaggacccaggcaatgagaaatgtgtggggtcaggaatgtgtgcggggtgcagatccaggcaggaggtgaaaggtcagggacttcaggaagactgacagcattaacacagagccaccagggcctgcaggaaagtccttagagcaccttagctcccttggccctggagggtggaccacacagtatagaccagaaaccagactgcaggta

SEQ ID NO: 587981 - DNA, 4001 bp, Homo sapiens
gtggaaaccctgaaatttaactcattgctagtatgtttgttattaattaaatctttgacaaaataaaaagggctaggaagaataaaaatgtccccatattaacggcagcattatttatactagcccaaaactaggatgattaaatcaattgtggtgtgtccatacaatggaataccatacagcaatgacaacggacaaattattctatatcctacagtagagatgaatctcacaacagaactttcagtgaaagaagtcaaatgcaaaaaattgaataagttccatttataggaagttcaaatacaagcaaaattcatctatgttgttcaaatcagaatactgattgttctggccatagacacagtagtgatggaagctcttgaggtgccgataatatatttcttgatctgtgtgctagctcacaagtgctcacttagaaaaactgcattaggcacttaccacttgcacaattctctatgtgttatattttaataaaggtttacttttttaaaagcactccatagtatctctagcgatgaagttatacacacacacacatacatacatatatattttaacatacttatgggtagattcctatccaacttacctgttctttagtgtctttactatttatttacttatttatgtttctgtatcctaggaactaagtagaagactacctagccttctattcattatttgtgggttggaggttgaagttcaaacatttactcaaacacatccaaaacacatatgtggcttaaatatggcttttcctagccttgcataaatgtctgattcatatcttgatgtactctacactctagtgtcatagagaaaataagtcattggtcatagaaaaacctacatgcaaatcttattaacttgatcaaaacctaagcttaaaaaaaaagctaagtcacagagattcctttcttttccaaataacattttaaacacaatttttagccctatttagtgaacttcaattctttagatatgttttagaacataacatactgccaatattctccacagtatattgaagttgagaagtgaaataattttaacaataaaattttattaaaacattacacagttaagaagtgtgtgtgtgagagatcttttctcctaattattcaaaatttcacataatatttacattagaaaaatctatcatgtcatattctaattataatggttttaagaagactaacgtcttcttccaacttactctgaatctaagggaccacttctttgccactaataataaaagttcaagttcattaagcaaagatagtatggactacatgagggcgttaatattctgagatgaagacagaaggttaatgactaaaactttcaaacaagtttctctctctctctctctctccctctctctcgctgtctgtctctctcttgctgtcttccataaagtcagcaggaactttgcagcgtaaaaggacaccctaggggaagcatggcataacttgaaagcggtttcctgctccagcctaaccccaagcctctcctgggagggagcgagtggagccttctccccgccggtccgctgggaggttgggagaccaggtggcagcagcctccccaggcgccgggcacccgtcggctggcccagggacttaccacgagcgcgcagcacagcaagttgttcattgtggtccccggaaacctcaggggcttggaggcggcggctgggcgagcgctccggtgcgtctccgcagcccgtgcgctcatcacgttatatatagcgtcccggcaacaggaagtatcgcctgcctttgatcagtcatttttctatcctggaccaaactttgcacctttcttttttaggaagcttgggcgggagcggtcggggggtgtgcagaaagctccagggttaacgctttcagggctggggcggaaaggatcccccagggaggtggggcgtgaggggtggggcggtggtgtctggcccctgggagagcaggggaaaaaaaagccaccgggctgaggaacaaggcggctgctgtctccgcggggctctgaggtttcccggccccttcccgccagcggccagcctcctggcagccgggaccagcggtgggagggctgggcacacgctgggcagctgctgtgcttgtgtctcctccaccctgagagtccgatccagccaagatccggacgcagttggagtgtgtcccagacctttgtcctctcgctgggcgaaagctgtgagtttccgccgtacccggctgcctgaccccttcacttcgggttctgaaacctcaaattacagggcccctctttatgcatggcattgtctgagcccttttcggggagttcgcaatcattcatcttcaagtttacataaaccatgtagtaggaatttttctaactaatgtctgattggccctaaagcccgtgctattctgcattcactccttgttatctggggtagttagagccagagagaatctgcagagtgaaaattggactgcctggggcagggataaccttgcggagcactgttcccttcaccaaccccaccatcatcaaagggctattggtatcggagcttcctacgcgctgaacttctggagtagcctcctcgaggtctttccactagcctcaagctatcgacagaagtttggcactttgctctagggttcgctgtctcccccattaattccctggtctagaagttagacttgatgacttgtaaagtgtggtcccattcatggattacagttcgcgggttgccactgaaattgtttacagatggctgaaaaagtccctgcagagctgcttccccatcagggccaagtgttcaagttatatgtctccagagaagggcaaatactgcctttcaccagattcaagggaaggaaggtgaagaatcaggagaggggacccctggggagcaaggatggcttaccaggatcagagcatctgccccttccaagggacatccttccaccacgagttcaaagtggatccacagactgttccatcctgcaaattacagaagacggggtgtcattcagctttgtccctcaagggccagaatgtaacagcatgctggtttcttaagtgaactagtgaataaatgtagctcagtgagtgtggacaaaattgtatgactccaaatcactccttgtattttgaatcgtagttttgacatctgcaacctgagatatcaacacttagacttgccatgggactcaagtcaatccaagtgttagtagtgaaacacaatataaatagcagtattattgtttttgttagagtaatgtttgtctaggatattatttgaaggtgtttttctcagaacataaaatgatgccaatatgtgggtgtcagaccttggagaaaactaatcaataactgagtccttcagtgttaaccctgggaaaggtttacgtctccctgagcctcatctataagataaaaacacactgatattgcagaaacgtaagagaaagcaaatgggagcgtttaaaaaacaattatataaatgatggtaatcactaattatgagcattaaataaagtaatgcatgtaaaataactcagcacaatgcctggcccataggaaatatttcctatagttatgattattctaggggaatacctaagatactggcctttgtaacctagatttgagccccaactccaatttttcctagctctgtgacctcagactagttgcctaacctatttttgtttccattttttgttattcctataatgaggataataatcacatctacctcaaagtatcataacggttattataaagattgaattagataaaagatgtaaaacactaaaaatagtgtccggcacatagtgctcattaagtgtcattatcatctgaggttctcatggggacgtttgtatgagcacaaggcaaatctagattgtaagctcctgagggcaggaactacttatttttctatggtattcgctgaagcttttagctcaaattctggctctccc

SEQ ID NO: 587982 - DNA, 4001 bp, Homo sapiens
taagtttgatttcacaagctctaaaatcaaactgcctgaattcaaactcaatttccactatttcctgactgaatttggacttatttaagcgatcgatatatgcttcacttttgtcatctgtaaaatggttaatcatatctcccaagtgtggtaaaaataaatactacagtgggtcaacacatgttttactgttaacagaacaaactgaagaagtgatatatatatatattagaaatataggagaaacttaacagaagttatctctggtgtgttatctctgatgtttctgtgtgatgcctttcattttgtatttttctgtcctatttgaattgtataacgtacaatatatgtatttccaatataatgtttctaatgtataaaacattattacctacatttttaaaatatcaacaataggtatccaggcagtgagattatggtcctttgtttttattttacagttctctttattttataaacatattattaggtgtctttgagagaaaatcatcaactacttgcaaaaaaaaaaaaaaagacaagtgtggggtccagagcttaagaaattcacactttttgagggagaactttgtgccagatacttctcaccaaatgctcgcacaacatcattttatgatttttgcccatgagaaaactgaggcaactgacacgaggtaaatggtctgctagacaacaaataatagtggccacaacatcaaagcctatatttcttccatcatcatataatgcatccaaatattcttctccagttgtttcacattggcatattttggtctccccgtctagactgcaaacttctttagaagaagggaaactttcaaacacttcatttatgtctttcattgggttattaaggctacaatagatcctcaaacatgtgttgggttgtattaaacctcttttggtctggactgtcctcaaaggacatacccttgtaaaaacaaaataaactagcacacaaacgacaaaactactctaaagctgtccaaatctaactgtattcctgcacaccaaaaactaaagtgtaaatatatccatatgcagagactaccaactacagtgagttttgtaatgagtactgtgcaaccactgaagaattccttggattcacttatcccccccaaccacgcccccatcacccaggcaccaccaaaagaaaggaacctccagtcttctggtgaggtgatgaagaaccataaccacgcccccactttgtcccatcacaataacctgttttcttgtcctaaccggaccctgcacccaaacccataacccttaataaacaattcaaaagtctctgacctgcagcgaagtgcaggggagaagacttccggccggccatgtcctttgcatttacgtttgccgcgtccaccagcctctttacccgggacacgtccccattgcgacaggcctccagcagttcccgtagggccccgctcactgctgggacccctgtcccaggtcctgctgccccaggccccagtggtgctgtgctgctaactccggccgcctcggggctctccgccaagctcgatccaggggaggatggagaggaagatgaggaagaagtcggggaagaagaggacgacggtgaattgttactgccactgccggctgggttgggagcgaccccagcggcagatgaagtagaaaccgctgggaccacgggagcggcggcgacggtacagattgtgctggtggtactgcaacagctggtaccgtcaaccgggtccggggatcggggcctgtcgggcggatcccgactgccatccccctccggcagcgctaggccgtgccgcggggaggcgaagggggccaggccgctggccgtgggagaggctggggtggtccccggggccaggccagggctgagtgggggaggaggtggcggcggcggcgctgaagcccctggggcgggctggagctgttgttgatgatggtggtgatgatgctgagagcgacgcgacgccgccatcttcggactcccctagcactgtcactgcggcaacggcccccaccgcccgccctcacttccgactgtcggaccaatcagcatccagcgcacaggaaatgatgctaggcggggtagcaggggccaaagagaaggagggaagtattgggagctcagagaacagccaagggaacggggcggggctttgtcactgagaggcgggctttgtgacgtggtggcgggccggctggagagatttgaatgctggaaccagcttctgcctagatgggaaacatttcctgcatttctcactttcagtcggctttctttgccctgctccgctctgtttcccttagtctccctttgcttgctccagagccagctgttgagatgcagatcagagcaagcagggaatgtgtccgttatcatctattaagcgtccttgtctgaaaaatggaacttatagtaccaacctcacagaattattagcgggattaaaagagctaacagacaaagcgctctgccagtaaaacacaagtataattagcccgttggtaattttttaaattatagtatttcttttccaggtgtccccttgagctcttgtcccttccctataatttttctcaccctatgtgctttaattcctcgtttttaaatgctggttcagattgctaggattggcgttccagctctgccatttgttgtttatatatgtacttgctatttcatcactctatgcctgtttttctctgtaaaattgaaataacaatagtgcaataagtgtgaattattaaaattatgatttttttttcctattctgctctctctgaaattttatttttcaccctaagtgtaactaattatgaatatattcctttcttttgaattctggcttagcttagcctctcccacacccgaaacagataaaaacctgattgctaggctggtcacggtggctcatgcctgtaatcctagcactttgggaggccgaggccggcgggccacttgagcccgggagttcaagatcagcctggccatcacggcgaagctccatctctacaaaaaatacacagattagctgggcaaagtggcacatgcgtgtagtcccagctactcaggagtctgttgggaggatcacttgagcccgggaggcagaggttgctgtgagccgaggtcacaccactgcactccagcctgggtgacagagggcggagaccctgtcacaaaaacaacaagaaaacataacaaaaacctgattgctgtccattactcaccatcaggtgctatttttcagcaactgctttttctgtctttcccccaacctatgtatacttttgtttttctactatcaaaagatgtatccatgaatgagataatcccattgaggactccatttcatacctactgttcaatagtaaagcaggcattgtagaagtatacagaaacagcattattccaatagagtggacacagatggaaattctgtaagagaaacaagatttagatgagtcaagcagaatattaaactaggtgataaattgtttcatgtgttcattgttaaatatgatttatgtgatgttaatattcccatttaagtaaatagatgagtttatttggggttagtaagtaaatacaataaggtcaggaacataattagtattacgagtggcatttattttcatctaatctggggttacagattataattcttaacattatccagctgtgtgatgaaatgtgccattgttcgcagtagacaccggacaaaaagtgtagctggataggaaaactcacatcagtgcaactaaaatcagtccacaacattcttcttcatgcttctgttttttaatcttaacttcttgatgtacagcagagaaccattgagaagtgggagtgatccaacatgatatgttagatatccataacacaccatgtgtcccctaaataatggcctcctggaatgggaggcataagaaatatctcatctggtctcccagtggtcagttactcatagaaagtagtgatg

SEQ ID NO: 587983 - DNA, 4001 bp, Homo sapiens
ccactgagcacccaggagtgtccatgacagctgctgatgccacacgggccccagccctgccatgctgtggtctcagggccctaaccatgcctggccttctcccagtgtgtggcacaggtgtgagaggtggggggatgaggcccagccagactgctctctcaggaggactctgggaaaaatactcccctaactacttcctccaggaacaagggactccactccctcctggggcggggcagggccttactccgcaaggaagatgctcttcctgaagtaatcgttgcacagggctgtctgctgcaggctctcaaaggtgaggcccaggttgagatagaggcgggtcctcatctcattcagctctccctgggccagtgtccctggaagatacccccccaaacactcagccacttcctccccacatggggtttccagctttgggccccatttggggcctgtgcagcgcctctcctaccccctccctcctcccgaggtgggtgcaagtgtcctgcggcagatggagcacagagtggataaagagctgacgatctccaggggaaaggttgagcggggcatgcacccctcacacaagagccttgcaaagggagggctccagaagacgggattgcccaaggaggctgcgggggtgctgggctgcagcctcttcggcccgaagttcaggaggcagaaaacgcggaggggtctgcccaccctccagctcctcatccacaatagccaagctcttctcaaaggcagcctgtgcctgcagcaaagcatccctcgactggcagtggtcatagatgtccaggtgggtgcggccgatggtggcccaggccctctgcagctccgtgtggttgcgcagggaatgtgccagctccaggtactggtgctggtgctgagtgtggaaggaagtcactgctgtgagccgactccgcctcaagcaaaccggcaccgccagattcccagagaccctgttcttgctaaggaaagagcctgctccccctaacccccacagagcaggccaaggccagacacgtgcccctcctctgcatgccaagggctctctgtggtgacagtggcttcacgctgtatgcagccaacgctgtcacgtggggaggggcagctgggagttggcgggggggttgcagtcctgcctccagcagccagggtcagggagagcttttgggatggggcctgacctcccccaacacaaacacagctaaaataacgttcagtaatggtttctggtgccaggaaacctactcctgccccagtcccaggaaaggctgtggggtccccaccggaggactggcccggggcggtgaaggcaaggctgcgtcaggtcaggtgtcccctccagcccgaggctcctgacggcgaagaccaggcctccctcctcagaaaagggctccagaggccgaccgggctggacgaggccagtgagggcgcccgcacctgcaaggcagccgggtagtcctccatctcggccaggcgctctccgatcttgcggtgggccacggcacagcccagagggtcgtcagcgcgctcccgaagctgcagctcctgccagtgctgctccagagcctcggcgtagcggcctaggcgggggcacagcacggcctggcaggcgtcgcgggtgcgagggcggccctggggcggcgtctgccggaagagcccgtcgccccccggcccccgatcccggcccgggcccgggccccggccctgcctcccgcctcctggtcccggcgctcaccatggccggccaggagctcccccagctggtggcacagcgcggcctcttcgcgccgctgcccggccctctgcgccttggctttcgccttgctcagctctgtgggaggaagaggagggctgggcctccgcggcggggtccggggccggggccgagtcccaagccctccccagcctccgcgcccccggaggaaggggtccccgaggaacttacggcgaagctcgcgctccaggctcatgctcggatcgccgcgggatccggacttcccgcgctgcgccgcggccccgcccctcgccgccgacacgcaggccccgcccctcgccgccgacacgcaggccccgcccctcgccgccgacacgcaggccccgcccctcgccgccgacacgcaggccccgcccctcgacggcggcggcgggcgcggggcattccgggaagtacggtcggcccgcccgcggcatcctcggagttctcgtgcgggaggagctggggcggggtggcggcgacaactggggcgtcccaccctaggggccgtcttcccggacgccgggttggcccgcgcgtggagccctctgcccggcccggggagtgcctggtggggaccccgttcctcctcgtaggcggcggggacgcgggaggccgggggcccggagccagcccgtccggggtcgcagcgcgccctgggtggggtcttctgggctgcagcccccgtgccgcccgcgctactcatggtggacgagctgtgccgccgccccaattcctcccgaaattcacacacacagcctgctcacaggcgcaactattaaaaacgaacgtagtgtccagatagactgacgataaattcacgagcatttggctgtggggacgtaataaggtgtcaggcgcgctcctcctccgcagaacgcagctgggtcacatttggggactcggccccaaggactgttttgggaggggaatgtgctttccatagtgaacaagtattgtttcagcaatgtgtatgccagctgtattctcggaagagtcagtgaacctgtgcttcagctgcagaagtagcccgggcacagtggcccgcactgtaatccgagcgctatgggaggcccggtcaggaggatcgcttgagcctagcagtacgagaccagcctgggcaacatagtgaggccccatctttcgtgtgtgtgtgtgtgtgagacggagtctcgttctgtcacccaggctggcgtgcaatggtgtgatctcggctcaccacaacctccgcctcccgagttcaagcgattttcctgcctcagccttccaagtagctgggactacaggcgcgtgccagcatgcccggctaatttttgcattttagtagagacggggtttcaccatgctggccaggctggtttcaaactcctgaccttgtgatccgcccacctcggcctcccaaagtgccggtattacaggtgtaagccaccatgcccagcccgataccccatctttatttaaaaaaaagaaagggagggagggaggaaaagaaagaaaggaagaaagagagggccgggcgcaatggctcacccctgtaatcccagcactttgggaggctgaggcaggcagatcatggggtcagtggatcgagaccatcctggctaacacggtgaaaccccatctctactaaaaatacaaaaaattagccgggcgtggtggcgggtgtctgtagtcccagctactggggaggctgaggcaggagaatggcgtaaacccgggaggcagagcttgcagtgagcggagatggcgccactgcactccagcctgggcaacagagcgagactcttgtctcaaaaaaaaaaaaaaaaaggaagaaagagagaaaacaactgcaaaattatgtctagaatcctgtgacatggggcacccaggcctctaaaatacccttgctatcccccattaccttgaggaccaaacacctgccatgccttgggtatctgactcccggctacacagcacacccagcactgcactcaggtgcagtggctggtttcccagaggccccagaggaggctgggtgcacagagtccaactgaggagcctcaggagtggaagatagatgagttaatttccatcgtaattacagcaagtcgttgggcaaaactcagccagagagatctgttggggagagagtggtgtgatgcactgacaggtccctgggtccagtaaaggctgctggagccctcctcaggctgacggcagagcgctggcctcctggcgtggcccctggact

SEQ ID NO: 587984 - DNA, 4001 bp, Homo sapiens
ctggagaggctgaggcggaggatcacttgggcccaagggtttgaggttatagtaaactatgatcaccactgcactcccacctgggtgacacagcaagactctgtctctacacaaaagtaataatataaataaataaaaatgaaacattcacagtaaataaaaggctggaacctggtcttcgccctgtcttccctgatttttatgctttggcttcttcactttgagcttctttgcattttccagccttatctgcccagtactctctctcttcctttaatcaaagaaatacgctcctgtaactccaaagaagaaacggcaacaccagtgccaaaatgatgtttttgacaggaagaaacataaacttcacaggaaagcagtgacatcacgcccctcccattcctcccctgttctgatcctgggctgtggttcagacaggacctacagcccagacagctccttccaccccattctctaccattgtagtgatgaggttagacccgaatgttacaagagctgggcaagcaggtgaagcacccccagcaacaaaatccatcatcataaacatgcaaaggccactgcttcccaaaagtatttgctacctcttgagagcaactttatcatccactggcaactgcttcaaattgggccccgactgtctcccatcacctatctgcaactgagtgtccccacctgcaagaaaacacacacatctccagggccctggggtgagcagcaggaccgttccacagaggtgagcctggacccaggcagcagggacactgctgcacctgcggctggagtgacaccgaaaacacagcagcagctgagagggcaggagaggcaaccggccacgagcctctgttggctccaaccaccaaaggatggtgcttattcctgaccccattactacgcaaccaggctcactagaaagtttccattagccggtctggagcatattcctgggtgtgatatgccatcatgttcatgttttttaaatcactattaagtaaagcgttttttttgttttctgttttttggttttttttttagagacagggtctcactatgttgcccaggctggtctcaaaccctgagctcaaacgatcctcctgcctcagtctcccaaagcgctgggattataggtgtgagccaccgcaccggcccttaagtagactattttgaatgctgcatagagactcccctgaaaatagcctgttcttgggttttagctgggagcttatggctttagatgcgccagaccaaaagaaaaaaaaacagctgcaaacctgaggtgttacaaggtggctgccagcaaagcgatccaggagaagggaggcaggtcaccacgccaggagaagagaagggcagggaaaaggccaactccgggaagaaaggccctggggcaaagcgcatccaaagccgtcactctggggcagaagacagagcggaatcccatcagcgacggccgtttccagacccttttcctaggcagccagaccggcaccgctggccaggtgcagggcccaagcagaaagtcaggagccaagggagcgatgaggaggggtggggcagccaggggagaggacaccgagcgggaggggtaagcgaagggggaagagaacaagggggcctggaggggggacacaaaaggagggcccatggagatggaggaaacactgaggggtgaagcacacggaggggggacacagaggaggaggggacacgttggtggcgtcgtgcgcggagggggaggtacacggaggagtcgcggagaggcgagggatgtgggaggtcgtcaccaacagcgcgacctgggtcacccacaggaagagggccactgagggccccgcctgacccctccctcctggtggccctgcgccctcaggccgagtcccacctcctctgcagctcttccaggacccacgcggtcccaccgcaccacggctcccccggaccccgcttccccgaggcctgcgcggagacgccgggaaggcccgagcccgcgcatgcgcagccgccgccacgtgcctgccttgacgccgccggtgctgccgggaagggggcgggctgcgcaggcgcgggagaggcccacgcggtggccacgcggggcgtccggtggctgcgctcggttgggcccctgggctcgcgcgctccgtgggccgcggtgctgacgggcacccaggaggtggggtgggaggcggccggccggggtggaggggcgttcctgggccgacgtgctgttggcttccgcgacgtggtggagtctcgccagtccctgcagcgcttctgcgactctgaagataaagaggatcgtattttgagaaaagctcatggagcaaggagctcaaggagcaaggcctgaggtgcaagctgtcaccgggtcgcatctgcttagcagcctgcacattgctagcgagagtctccactcagcctgaacatagtgcttgggaggaggagggccgccaggccacacccgtggggtgcaggatgcgccatgtcggggtccgtgagtctggggtgacgtgagatcccagaggctgagtctggaaaattgagcggatgtggccgcggtagcagaatggacgaaggcctccaggccgagagggagctctgtgtacaagggcacggcaagtggccaccggtggccagtgtggagtacggctccctccaaagcaggctcttcctgcaggtattttatccgggaggtggactcaggaagcacaggtaagggagtagggaagtacacgtgttggggagcaggtgagagccggggcccctggactagtcctcctggaggcctctgggagagcacaggacacagttccgagtgggtttgctctggttttgaggggccatccttgccgccccacctctgccaactgcacttccagcaagccccgggcataggccagcacccctaagcactgagaaaagcgctcaggcaggaagttgcaggtgctgggggcgggggggcgttggggtgcatgggaaaggcagggtgctgagagcgtcagccgcactgcatgtgtgtgcgtggtggggctggggaagggctggcgcgtgttgacacgatggtgcgggcaccggggagcaccacccccacatgatcccctgtatgttgcagagagatgatggcaccagtgggcacactgctcgcaggtcaggaggaaacagggcttggtcaggccagagacagtaggagcctaaaccgcaggcctgcagaggttgaggggaggtgtctgataattagtagggtgtggaaatgagaatgagcgagttgaggatggtgcccaggcttctagtttgggtggtccggtgagtggcgctgtcttctggccctaaagccctgtcacggtaaggagaactgcctggaaaacgtacacttggggaagacagaagaggttattacaaacactccttcactttacaacttggctattttgtgataagttttagtgcatttatttgagtttattaaagatgccatgttactgccttcttaacaaatggacataggcagatagctgttttcctgttgtggtgagtaatggccaggagaggcagccttctgtggagcaggcaccgcagaacctttgcatgcagatggcatctcctctacaatggcgccggggttgctagagccacagacgctgagcttattttactcagaaagccacagaaacaataaccaaaaaaggatactatgaaggcagcatagatcatatgctttttaaaaagcccatcgtcagcatcagtgacaacaccattaccgctcagtcaccgagattaaaaattagtcacacgtggaaaatagaaacaggttttcagggagaagaaggttttgattccactgaataatgctccctcttttgcttggtaaatagatgatccatatttcctgatgatgtacattttcgagggtagctatgcctaggtggtctcagatttggggaaaaagccttggcctcagttgactgggaagggctcaaaaactataaatt

SEQ ID NO: 587985 - DNA, 4001 bp, Homo sapiens
gggagactcggggagaggggggttctgctgactctgcagagcttttccacgtcaggtgagaccagcctcacctttcttacaggttttaggagttcaagagagcccaccagccctgatacagcatgtctagggtggggctggtaggaggctgcaccactaagtgccctgaaggatgcaaacctagacaacgccttcttagagaataagggaagatggatcatgtcgggtgtgagaaaatgggaaaccacgtgtatctcggaactaactgataggagccaggcgcggtgactcacgcctgtaataccagcactttgggaggccgaggcgggcggatcacttgaggccaggagttcgagacccgcctggccaacatggcaaaacccccgtctctactaaaaatacaaaaattagctaggcgtggtggcgggtgcctgtaatcccagctactcaaggaggctgaagcaggagaatcacttgaacccaggaggcagaggttgcagtgagttgaaattgcaccactgcactccagcctgggtgacagggcaagattttgtctcaaataataataataaaaataaaaataaagaactgacagtgaccctgactgccaagtccttcacaaagcctctagggtagtcacatcaccagtctcatttcacagatgaagacactgaggtgaaacaacctgccggccagcggccaggcagggctgcaccactgggtgtgcgctcaagcccaactgagggctgcacattgtagtgacattctttcacccctgcagagaccagggcaccaagcaccaccatcagacacaagctggctttcaaagccagagaccttgctccaaacccacctgtccacctgggcgactgcagctcagcagcactttttggaaagcacctacctgcctgtgcaccctcggagagatgtgcctcaatgcagggcccacagccagccccagctccaagcgcaggccagaactccctcctcccaagacaccctgccccatctggggctctctttgggtcccaagctcctgcaggcagacaggacatttctgcagcatggccttaggcagctgtgcaggccctcagctgtgaatgggtatgctgatagcgcaccaccaggtcacagagacatgccacgctggaagcactaagtgaatgatgataaaccgcgagacctggcgggaactcctgcaggatctcccacgcaccagtgaggctgtcaactctccagctcttcggaaactccagcatttcatgcgcagagacccatccccatgcggctaccccaggcccagtatgcgccggcagggcttctcacatgtcctccaggaaagcgcctgggaccaccaacggccaccagggccactggatccatgcggcttgtgcctggtgatgtagatatgacagtgagcgcccgccgccatgcagaatcggtcctggagacaacccgggaaccgactccaggaaagagcgggtctcagaagaccatgcacagcaacataagctttttataaagtacctaaccaaaccctacagtgttgaggcccaggcacagctacacaaatgatgaaaccacaagcggaaaaaaagaggggagatttccccaaatagggttggtggggtggtgcctggggaagcaagggcgacgtcatgggggggcctgtacaccccgggcaggaggcgggccggtcacaccgcggcacgcatgctctcctggcccgacttttgggaaaaccggaagcagggcaaggccgtcccacgaggcctgccactcccctttctggacctacccaagcccggtgctcagggccctcgccgcctgctcactgggacaccttacctggctccactgcccttctgcgtcctgcgcgagcccgggacaccccgggaggccgggcggcgggggacctccccgagcagcgtcagagccgcccggagccgcagcagccgcaccacgcgcatctgccagcctccgggaaagagcgacaagctgggccccgccccagcggccagccccgccccgcccccagcggccagccccgcccccgagcgcggcctccgcccccagcggcgctcatcccaaggctgggcggtctaagcctgcacggggctgcggcagcaggaccactgactgtcctgccggcctccccctggtttccctgccttcgtggtccagcgccccttcacgctgggcggggacccagatccaaacccagtcccactgacctctgcagcacagggctggctgtcaggatgccccacaggtcacacgaccaggccagtgaactcctgcccagggcttgcacacagctctctcccagagcctctgagggcaggggcacctagcaggtccttcctaagtacacgctctgctgctctggagaagggaccacacaggctcagatggccccctacctcatcccctacaaacagcagcacttccaggacgcagaaaccggcagaagcacctgctgtccagcccacagcagcccctcagaggtggtgcctctggacaaaggtcacaggaagtcctgcgaaatcatccctgccaaccagcctctcactcccaaggagaccagagaccaggcacagctggagcctccttcctgcgctcagtccccagcgtgactgctgaccctgaccagggtttaaccccagtgtcttcactggggagcatggccaaggggcaaaacctctagatcagcacttggcggtaggccctgagccacaacaggccacaccgctcacctctggcagcaccgcagccttggtcttccccggtaaaaccctgacaccaggaccgtgggaagcagatgaattcacatgcattccgcactttcactgtgaccgttggggggaatgcagtggacacaggcaggaaaggagtccgggctgccaccgcacgccctcagcgaccctcccctgccaccaactgactcagtgtccatgtcatctagctgctggaagccatgggcagaggccgagggctgcaattgctcgctcttagggcccaggcagacctggtaggtgtcccatcatttcagaatgagcagctcagcagctgaaggtacacacacaccaggacacagcagctgactctccaggtgggccacctcctcccaggggctgcggaacagtgatgcatattttttcaggtaaccctttctacaaaccagaagagggccttggcccaggcccaccattccttcaacggaatcctgaggtcaatgtgttttccagttcaggtttctaagggtttttgattttttgttttttactttttgtagagatggggtctccctatgttgccccggctggtctcgaactcctgggctcaagtaccttggcctcccaaagtgctgggatttcaggtgtgagccgatgcccagttggttcctcaggttttgtaagagggagtgtggcaggacaaaaaccctaagatttctcaatagatgcagaaaaagcagcagacaaatccagcaccatttcatgataaacagaatggaaaacccactcaagaacagaatagaaagaaacttaacctgaaaagcagcatctacaaaaccccgcagctaacctcatatgccagaagaaagactggacgctcctgctgaaatgaagaataagacgaggatgtccactctcaccactgcctctcaacatggtaccagaggctctaactgagcaaacaggcaagcagatgaaataagacacccagatcagaaagaaagaagtaaattatgtctatttgcaggtggcataatcttgtatatagaaaatcccaaagaatccacaaaaattggccgagcaccgtagctcatgcctgtaatccaagcactttgggaggtcaaagcaagtggatcacttgagccaaggagttcaagaccagcctgggcaacatagtgagaccctatctctatggaaaataaaatttaaaaaagaatccacaaaaactagtagagctaatagatgaattcagcacaattgtagggt

SEQ ID NO: 587986 - DNA, 4001 bp, Homo sapiens
gcaatagtattggtgtcataagcaaaataaaacgtaacacaatacttgagtgtacagacaaaacagattttagactaaaagaactatgtcaccagcaaataatgaaacttcatcacacaaactcctatgcgcttgccaaagttccccgtacctttcaacttgcccgtagctgaagggctccctgtacaatggaagcccttctgccttgctcaagactggatgtccctcttttctaacttgcctaaacaccatcggcacacagcacagtcctttgagtgggtctcacactggacacagcatcgaggagcttctccacggggaagtgtgtgtgtgagagcctgcctgtgtgtcaacactgtccaagactcggagctgcgactcggtcgcgtggtgcggagtccagggctgagaaggcagcgcactaaatatctctgtatcaggtaaaaaagccgtttggtgatgactcgccaccaggcaaatgttgggagtcccaacgatttttcccgtggaatgcaccgagggtcgccatggatgtgcctgcaggggctgtgagtatcaggcagatttatcaccaagcgagagttgggcgtctaaaaggcccgcccagcgttttagagaactcaattctctctgccaacgttcatccaacgggactgcttagacacgtccaactagccctaggcgtgggcagtcgtgcccctgcgaccactctgggggaccggtccctgcgtgtcctccctctctgggatgagagagttcgagaagccgggagagtaaccccctccctcgtaccccctgactgtcctataggtggacccagccgaactccgcagcagcccaggccagcgccccacctccgggtcaccggcatgatccgcctctccccgggcccccgcggccctggcacccgaggtcagcgggccgtgggtacagctcagccgcggaccctgctccgcgagtgcgggagctttggacttgaacgcgacgtgctcgcccggctcccaacaaacttgcaatttccgcgcgcaccccttaaacaggaactgttccccaaaccttgacccagctaccccgctgtgctctggcccgcggacctgtgtccgaacccgggctcggctgccggaaccggtttgagaaaacaaaagagttgtggggcagttttccctgtggggggcaggggcgcctcccaggtccctgcaccccgactcccggctgctcccctggcaactaatccggagaagggaagtggtgccacgagcccccactgcccggggagggagggagagagaagggggaactgggaaataaactgaattctcttactctgcctccgttcctggaccccagacacacccccaaagtattccacggttttctcttattatttttttaaacgccccccggcaaacctaggcagggatccttagccgcgaacagcaggaaggaaagaatccgagcaaatcgtgtcactttccgcacaatcgcggtgtttggcaagcccccggagctactccacaatatttactacccaagcgcacgcaggctgcagcgggctgcgagccgagcgcgcccgggaccggcctccgccaagccggccccgccgcggcccggccaccgccgctcccctcccaggatcaagcagcaagaacacggtggaaacaaaagcagagcgttcaccttgttgcaatagtaggggtccaggcagggagaaggtcccagacagggagcgtcgggcgcagcggcgggctgggctggaggtggataaaatcttacgtccatttcactctcacatcaagcaactccttttctttttccttttttaaaaaaaagtgttcagcaaaacaagcttagacggaacagagtgaggtgtctgggctcaggagtaaaagaaacaccttccttccctcacatccgtttgtggtttgtttaagaagaagaggaaaaaaaaaaaaaagaggggggaaaagcgctcaactctcccccaagccgcggcgcgcacccgtcggcgccgagcgcgcagcctgctccaccgccgcctcttggtcccgccgccgccgctgccgccgccgccgggcaggtaacttcatgcgctcattgtcccccccgcccgcccccccatccccgcctcccgcgcccctcgcagcccggcacacgcgctcgggctctaggtactgggcgttttattggagattctgagttgttctgcttgtagtttattttctccaccttggaggcccgggatgtggggggtgggggggtggggcggggatccagaagggacagggcgggaggggggcgagcgtcccgggccgggcggggtagggagcgcggccggacgcgggctcgtcaaggcccaatggctgctgttcggaaccagaggccggggaccggagaaaggaggagcggagaaggagaaggaggagagcacggcctggctgggacagaagcggtgggaccctgggaggcctccgctgtgcccgtgccgcgctcctcgggaccagcgcgtcgcacacaaaggggctgccgagccagagccaccagcggcctcagggcaccgtggggagcgcgcagctagggggcgctgtggcgcaccccgccccgcagccccgcccccggccctccccggccccaccccactcccaccgccctctccgcggccgtccccacccctatctccgcgacccccactcctcctcggctgttccccaaccctgtcactgtgctcccctccctactcccggcccgtagtggaggtgactttcctgcgcagcgccgcttctgagggcggagaacccacagggagtgcgacccctttgcacgctgtgagtgggcaactgtccgagggactcgagccgatcgaagggtgaggaccagctcgcctgggggtggacggcctggaaaagccgcccctctttggcttccctctgccgcctgcagcccgcacccctccgagattcgtgccccactggacggtttgcgaaggctgaggctgccttggggactcacaaaagaccacaggggtgattcgaagtgtaaatagggaaacaatcatcagcacacaatccggctaaagggataacatatgagtttgcttgttgtccttcatgggattcttctctttttatagctggacgccctatagggctcttggcagtccacgaaagacctggagtccgcctccccatttctccggtcggtgagtggcaggaggaaatcgccaaacatgttttcccgctttgcctccccaactcggaaacttgcaacttgccgtgtcctggaggttgagacaatttggggtctcttggctgccgtccaacagatttatctctgagggcagtgtccttggtgagaggtccaagtaggtgtgggcgacattgtcctccatctcatgagggagcagccctgcacactagggcccaaaactctgcgaaggagcttggaagttcttcatccgttccacttgttttgctactccacacacccttctaggacatgttgattgccaactgctctgtgcagctttcccatagctgtctgttcccgtgcatttcggagcaccaagcaaatacgagcagagagacctggaaaaaaaaatgatgaagacagtattaatgataaaattaacatggctgagtgaattgtcaatgcaagttcctttactaactctttgttaagttttgctttgtactccttacatcctctttctcttaagccattgttttaatttcttctcgttatcatttttaaaagtaacagaaatacagctttcttcctaccttcacgattgacttggtggaggttgggttgcaaagaggaagcagtaagaaaaaataattattctatacattcacaagtccttcaaggcacaaaataaaagtaagaaatagaaaatatgtcctttctcctaataaaggtctttataataaaatttaaatgaagttttgtgtttcataacagcttcccaaatactgttgtagatactaaaatgtgcctgtatgtat

SEQ ID NO: 587987 - DNA, 4001 bp, Homo sapiens
tcattgaaaagcagcttcagaattatccttctttttatcccaccctcttccactactttaaaaacgtgcagattctagtaatttaaaatgggttttgaactggagaaaaaccaagccaagaaagttatctctgcttgttccacttatatgaagactagattcaagtaatttaaaatggattttgaactgcagaaaaaaccaagccaaaaaagttgtctttgcttgttccacttatgtgaagactgttcaactagtgtgcaagggaggttattcccccagggatccacccctgtctgcccctaaggctgaaagacagtggacaaagacaagagtaagtggtaattcatagcctgataatcttgaattttgaaagcagacatcagaggaagcaatggcaggaaagaacaaaagataggatgagaaaacaagaccttggtcacagaaattagtaaggtcctggttccaggcaggggccttttaaaattatgctgccagttcagaattacactgattgcgacttaaaagcttcccagtgcttttcacatctgcaaatgaaaatgtatttcaattaccaggctggtgatttcagtatcgtgggggaactcattatgacttctgttcagtgaccccaagggtcacattgttcccccttttcccaaaactattgtgcattgagaaaaggcttttttagcaatagatgcccaagtccttgggagtcacagttgtaaagaggctcttccttaatccactctgtattggaattaacctactgagcagatataatcagaaaatacaagcaaaacagactctccaggtaaaattcagctgccactttgaaatacaaacaccatttccttttattaattggctgtgtggccttgagcaacttaatctctctgtgcctcgggtttcctatgtgtaagatagccgggcctatttcatataaggttattatgagaatcaactggggcgataaagcaaagcccccagcatagtatatggcacatactcagcgctcagtaagcgtgagcgatccaaaggatctaaatgttaagggccaaggagagcgctctttccacaggtgcaaagtcaggtagcgaagactgagttcaagccaggtcaagcaagggacaggccgcggacaggcgggggccggtggccgggtcacggagcaggttccccatagccgcagggcctccggaactcggagggcaggcgcaggggacgggatcgcagggcggggacagagcgccgggccacaagcccaagcgccgctgtcttcggagatgcgtcccgggggtggccgcgggagccccgacgccgagtcccgaaggggcggccccatccaacggccgagagcaggcggaggaggaggagtggaggggagtgaggaggggtgagaggaggaggtcccgccgcggccaagaaaacaagccacgctcgggggaggaggcagagaccaaactcccaaccgccgcccagcgccggggccaggccgggcccttgtccgcgccgccgccgcctctgtcagcctctgtccgcgccctgggccccgggggccgccgaggaccgacccactgggtgggcggccgggcccggcggcggcgaggggaggcagcgagggggctcggtgaacgcgcaaccggcgccccgaaggcagggcgcgcggccggccccgccgggctcaggagcgggcagcgctgcggccccaaccggcagcgaggcggccctggacggacgcccgcccgcccccccccggcacttacgtgggcccgggccgtgcggggctgcgcggggaagggagcggccgccggctcggcggggaaggacgcgggcggggcgggactgctgaggtagctgcggtggggccgggctgcgctgcacctcgttcaggtacccagacggcaggcgcggggccggctccagccctcgggtcgctgcgcccaggccggccagtccaagtccttttgttgttgtgcagcgctcgcaacagctgatcggccgctccgctcgccgtcgggccccgctgccccgccccgggccgcgccaggccgggccccaccaatcggcggtgcgggggccccggggccgccctgcgagaggttgtcaccaacgcacgtgacctggcgcccggccggcggcgcgctcagctccgaaacaagcccgggcaacaaaaaccgggagctgagcgtgaaggcctgggcgagcggaagggtgggagagaggggctaggccggggagggaagcgctggggccggggccggctttccaggagccggcgggagcggggtgcgtaagaggcgggcgaggaagaaccggcgggcaacgggaagggcagaggtggatctctccctcagcgacccctctcgccgagtgaagggtcgagggtttggggcacaaagggcgcagaacgttttttcctgtgagaggaacattaagactcctgggagggctggggctaacgcctccgagagccccacctggtcagcctagggttagacgtgtagccagggtgctgggagggggccgctgctgggccccagatagaggggtagaggccgctcaatcacggagccaggccccacctgctgtagaaaccgccaccgagagccggccgggcttgctgcacgctctggattccgcctgcctataggcgaggcacaagggactgcgagaccaggcctgaaggcagagaggtcagcaggctcgggggcctctgctccagcggacaacaagcgcaccgggcgggaacggccgcctccccaggcgctgcagcctagctctcatgtgacccacggaacttagcccctctgttctgtttgcatacctgcaaattgtgggcattcacgccgggactgccaactcaccaggttatttatagtgacaagagagtgagacagtgggcttgaaagtgttttccagaccaaggctctgtcccacatataggtggattaactgtctggcaaaggcaggtgagtaacgttgatgcctatcagctctcatgtggatactgtttggactgggatgtagttctttgacctggggtgagctgtatagcaaccctggagggatgcctatcacacattacagtatctgaaagacactcacattctgaccctcacaatgtagtcagtccatttccaacaatgctggttttaaaggatgtaaattgcagtgcagggagttgtcagacaccaaggagtaatgatcaaaatatgatggtcattggaccttatcttgggagaaagagctaaaactgtgttctagatagtctcacagacttgaacatgctttggattttaggtttttgcaaatcaggcttgttctaatattttctcccacatgctatggtaggagccccatgatctcttgtttctccctaggaatccattgaagaggccatctccacattcagaaccaaggtatgatgacaattacaaggggctaatttttaaaaagaaaaaggcctacctttttccagtttgataaggtttatcatggttaaagcaacatgtgaaatcatcatcttgttatgatagaaaaattcaatatgaagtagatcatttttccaaagatgaccacaacagtatctccatcatgaagtgggtgtatttttcttccctttgaatctgggctgaccctgtgattgctctgaccaatagaatgtggcagaaagaatgttctaggacttccaagcctcgtcattaagcaaaagcattaagcaaaccccacagcttctgctttgtactctggaaaatgccagccacccatgaggagagaccaccctgctagccacagggagaggctatgtgaaaagaaagagatgcctggccagctctagctcttcagctcatcccagctgagctaccagacacatgagtggaaaagcccttaggaagttccagctccagcagacaccatactgaacagaggagagataagccatccccacggagcactgccaaaatgacggcattgtgaacaaataaatgatcattgtt

SEQ ID NO: 587988 - DNA, 4001 bp, Homo sapiens
acacccaaccctacaactgccctggttttgacagaaaacatcccaaggcagccatgaccataacttggaaaatgaaaggaggtgaaaccaagagacaagaagggtagaagggaactaaaagaagcaagcagtgtcaatcttcctgggaatctggatgcttgcacaccgatcaaggtccacctgaagtcacaaaaccacagccccagcttctcaaaggttccctccctcccccgcaagtcacttgagtttcagtccattatcaagctctagcttccccattctgtgtggcccctattaaattatacataaaatttataagttagaagggggctgggcaaagggggagcccaggcccctttattacagaggtctgaggggggccacttgggcaaggcaaggtcagcactggagaaagtttcctggcaatcagaatcccccagcagacatcaagctgctgcctcctgcccccaacttctacagaccagctctaccccttctctgttatattcaacattttcctgttcctggaaatcccagccacttttggggaaagatggctaccaggtgcaaccaagagaggaatgctgcttcacacatccctactgtcggcaaatacacaaacctaaaatacttaaaactaagtttcatgctgtcacctttaccatgtttttttctaggttacccattttttcagcttaaaatgaacaaaatgtgacctgttcttcattaataaggaaaaaattaacttctggaaaaacctgattgcttatttggcaaattacagagaaggtcatttaaccagttcccagcattggctatgagatgagggacccagccgggaggatggctaagctgcttctggctttctgctgccttgtgccaataaaggaagggcctccctgatggtgctcctggccttcaaagcaatctcatactggtaagtatgaaggaataactgcttctaaaggtacagcaatttctagtttttctttaaaaaaaaaaaaatctcttgcctagcaatttctgtaagttgctctcaatattccataacaaaacccaggacagtcattagcaagaccttgaactgagtcagtgcttaaccatcattttactaaagagaaaaatcgggaaagttgtcgtaaattacctaagcaactagaaaccaaggacttcagattcctccttttttgttatttaccagctcaacaaactcaaagtgagcttggaatatctatcaatggagaagtctagtgatcgcataaatagtactaactttaaaatctaacttctaagtatacacatattctaaatatttaatgagccatctatctctgtactttgaatctagaatagcttattagctagttacaacccaacaccaccctggtacatctttacactaacaattttaaagccaggcaaaccccaagttatgtctaggttttattccaagcaaacttaactttacaaaattagtagttaccaaatttctgaagagtaggtgatccgggtggagatgaatttccactaggagacaagtagagatagcttttgttcactcctgcatcaaaatcaaacggggactggtagtcctcatataagtccatctctctacaatccattccagacaaacgcagaatgcatggctgtctaatcgcctgatatcagccttcagttgagtgccgctttggccatattccctttgtagggtgcaacttcactgaagaaatcaaccccaggagttagaggccctggcttctgggcccaggtgccagcatttccttttgggagccttcacgcccctcctgataagcagacctatttaataaatgatttatcctgagcaaccttaggaggggctctattcaccacctggtgttaatttcgatcaacaatgaaaaacctgggcagggagcgagctttcctcagtcaacaaagaagggcagggttctgcaatatggcccagaggtacaaacagttcaggcaaacatcagacactggctgacttacaacaagaaactacaatttatttaaaataaataaataaaaaaatcagctgaccatgactacaccagggcagacttaatcttctaggacaaggagggattaccagtcagtaatctcccacaaatgccatctgagtgatactttttttccaccctggattacagtaaaattctgaaagccaagcttcctggtttagcaatcagctttctaagcacaacttggtataaaaataaagctgtatttccatgattactttatctaatgtggagtctggctgagtgtcacaaaaacttcagactgacttttcttttctctctctttttttttttttttttttttttagaaagctggtgcttcagttacatgcactcaaaggagaagaatctactttgaatggaaagctcccgggtattcccacaccttctttgtttgtctaaggccatggctctgcagagctgcaataaacctgcgtacccaccctgcagaaggactgggccacagctagcttgtaaaacaaaactaagtcaccaaatttatttcctttaacacagtctcttagcagaacctttctatgctgactgtggccttggctcaagcaacagcaattgcagctcctgctggttctactaaggaggtaaaaataaaggcgactcgctttcaggtgggcaatgatctgttactgcataacaaaaaaaaaggcagtgttctaatctaatctaaaaggcggttttcaaatctaaaaaaaaagagctcagatatactctccttggattggaagcaagtatgaaacctaatatattttaagcattaaaaacatcagcatgtgtctagtgtataaaatacatatgcaccaagatggtctgtattcatcttgtgattttttttttttaaatacagaatatatgctggatgattttatttgttatttttgttagtctcatgttgtactctatttacagtaggtctttttttgttttgttttcgatacagagcttcgctcttgtgaccaggctggagtacaatggcacaatctcagctcactgcaacctccaccttctgggttcaagtgattctcctgcctcagcctcccaagtagctgggattacaggcacccaccacccactatgcccggctaatttttgtatttttagtagagatggggtttcgccatgttggccaggctggtctcaaactcctgacctcaggtgatccgcctgcctcggcctcccaaagttctcggattacaggtgtgagccaccgtgcccggactatggtaagtcttttttttttttttttaagtttatttttaacaacaaaaaaatctgtatttttctcctaaaaggtaccaaaatttgggcaactataaatgtttcattctatacttagaaataaaataaatggtttcttttttatcattatctgaaagaatggattgtctggcttcttgaaatccatggcctcttactgggacaggaaaggcattggagttatgtccctagactagaaagagtatggttcatgaggtccctggccctctccataactctgcatttggtcactaaatattggtagaaaaagtatttgtccattactttacttgttccaccacctagagccaaaggcattagaaggtaattaatagtgatacggatagaatgcaagccacagtcacctccatccttctcaccatctctcaagcccatgtccttgacctttggtatttacatccatgtgacacgctctacctgaaatgtcacctttttccagcctgtcaaagttattcatccttcaacactgaggcagaaatgccacctcttcttagaagccccctagtctctggccccctcttctcccagcagcagcacacagcatgtgaagagccccctgacaggcgcctgtgcctatccagggcctctccagggcgctctaccggatacctgccctgaaggtttggctcctaatcaatgtggaattaaaaaagcaaatgatggctc

SEQ ID NO: 587989 - DNA, 4001 bp, Homo sapiens
gtcaaacgacagtgtgtaacagattagtatacaaatacacatgggcacgtttgtcgtcatgtctcccccgtcctgcgtcgcccccattgaaagccagacagacataatgctgacttacatggtggcccctaagccggctaacaatatatacaagacatgtgacaagctttctaactcaaacatttgcatgtctactatgtacaagtcatcatgttatcccactcaggacaaccaaagatgaaatgtttctaacctcaagaagcttaaaatttagataataatatgtatgtgtatatatacgttatacaggtaatgtataatatatatatacacataggtaacacatataaagcatattgtatgtaatgtttgtaagcacttgtgttaagtctgaaattaatctgaaggggagcgaggaaagagctgaaagactccaaagagtctatcttacaagtaaatgaaagtaaagtacaggcctggcccagtggctcacacctgtaatcccagcactttgggaggctgaggcgggtggatcacctgaggtcaggacttggagaccagcctggtcaacatggagaaacctctgtctctactaaaaatacaaaattagccgggctgtggtggcgcacacctgtaatcccagctacttgggaggctgaggcaggagaatcacttgaaccagggaggcagaggttgcagtgagctgagatcccgccactgcactccagcctgggctacaggtggagactcaaaaaaacaaacaaaaaaaacaccagagtctgaaaaaaataaagtacaagatagtatatttggaatatggtttgatttacataaaaatgcacacatgacggcacatactggaggaaaataagcaatacatgaaaacttgtgtcagggctcaaaacaggagtgattcctatcctcacttcccaagattacctaccttgttttcttttttcagcatttatgtatctttttaaaagcgtgccacacacatctgcgtacagtcacaggcttatgatcagcagagatctctaggatgaaactatttaaatctgaaaaccatggcctactattgctctatttgggggtaatttcacttgagctgttttcagaagcaagtgcacccaacgctatggtaaattagactgaaggttttgtgttgtgggatttcacccttcctacgaaaagctctcttccctcaaacccacagacaccactccacaatctgggggtttctagtatgataaatatctgcctcccaaaccccccatgggtcatacgccaccaaaaatcctaaccacctgaacttagaagaaggcagaaagtcttaatttatgagggagagaggggtttcccacctggagggacgagagcgactcactgtcctctgttcctggttccagtcacttacaggagctggctgcgccgtgctcccttcacgcggctttccacccaaagcgcatcacggccgccagcccctgacgctagccccttcgccacctcccagaaccttctctccctctcccccacacacgcacactcacactcacacatgcagtcccatctgcccccgccagagccgctccttccagggccccaggatgccagatccggatccgggagatgcaacttgcggcgccggcccaggaggctcggcacctgctcgagccgccgggccgcgctcagccccgcgccgagccaaagcccgagtccaagcccgagtccaagcccgagcccaagcccgctgggtccgcgccctcaccttgctcgccgcggtccatgtctccagcccgccgcctcgtgtcctctgcagcacccccgcctgcagcccgtcccggctcggatcgcccgccgcgccgcgcagagctcctcctcgcctccgccggcgactcccgcgaagtccccacccccagaggcgtcgggcgcggcggcgccgcccgccctcggcctggagcgctttcctggggcgtcacccaaccacctgacccggtcgacctgtgcgctccgccacgtcggcgcgggcggcgcagcgctaggagggccgggcgcaccccgactcccgcaccggctggaagtcggccgggaggagggaagaggacggcgaggagatggactcggccatggaggctgcgtggagcctgcttgggaaccgggatggcgtttgccttccaccatcaagttatttataaaatcaaaagtttcctccgaggccttggagatgccctttctctgcatctgcgaacacctactttcctatacttacagtaggaaacacaggaacgttatttagaaatgccagtggctcttttctctctgtattttattacctaaataatgccctatgatgtcttctctaactaggtcataaaccagcataggtgaaaattgcaaagaatctcttgaaaaattatatagtcttttccatagaatgcggattttttaggtgactaggaagattttcatataataaaaatctgttttgagtgcgggactgaggacaacactaaaatgaattaaatcaaatgaaattaattaaattaaccgaaggtcagaattatcagcagagatctttggaaaatgcgtgttgaggcgtcatgtccgttgatcaaaggacagtttgaggttcccgtaacaatccagttcttttcattagtagcgttaacaatctgttttcacagggttttgcagttactcgtcttccatgaagtcactttgattgtatgggtcatggtcttcaggtggtgtctcaatttcgtaagctatctgaggctgcaaatgaagtggggcttcttttctgtgttgcttgacgtttaggccgaagcattgtgtagcactccacagacaacaaagaagcacttattcagatgttttaaaattacttgtagttacctgaagtgactgtatgctattaatatctctatactgtcgtgctgtatgtaaagtgtagctctctccagcctgcatcttccagtgtcttctggggacgtttactgtttgactcaaccagatgtgatctcttctatttgagtccttctactctgactgcacttggctcctctcctgtggcactcaccccagcactggtgccaggatgctaccagtgtatgtttcacagtcctattaggttacaagctccaggtggtaaagtccttaaaatggcctattaaaaaaatcaaaaaacaggcctggcacggtggctcacgcctgtaatcccagcactccgggaggccaaggcgggtggatcacttgaggtcaggagtttgagaccagcctggccaacatggtgaaaccttgtgtctactaaaaatacaaaaattgtcgggcgcggtggctcacgcctgtaatcccagcactttgggaggccgaggcgggcggatcacgaggtcaggagatcgagaccatcctggctaacacggtgaaaccccatctctactaaaaataccaaaaattagccaggtgtggtggcgggcgcctgtagtcccagctactcggcaggctgaggcaggagaatggcatgaacccgggaggcagaggttgcagtgaactgagatcacgccactgcactccagcatgggcaacagagtgagactccatctcaaaaaaaaaaaaaaaagttccaggtgggcaaagattattttggtcatctctgcatcctttaattctaccatgcaattaataaatattgtaattttaaaccaggcatggtggtgtttgcctgtaaacccagctactcaggaggctaaggcaagaggattgcttgagcccaaaaaggtgcaatattttttaaaaaatttttaatgtaacataaaggtaaattttggcatcagcagaaaattctgtatgtggtaaagaatttttgactagctgatgctgagatctattgtatagaaataaacatctggagagacaatctctcaatgtactaatttgtggacaaataaatagcacttgaacgtgagtgtccgttacaaatatttattgtttgtatctgtttaact

SEQ ID NO: 587990 - DNA, 4001 bp, Homo sapiens
tgttgggatgtttacaggcataagccagagcaccaggcctagcactgtatttaccttcacaccatatcatctgatacttgcaaaaaatggctgtgaggagaacagtacaggtgatattatttcctgataaagagcagaaaaattgaggctcagacttgggtcacccagtaggtaggtggcacagcccagacttaaagcttgagaatgttagtttccttctacctaccctttaactatacctgctacctccttagcagtggtttcaaacatgcatgacacaatcaggagtaaataatatctgtatctagatccagaaaagcccatttgatgagaggcgaaaataaggttaaaatattatttaattttaaaattaaaaaaaaaaacaaatatgctccattaaaaagaaaatgtattcaccttttggtcactggtaatatcattccattaggttttctcaaggattcttaacgtcgctcatctttttttaagcactcctatgtcccaggcactatcctagactctggaaatacagactcgtaaaaatactccaaaatctctactctcacttgttacatgcaggagagaggagacaaaacaaggcaggagcaaaataatttgtatatttactgagacataaaggctccagagaaaaattaaaaagggaaaaaagcaaaggaatgagcgtgtgtattggggagcgaggggaaaaacgtaggatgttactcgttcaccttgcaaagtttatcatccacattcaacagctgttaaataagtcatcaaaatactagatacgtgggaagagaatttacacactcctgacattcccatcctctcctacttcaagaaacaaaattactcgattccttggcaccgctgttcagaacctcgatttatccatcagaccttgtttctttaaagcgtcagggcaaaaagttcgttaactggtaataatatcagtttaaaagacaaaaatgaaaacaatctggcgcgcctccactgcgccggtgcccggcggccaccgcccttcaagtcgaaagcagatgcctgactccggtttctcgctcaccccaatctcggagctaccgggggctcccctgtcactcggggcctgtggtctccaggccggcactcctcagacccgggggccgggcctcggccttccccggccctcgcggggctgacgctcaccgcggccgaggctggcagtccccccaagtccgcccacccgccccgagccagctcggcagcgcaggggccgcccccgcccgcaggcccctcgccggctgccacgtaacccttcgcgggaaccaggaactgcgccgcgcagcctgcgggagggggcggcggcgggtcaggaagggggcgacgcggcggtccccaccccctgcgggccgcgatgaggcccaccgggactttgcatctccgggccggccgccggggagctgccgccgacgtggggcagggcagggaaggcctgcacctcagggactgggggtctgcacccaccccgggcccgagccccccgcgtcctgggcggagaagccggggctggcatctggagcccgggcccgggctggaggtggcggggcaggcggttgggactcggggcgggctcacctcaaacatgagccccagcaggaagaccatcgccacacaggagacgatgtccgcgtgattctgcaggacgaattcgtggctcagcactggggggctcttggtgcttttcttgcgaatcgccatggtggggccgccgcccgcgcctgcaggtgctccgccccggttctgctcttcccagctgctcaccgactcgccgccgcctcccgctggctgctcctcacggccccgctgcagccgctcgctggggcttcacttcccatcccacagccagtacgcagccgccgggccgcccgggggaaaaaaaaaaacacaacagctagcccgcagcgggggcgagcatgcgcaccagggagacgacgctccctggtgccgcggccgcctccgcgagcccacagcgccacctggggaccggaggccgctggcccgcggccgggcgagcgtgcaggaatgtgagcggcgcttccctgcttcgcgccgggcccgggtttgggagtcgtttgaggcgcgagcttcctgcgcctgctcagcagcctgaggccgcggccgggtgccctcctgccctcctggccatccagggattgggtgtcagtggcctgttgcacattgtcacttctacaagtgactaacaccgtcaggataatctaaaactacgaatactacctgactccacaagggtacggtgtattctccagttttagcatctgccttaaaaattacctcagagttaagcactgctggggacttatttctactcttggtaagtttggactaacttaaaaaaaaaaaaagagctgaccctattctggtctgcctctccgtccccacccccatccccgtccccatccccacccctatcccccactggcctcagactgaagacgaagggatcagtttgggtttactggcttcacatatattcaaattaacaacatgttttagtaatctaagggaaatagtaaaagagttaaaaaggatcgtggattaagacacgtcctcctcttatcgttttgcccaaacctggagtcctttgtattctttttcctgaagaattgctctcctgtttacccataagccaaatgtagaaaccaaagtcatgctagattgagccctttcagcgcccttccacatccagtcatcaccaattcgaggcagacctatcaccccgcttccccactaccgcagtccgagggtacttgcctcttgcctacaatattacaactctggtgtaaccacttagtggtttaagaatgtgggttgttaaatcagaattctgccacttattacttgtacgatcaaggacaagttacttaatctctatgggacccgatttcctcatttttaaaaatgtattcatttatgtacttactgagggttgactgtgtcctgggcactggggatacagaactgaaatacaaattaaattattcctagggacttatcattctagtgtgggagagaatctttaaacaagatttcaaaagcgaaacagatgttaaattgagttgagcaaccaggagaaaaataaagcaaggggaataggaaagtgcgaggcacttatacttgcctgaagacctgcaggaggtgagggagcaagccctgtggatatcatctataaagtggggataactattgctcattttagtgattaaatgagatgattgaaggaaactgcttagcggggagtaagggctttataaatttagtcagggattattcttttcctccttctgggcaatcactagtttcatttcccttcagatcacctttcaacgtttatactagaatgatgcttctactggcagaaagtttttcagcgggttccctttcccttcatggaaagctagcatgatgaaatagccctttctgatttggtccttgcctaccccaacagactggagccctgcatctacaggccataatctctgtaccagcattattgactacacacactatacagttgcctctccatatctgtgggtgccgcatacactgtggattcaaccaacctggagtaaaagatattcaagaaaaaaactgcatttgtactgaacatctacagactacccccccatgattattccctaaataatatagtacagccaactatttatttagcagttatgttgtgttattataagtaatctagaaatgattggaggtctgtgggaggatttaggatattctttaccagaatattgcatcatcttatataaggcacctgagcatgggtggatttcggtatccgcgggggccctggaaccagtcccctgtgaagactgagggacgactgtacatgccatgacatgctctcttcccatgctctcccctgcctttgcgtgtactgctgtctctgtctggaatgttttctcctgtcctttcataga

SEQ ID NO: 587991 - DNA, 4001 bp, Homo sapiens
aaacaacacaaatgtccatcaactgcctgatacacaaaatgttaaatctatacaatggaatattattcagccacagaaaggaacaaagtgctgatgtaagccacaacatgaataactttagagcactgtgctgaatgaaagaagctaaatacaaaaggccacatgttgtatgattccattaataggaaatgccctgaatatgcaaatctatatatatcgaaagtaaaccggtggccgccaggggctgtcggaggggggaatgaggagtgactgctaatgggtatggagtttctttctggggtgatgaaaatgttctggaatgacaatggtaacacaagtgtgaatatactaaaaattactgaattggccaggcatggtggctcacgcctgtaatcccagtactttgggaggccaaggcgggtggatcacgaggtcaggagttcgagagcagcctggccaacagagtgaaaccccgtctctactaaaaatacaaaaaaaatgtagccgggcatggtggcaggcacctgtaatcccagctactcaggaggctgaggcaggagaatcgcttgaacccaggaggcggagggtgcagtgagccaagatcgtgccattgcactccagcccaggcgacagtgcgagactccgtctcaaaaaaaaaaaaaaaagaaaaatcactgaattgtacactttaaagcagtggattttatggcaggtaatcgaggctcaatgaagctgttatttttgacacactagatttctgaaacatttattgtttacatgtttccggacaactgtttttccctctacactactagtcctccacacaattaaaaaaacgaacaaacacacacaacaaaacctagccagatctttaggacggcaatgttcctgggcctccaacatcatccacccggtgctttgtttcaggttaacaaataaagatgtcataggtagctatgactaccttagaaacacgggacagtcaccagtttaaactggggccgtgagggatggaagggaagtcactcccccatacctttcaactgggccttgcttccagcgttttaattcctctctctatagaaacatttgaagacagacaacgcatcctaacacgggaaaactttcggttaacagacattcacgttgggaaggtctgcaggggtggaggggattggggtgggctgacagggagaagaccacaggccagtagcctgacttcctctccccagggttccctgggataagttggagttgacagcgcgcttatcccagagagcaccgcctgatgccgcccagctagatcgcaggcactttgaatccaggagacaggagggaaagggctaggggagaagtccgggaactcagggcggggaaagcgccgggggcgtgggctgtgctgggccccaggccccagccgcgcgtcccagaccccgcgggctccagtgggcttagccaggcccaggggcggggggctccagcgccgcggacggcccgggaggggaagccaggcggagacagctcggaggcacagaggggaaggggacccccgccgcgagctcgggagagcagagccggcccgggcagcaggtgtgggccgggtcccggacaggtgtccgccgagtcttcagcgggtgtgggacacggccttggacagatgtaagcagagcgccaacaggagcaagggcgcctcgagcaggtgcacgctgaaccccggcccggcagcggacccggacaggtgtggcgggctccgcccggacaggtgagggccgggcgagcccctccgcgggacgcgccgactccacggccagccgcgcagccctccccgcagccggtccgaattgcctgaccgggagcccccccgctttgcacttacacagccggtggccccgggcccggagcgggagcccacgacctggcgggcagcggggccgagcagcctctgcggccacttcccaggctctgggctggcgcttcctactggcggccgagccggcgctgctcctgcgcgtgcgcggaggccaggcctgggcccccgatccgtcccgggttttgcaagagacgcgagggaagcaagggggtaggagcgagggagaaaagaggaaggaggagcgagggagagaagaggggacagggagggaggggacatggggagggaggaggaggagggaggagggagagaaaaaggtggggtgaaagaaggagggaggaggagcgagggagagaagcggggacggggagggaggaggaggagagtaggaggaggaggggtgaaagaaggagggaggggcagcgagagagagaagcgggggacagggagagggtggaggagggaggagggagggaaaaaggaggggtgaaaggagggaggaagaggaggagggaaggagggagatggagggagatggagcgaggagggagggagggaccggagcaagagaacagagactaggaggaaagcttctgcacctggggcggcgcagctggaaggaggcccagttctgtccccgccgcttaccagtccttcagggcgcgcagctcaaatttcacttcctctgtgaagctcaggggtggaggccccgcggaagcccactgtggatccctgcggcaccccctgtgaccctcacggtaccccccgtgactcccacggtcgtgccccccacgtgggtgggtgaccgtggcgcgcgcggcctgggagcgcctccaggatcgcagggcccgggaggcacgtgaggtgcgagccccagcctgggccggcttccccctgtgtggcgcgcggtcttgatccccagctggcaccatggcactcccgactttgagggccccaacaatccatccacataaaaggttccaaagaggcgacaggggctaggacagctgtcgttagttcagtgccaaggcgccaagcttgctaagtgcgggcagaagccatttaaggatttaaacccctctgggttcaaaaataaaataaaataaagcaggagatgggggaggcttacagacttaagatgcccagcacatgaattaacagtggcatccgcagggaaaattgaaaacagagagccgctctccgttatgtatgtttaatgttctgtttgaatcttttaacatgtacatgtatttctttttcaattaaaaaatcctggccaggagaaatggctcacacctgtaatcccaacactttgggagactgaggcgggtggatcacttgaggttaggagttcaagaccagcctggccaacatggtgaaaccccgtctctactaaaaatacaaaattagccagatgtggtggcgcgcgcctgtaatcccagctactcagcaggctgaggcaggagaatcgcttgaacctggaagacagaggtttcagtgagccgagatcatgcgattgcactccagcctgggcaacaactgcaaaactctatctcaaacaacaacaacaacaaacactaaaaagggctgggtgtggtggctcacacctgtaatctcagcacttcgggaagccaaggcgggtggatcacctgaggtcaggagttcaagatcatcctgggcaacatggtgaaactccagtctccactaaaaatacaaaaattagttgagcgtggtggtacatgcctgtaatcccagctactaggcagtctgaggcaggagaatctcttgaacccgggaggcgggggctgcagtaaaccaagatcacaccactgcactccagcctgggtgacagagagagcccatctcaaaaaaaaaaaaaaaaaaaatcctaaaatggaaaagtaaagaggacaggagtggttttctcagcacatacagcagcaagggagaaatggtctgagccagcatttttcctttcagccagcaggcacttacccgctctgggctatgtgaccagggctgttttattatcacatgtgttataaaataagatactatccctcatccctgctcagggctagtggaaaaccaattgagtttttattgaattattttctacagagtcagaatg

SEQ ID NO: 587992 - DNA, 4001 bp, Homo sapiens
ctccacacaattaaaaaaacgaacaaacacacacaacaaaacctagccagatctttaggacggcaatgttcctgggcctccaacatcatccacccggtgctttgtttcaggttaacaaataaagatgtcataggtagctatgactaccttagaaacacgggacagtcaccagtttaaactggggccgtgagggatggaagggaagtcactcccccatacctttcaactgggccttgcttccagcgttttaattcctctctctatagaaacatttgaagacagacaacgcatcctaacacgggaaaactttcggttaacagacattcacgttgggaaggtctgcaggggtggaggggattggggtgggctgacagggagaagaccacaggccagtagcctgacttcctctccccagggttccctgggataagttggagttgacagcgcgcttatcccagagagcaccgcctgatgccgcccagctagatcgcaggcactttgaatccaggagacaggagggaaagggctaggggagaagtccgggaactcagggcggggaaagcgccgggggcgtgggctgtgctgggccccaggccccagccgcgcgtcccagaccccgcgggctccagtgggcttagccaggcccaggggcggggggctccagcgccgcggacggcccgggaggggaagccaggcggagacagctcggaggcacagaggggaaggggacccccgccgcgagctcgggagagcagagccggcccgggcagcaggtgtgggccgggtcccggacaggtgtccgccgagtcttcagcgggtgtgggacacggccttggacagatgtaagcagagcgccaacaggagcaagggcgcctcgagcaggtgcacgctgaaccccggcccggcagcggacccggacaggtgtggcgggctccgcccggacaggtgagggccgggcgagcccctccgcgggacgcgccgactccacggccagccgcgcagccctccccgcagccggtccgaattgcctgaccgggagcccccccgctttgcacttacacagccggtggccccgggcccggagcgggagcccacgacctggcgggcagcggggccgagcagcctctgcggccacttcccaggctctgggctggcgcttcctactggcggccgagccggcgctgctcctgcgcgtgcgcggaggccaggcctgggcccccgatccgtcccgggttttgcaagagacgcgagggaagcaagggggtaggagcgagggagaaaagaggaaggaggagcgagggagagaagaggggacagggagggaggggacatggggagggaggaggaggagggaggagggagagaaaaaggtggggtgaaagaaggagggaggaggagcgagggagagaagcggggacggggagggaggaggaggagagtaggaggaggaggggtgaaagaaggagggaggggcagcgagagagagaagcgggggacagggagagggtggaggagggaggagggagggaaaaaggaggggtgaaaggagggaggaagaggaggagggaaggagggagatggagggagatggagcgaggagggagggagggaccggagcaagagaacagagactaggaggaaagcttctgcacctggggcggcgcagctggaaggaggcccagttctgtccccgccgcttaccagtccttcagggcgcgcagctcaaatttcacttcctctgtgaagctcaggggtggaggccccgcggaagcccactgtggatccctgcggcaccccctgtgaccctcacggtaccccccgtgactcccacggtcgtgccccccacgtgggtgggtgaccgtggcgcgcgcggcctgggagcgcctccaggatcgcagggcccgggaggcacgtgaggtgcgagccccagcctgggccggcttccccctgtgtggcgcgcggtcttgatccccagctggcaccatggcactcccgactttgagggccccaacaatccatccacataaaaggttccaaagaggcgacaggggctaggacagctgtcgttagttcagtgccaaggcgccaagcttgctaagtgcgggcagaagccatttaaggatttaaacccctctgggttcaaaaataaaataaaataaagcaggagatgggggaggcttacagacttaagatgcccagcacatgaattaacagtggcatccgcagggaaaattgaaaacagagagccgctctccgttatgtatgtttaatgttctgtttgaatcttttaacatgtacatgtatttctttttcaattaaaaaatcctggccaggagaaatggctcacacctgtaatcccaacactttgggagactgaggcgggtggatcacttgaggttaggagttcaagaccagcctggccaacatggtgaaaccccgtctctactaaaaatacaaaattagccagatgtggtggcgcgcgcctgtaatcccagctactcagcaggctgaggcaggagaatcgcttgaacctggaagacagaggtttcagtgagccgagatcatgcgattgcactccagcctgggcaacaactgcaaaactctatctcaaacaacaacaacaacaaacactaaaaagggctgggtgtggtggctcacacctgtaatctcagcacttcgggaagccaaggcgggtggatcacctgaggtcaggagttcaagatcatcctgggcaacatggtgaaactccagtctccactaaaaatacaaaaattagttgagcgtggtggtacatgcctgtaatcccagctactaggcagtctgaggcaggagaatctcttgaacccgggaggcgggggctgcagtaaaccaagatcacaccactgcactccagcctgggtgacagagagagcccatctcaaaaaaaaaaaaaaaaaaaatcctaaaatggaaaagtaaagaggacaggagtggttttctcagcacatacagcagcaagggagaaatggtctgagccagcatttttcctttcagccagcaggcacttacccgctctgggctatgtgaccagggctgttttattatcacatgtgttataaaataagatactatccctcatccctgctcagggctagtggaaaaccaattgagtttttattgaattattttctacagagtcagaatgagttataaataaaacatatcttcagggcaaaacaaatagagctgatttccagcctgccagacagccaggaagttttcaacagaggtgcccaggggctgaggaagagtgtctccctgacaacgcacaagctgcccaacgtggctacctcatggtgttacgaccgcatggaggccgtgcagtggctcacagctgtaatcccagcactttgggaggccgaagcagacggattgcttgagcccaggagtttaagaccagcctgggcaacacagggaaactctgtctcttggaaaaaataccaaaattagctgggcaggatggcacaaacctgtagccacagctactcaggagactgaggcaagaggatcgcttgagtccagccaggtcgaggctgcagtaaaccatgatcactctagcctgggagagacagcaagaccctgtctcaaaaaaaaagtggttttttttattttttttaaatgaataaataaacaaaagagcgtatgggcttaacagagaatacagaaaagatacatttaaaaggccactgctaatggaggtctgagtgcagaaactaggctccaagcttacctcataagatccaagcaagggagctatttttagtgctgaagtccagaaaggataccctacttggctggggtcacacaaatggctggtgctatttagggattcaaatccagggctgtcagaccccacagactctactttttgcataggtcttttcttattctgtctgtaagtggataaggcaagcaacttggaaagcaagattgaaagctggcaaaaggaaacattgcttatt

SEQ ID NO: 587993 - DNA, 4001 bp, Homo sapiens
ctggagtttatgaagtaacagtgtgaatgattatatgtatacttttttacaaagtacactcagtttctagctatgtacacagaactatattcctttcaagaaatatgagaaaattcaacccatttaaaagtatcagcatgttgatttcaagtttagatttcttttttcagctatgagaataaatatttatcatctgttcattatgtttaacaaagaaggaaaagaaacttcaagctaagtttgtcagtaacctagaacaattgtatatagataaatgtgtaaatgatataaaagtattttattcctatatcatttcataaacactgcaacaaagttttgcacttggttcactagtaaaaccactattcaactaattatatgcacattcaggtgatctaaaagtataacagaatttttaggtatgcttagcaggaaaaaaccgatttttaaaaaaatttcaatcattctttatgaaaaattgagcttgatgttgtcttttttattggaacatttcctgagcaaagtgcattttcagcttctgcatgctgggacactgtgtagggagctggaggagagggtgatagaatctttccccactaagactaccaaaaataagtccaggaacctttctcaggtatatgtctccattgtgagtaaccatagaatggcaaagaaagtttcatttatttttaaactaacctgttttcaaactgtcttgtcaaatatttgttgtgcaatagaatttttaaagataattctttatcatgcaatagaattatttcctacagaagccagaaattctccaaatattctgataacatttccagagaggcataaacatattaaaggtgaatttctagagtttctgtttatatttctttgtatcttaatagcacctgaactgatgcctgctgatgtgctatcaaattttccctatctatttttagatcttcagttgctttagagatggatttaatatgttaggcagaagcttacactgtgaaacatttgcatgattgtattttggtttcgccatcagctaaacagggaaaagttgtttcccatctccaaggaactctatcccacatttcctctattgacttggagtttcagttttgcttacctgcttccttgaagatactgtgctgttgaaacatctattagaggtatttacattcagatttgtgttctgatgggttgaatcatttttccatgtcttagagttttctttaggatctgaaggaatgggatttaagaaaaggattctagctatgaatccatagaggacggtagccaggatcattggcacaacataaaagacaccaaagtccattaggtaaataggtgagtagtaattcctggagatcttgtagccacaggatatcacaatagcatctttgtaggtgctaatattgagatccagcaagaagaaccagagcatacagtaaagagatgtgaaagcccagacaaagatgataatctttttggctctggaaaatgtgcagagaaactgggctttgatggggtgacagattgctatgtacctctcaatggtaaaggctgttattgaacaagaggatgcattaattcccaaatactggaggtaagtaatgcagaggcatccaacatagccatagacccaggaaccgtagatactgtctgttatgttggggaggcctgcggccaccaagaccatgagatcagctactgccaggctcaccaggtagcagtttgtgggggtcctcatgtgcttggttctcatgacaaccaggactaccatgatgttgcctacaatgcccaggccacaaataatgagtacaagtaagatggtgaccacctggtattctaaggccaccactgctcgtggctgaagctgtgtttggttcagttcactgactgtctcgttttccatctttagaagcttaaagtttctcggaaacactgacttctcaaaacatcttctttccagcgcccacctttattgcagcagttccatccccctgtgaagggtcatagtacatattcattaacagtgttacaatttctgatcaagtcccaatcacaaataaccgtcacttccactcctttcacttcccatttttctatgggaatagggctcatgtgtacttcttaaaacttcttttattgcatctctagtgtagaatggagtaactgttttgaccagctcacattaagagggaccagttccctcttaatggagaaaaatgcttaaggaaagagaaacagtaaaaactaattgttttgaaacagtgcccagttgaaaaaaactaaatatctgctaactgaaaaataaatatgaatacacctcttagatgcctggcaaaagtataataaagaagaaaaagataccagaggaaaaagccaagaagctcaataatcaagcttgttacaaatttagctgttgcctcttttgctctcagagggtgagatgtctttggtataaaatagcaagcctttgagatgacatttccccatgccccctgccccacagattcaagagaggacaatttcttctcttaccttatcctctgtagcgctgcctgattttctgggtagatgaagtggtaatagttccaagtttctaatcttgcagaaaatcttgtctactctatttgagagggagaccacttagcagtgctcagtctttaaaactgcagtttctccaaaccctcacagccctttccaactaatgacaaaccatacagccgcggcagaagcagaagcagcagcaggagcagcagcagtgaggctgtcaaatcatagatcgtcccctaatgagaacatacacgctcgctcgctctctcacacacagagacacacacacacacacacacatacattcacacacactcacagatgccagtcagtcctcactgattcagagtcttctgctcttggaggatttactattaaatgtgctgatgagacagtctttaatttggaaagctgaaatcataagccaggggtctagaagcagctggctttgtcgttgcttatcatctaagttctgcagaaactctagtacctgagctgctctgaaatacatttacactccttgcttgataggactttggggttagcaaatccttctcagtctagacatggcccttgaagcttgaaatatctgtctgagctgaaatcaacctctttctctactatgaaaacccttgtactgtttctcaagtgaatcagtacaattggcttcctcctctcatattttgtgaatggaaaattagttaaagttgatttcaaaccatttcagctgcaatcttctgatgcttataacaattatttttaaaaggcctctttgagctaagaacatcaatttaaactgcgtagggtctgttaagtttttcaactcttatttctggaccactttatagaatctctctatcggccctgggtgcttttcaccttcacctgtcctctggatttccagtcacatgaaccacctagcaatgttttgtctcagtttatttctaggtggaaaaatcatctagtaaaaatctataccagtgccattctgttaccaaacctctgaaatgaaaattaatagacacatcttttgaagaaaagtacacttcagcattattatttctctaaagtagccagtgggcaaatctacagtttgtttttttttttttaactttgagacaggatctcactctgtcacccagactggagtgcagtggcatgatcacagctcactgcagcctcgacctcctgggctcaagtgatcctcctacctcagcctcttgtgtagcggagactacaggtgcacaccaccacgctcagctaagttttgtatttttttgtagagatggggtcttgttattttgcacaggctggtcttgaacttctgggctcaagtgacccacctacctcagccttccaaagtgctgggattacaggtgtgaggcactatgccttgtcttaaatctatttttttaatggaagctcagaaaacatgtatcttttct

SEQ ID NO: 587994 - DNA, 4001 bp, Homo sapiens
tctatatttagcaatccatcctaaccaacttccatttactattcaatgtggctattttctgaagacggatccaaacaagctgtctaaaaagtcaccagagaatgtgatgttacagagaacctggactgggatgggagaggaatgctgtgtgaaacaagagggtggaattctgcatatatgacagtctcactagctctgtgaaaccttccaggtacaaaacagcacttggcataagcaaagatttgaacacttccttcagaaggcaatatcgtaaagggcagtttaatatttgtaccccagacaactgacctttctgacaacaatggggaatgaacctgatcctggggtaggagaggaagagcaccctgtcaacacttgccatcccatagaagcgccacggtgtccccaggccccgtccaagagaatgcagaataaaccaaccttggctgtgactcctcaggaacagaagctctaaatactaaatctgggacatatgagcccttgactttgttttgcaccaacacacagcacctaactacatgacctgcacctccgctttggttccaaaaggccacaggagaagctgtggcggccgctcacctctcctccgtggagaagacgaacttcctaagcttcaggtcccccagcacgatggctgactggtggcagtgggcgacggcggagacaatctgcttgaagagccgggcggcttcctcttcccgcagcctcttccggcttcgcacataggagtgcatgtccccaaagtccttctcaaagaagacataggccttggtttccccaaggatcacttccacaatgccagtaatgttgctgtgcgatggcagctggatgtaaggcctgattttgtcctggtagtgtttaatgggaaacacctgtagagagaaggggggcccgtttagggggctagaaaagcaaaggcagcctcccaaacccctgagggagctgaacagaagttctcaacctgtgggcttaggatgtgagtaagttccattcacctactcctttcctctgccaccttaccttacgcagccccagctgcccctgacacctttaaaaccagtaacacctaaagctctagacttgcaaatacccaaagggttacccgctttcacacagatgatttgaaagaactgtctcctgtacatgttcccatcttctgtcagctcctgagagctaagcaaaccccccaccctctgtggccctttcctgtttgcaggccacactagttgagtggctgatagaaggaagcccctggcctgtccaggagctgaaaagcagtccctggacgtgcatgtgcctcctgcagacccaaagtgctcaacacagaaagggcacagaatgtggtgactctgcagcctccaaggggaagcaggggccagagaacatgcagagctgtcattaatcagaaggaacagatgacttggagggggaggctgggacaatgcagccttaagcaacctgcctacagtccgactcaagtgtaagcagccttgagttacaattctcacaggaagggtatggaatcctgcgaatgggttttccacttgtttgtttatccccccacacccgaccccacccctagaaatgagtagcatctcctctcttctaggaagctggctggtctctttaaaggccttttgttcagtccagttactcatatcctagactcaactggaaacggtgacacacgggctgtcaccatctggattcagctattatctgctcagaggaactggaaggggttgcacaatggccagactcaccccacctctaagaggcctggctgctctggcaccagctagaaaaatcccctgctgccccctcctcccaccccatcccatcccatcccaccacacacacatacatgcttgtcccagaacagctcttagccccagtcatggagaagaaaaggtttttttttcctccctattaaactgggcttgatcatgcgtctgaaatttcattcgggttgggcagtaggtggcagcagcgagccccgggacggggtcggggtgttgggagtgtcaggtgagttgcggaaaacccagaagcgacttaactggggggtgatcctatctttcgggtgaaaaggagcggcccgagggtgctctggggtgcctcaagcaggggtgccacgctcgcataaagtagactgtgggaacgttctgcgtctacccgcgcaggaggaggacccggcggatcctgtttctaggagctgtgtctcctcctcctggatgggatccctatgttcaaaggaaaatcgctggctggaaaataaagtgaatcgaagcgagggttcctggccggtgtgggcttttcaacatttctactccgagcagattcctccgcctcgggtggatgactctgggactgctcccttgggagggcgtgttctagtctcagcgcggattcaattcggaatccccaaggcaggagccggacacagtcttccagcccccttaccacctacaactgagcccgggtgccgtgcaagcccggcaagagagctgccagctgctccaagctcctaggaggcacccactaaagggcgtccttccaggacattggcgggggagggggggtggagagcgaggagaatgagagaaggggaatggcatggccctggaatccatttcaattccacaacttatatggaacgccacgcgctacactgggcgctgaggaaaggaacagatagagaaagccactgaacactgcacttcctctaggcgcccccattatatcactccatgggaaacccctcgatccacaaaaacgtgaacctggtcaaatggcgtcttatctgacccaatctactgatccgccctgtgcccagcccaagcgttggccggaccccaagcacctttgcctaccaccccgtcccgcgcccccgaccccagccgggtcctggcccgggagcgcctaccttgcagcgcagctcgcgtccagtgtggatgcacagcgcccgggacacatgctcgcgctcggctaggggcagcagcaggtagtcggcgatgcggctgggccccggcgcgctcccggagcctccgccggcccccggagcggcaggcgggggctgcgggctgcagggcgagccgggggggctgaggtagtccggggggctggagcactcggagaggcgcgggcacttggccgccacagccgccgcgtcgtcggcgtccagcaggcgtttggccgggacgcctcgggtggctgggaagagcagggccgggccgcggggctgcgaggcgccgctcatggcagagcgcaccggaccgacccgcatcccgtcctgggccggggtggccccggctttttaagtcccgggatccgcgcgggaagacgctgcgggtttggtgccggctccgcgacttcttccagccggcgggatggagtttgcagactggtcttggctcggcccccacgaggggcaaagcaggagccactccccggcgctcgcgttgcacgcggggaccacgctggctgtgcgtccgggaggcggaggccggctcgagtccccggacccccgcaggcaagggctcccggagcctcgctgggggcggccgccactattgttgccgaggctgccgatagtccgggaggcagaggcggcggcggcagcggtcagcgatcccggggtcccgagccgcgaggacaggattcagcaggctcggcggagccacgaagcaaatgcacttcccaaagcgatgagtctccagcaaaagccgggggaactttttcgcggcgctcgggatcctgagcgctcctgggctccgggcgtgtatgagagcgagcgagacgcgctcagagagagtgactgtgagtgagtgtgagcgctgcaccgatcccggccagtgcactcctccttctccttttcctccacctcctccgcctcctggtgactcacgctgtatacacacacactcacaggccgggctgtgtaaacagttgggaagccgggttgtgcaatgaggtggctg

SEQ ID NO: 587995 - DNA, 4001 bp, Homo sapiens
cttgtcccagaacagctcttagccccagtcatggagaagaaaaggtttttttttcctccctattaaactgggcttgatcatgcgtctgaaatttcattcgggttgggcagtaggtggcagcagcgagccccgggacggggtcggggtgttgggagtgtcaggtgagttgcggaaaacccagaagcgacttaactggggggtgatcctatctttcgggtgaaaaggagcggcccgagggtgctctggggtgcctcaagcaggggtgccacgctcgcataaagtagactgtgggaacgttctgcgtctacccgcgcaggaggaggacccggcggatcctgtttctaggagctgtgtctcctcctcctggatgggatccctatgttcaaaggaaaatcgctggctggaaaataaagtgaatcgaagcgagggttcctggccggtgtgggcttttcaacatttctactccgagcagattcctccgcctcgggtggatgactctgggactgctcccttgggagggcgtgttctagtctcagcgcggattcaattcggaatccccaaggcaggagccggacacagtcttccagcccccttaccacctacaactgagcccgggtgccgtgcaagcccggcaagagagctgccagctgctccaagctcctaggaggcacccactaaagggcgtccttccaggacattggcgggggagggggggtggagagcgaggagaatgagagaaggggaatggcatggccctggaatccatttcaattccacaacttatatggaacgccacgcgctacactgggcgctgaggaaaggaacagatagagaaagccactgaacactgcacttcctctaggcgcccccattatatcactccatgggaaacccctcgatccacaaaaacgtgaacctggtcaaatggcgtcttatctgacccaatctactgatccgccctgtgcccagcccaagcgttggccggaccccaagcacctttgcctaccaccccgtcccgcgcccccgaccccagccgggtcctggcccgggagcgcctaccttgcagcgcagctcgcgtccagtgtggatgcacagcgcccgggacacatgctcgcgctcggctaggggcagcagcaggtagtcggcgatgcggctgggccccggcgcgctcccggagcctccgccggcccccggagcggcaggcgggggctgcgggctgcagggcgagccgggggggctgaggtagtccggggggctggagcactcggagaggcgcgggcacttggccgccacagccgccgcgtcgtcggcgtccagcaggcgtttggccgggacgcctcgggtggctgggaagagcagggccgggccgcggggctgcgaggcgccgctcatggcagagcgcaccggaccgacccgcatcccgtcctgggccggggtggccccggctttttaagtcccgggatccgcgcgggaagacgctgcgggtttggtgccggctccgcgacttcttccagccggcgggatggagtttgcagactggtcttggctcggcccccacgaggggcaaagcaggagccactccccggcgctcgcgttgcacgcggggaccacgctggctgtgcgtccgggaggcggaggccggctcgagtccccggacccccgcaggcaagggctcccggagcctcgctgggggcggccgccactattgttgccgaggctgccgatagtccgggaggcagaggcggcggcggcagcggtcagcgatcccggggtcccgagccgcgaggacaggattcagcaggctcggcggagccacgaagcaaatgcacttcccaaagcgatgagtctccagcaaaagccgggggaactttttcgcggcgctcgggatcctgagcgctcctgggctccgggcgtgtatgagagcgagcgagacgcgctcagagagagtgactgtgagtgagtgtgagcgctgcaccgatcccggccagtgcactcctccttctccttttcctccacctcctccgcctcctggtgactcacgctgtatacacacacactcacaggccgggctgtgtaaacagttgggaagccgggttgtgcaatgaggtggctgcgacgactccggccccgccgcccagcgagcagtctccggagcggagggaggagactgggggaaggggagagggagtaggaggtggggggaatgggggtggacttagggctggggatgctccgggcagcgcgcgctcgggcgcaggtggtgcgtcccgggccggcctggacgcgcgcacacgcccccagggctgggaggggctgggcaggaggcggcgcgcgcgccctcccgcaggcccccagctcagcggagaagccgaaggagggggcggaggaaaagttcccgtgacgtaagggcccggggaagtgggcgggagggacggggctgcggggagcgaagcgaccgctgattggtgcgcgcgcctcattcacagtaagcacaatgggctgcgggcgcgaggcgggagcgcgcaccacggttctctgcacccgccgctcgctgcagccccgcggcgacgcctttcgccccggggatccccccaccgcccagcgcctggggagctccggttggagccgtgggcgccgccgaggcccggctgcagccggaggaaggagggggatagggaggtgatgaattccagaatcagtcattcacccccacgcggtagttccggggaagacctgtgcgtggtagtggatgtggcttttttttttcccttttcctgccccctcccagctctaatccccagcgtctgttcgcttccacaaatagaaccttctgttggaggaaataaaagcaaacactgggccttctgcgctgcctccacctccacgcccccccaacccccccgcgcctgccgcccgcccggattgcacggaaatagcttctccaggctcccgggccgccccttcgcggtgactcgcagaaagagcttcctgagccagggccggtgggaaacaaaggatgtggggagcgggcggaaggggcccacgtggctgccgccggattcctactccctccccagcctccacacgcgccgcagggtctagggcctgagtgccaacctgggtaggtgggtaggctggtggaagtcattctggccactgccagagataccgcctgcacccgggcagccctgcctggtggtgcgcatgcattcattccgtgtgatttggaagagcatcaaagttgcgcgtgaaacaacttggaatctgtcatttttctttcttgagtgaaccaggtcagtttggagtccctgggcacccaacaatataactattattagagagcccttacttgtccttctgctaaatacttaattttctaaaaccaggtcgagccccaggaataaatcattttccttattaattctccattcattcaacaaatactaattaagcatctaccaagagctaaacgctgggaattagaaggtgaaaattaaaataataataatagctaacatgaatcgaggcctacaatgtgtcggacactgttcttagcactttatatgtattacttcagttttccaaccacactatggggttattttttgccccatttcacagggaagaaactgaagccttagaaggatgaagttaggccaagcgtggtggctcacgcctgtaatcccagcactttgggaggctgaggtgggcagatcacctgaggtcaggagttcaagaccaatctggccaacatggtgaaaccccgtctctactacaagtacaaaaattagctgggtgtggtggcgcgcgcctgtaatcccagctgctggggaggctgaggtgggagaatcacttgaacctgggagacagaggttgcagtgagccgagatcgtgccactgcactccagccttggggagaaagcaagacttagtctcaaaaaataaaaaataataataataataatttaaaaaaagaacgaaagatgaagttacttgctgcg

SEQ ID NO: 587996 - DNA, 4001 bp, Homo sapiens
atctgtcacttctgccagtggaaacaggaaaagcattgacatggacccatgttaaacaaaaaagatgacaggagtaacagggttactcattgagacatgcgtactgacagcatccttacattccccttcaattaaactttgtcaaatgcatttggagcggaacagacttccgtatttaaaaaggtattgcaaaaaaagaaggcagggccacagagggggccagaaaccaggcacaggggactcgggcagctcctcctctccagtccatgcagcttcgggccagctacccagtgttctcccaattggggctctgactcatgcattagcaggtgatgaaataaattcaatgtttcacattctgggtaatttttaaaagtaacagaggccaggcggagtggctcacgcctgtaatcccagtagtttgggaggcagaggagggcagatcacttgaggccaggagttccagaccagcctggccaacatggtgaaaccctgcctctactagaaattaaaaaaaaaaaaaaattagccaggcgtgttggtacatgcctgtaatctcagctactcgggaggctgaggcaccagaatcgcttgaacccaggaggcggaggttgcagtgagctaagagcacgccactgcactctaacctgggcgatagaggtctcaaaaaaaaaaaaaaacaaagggaagtaacagaaaatatcagagtgccatggacatgttcagaaaacttttgtttcaactgatacatatgttctgggtcacaagggaaaatgcattgcttcctatgggctaagattaaacgttttggaaaatgctgagttaggctaacccttatcttctattcatttttccttcctatatcaaagaattctccatgttagttttgccctgtaagttgctcctgggtttatgtatagtcactagaactctagatatggagatgctgctttataaaccagaataggccagccagccagggtcagagacctctcactcagataatacaaaccgcgggatcagcttggcaagtaggtgactggtttgggggaaatcttaagactccacacccctggccaggtctgtggctcctcctccacttctaaattgagtgtgccaagctacagggctcgtgggctgcacccacatccgtgccgcttaaagggacctgggccacacccggctggcacaaggggtgcatggcctgggcccttcagaagcaagtgtcgctgtcttgggaacatcatgtaacctcatctgtcactttccgttcgcattctcttctcccagcacgggcccctgggccgaccttgaagaagcagccagccctgagaacctgggtcggagaggtggggtcctgcatgctgggagcgagacgcgggcacactgggctctggcaggcaggaggggcgggagccgcagagccaagggattccgggttccagacccggctcggccgcctcgtgcaaatcgctgctcttacccgaaagtcgtgggcagtgtccttcaccggctgcacgcggtgcccctggtgtcgggggtcggcctggcaggagcagcacagcagctccttgtcctcgaggcagaagaggctgagctgtccgcggtgcaggcggcagacacgcgagaagcggtagctggtccagcgcgcgccctcggcctcctcgcgcagcagcttctccaccaggttgttgagggtgtggttggtgcgcaggtcggcgggtgacgcgcggtctttgcacactgggcaggtgggcgacacctgcacctcccagcagcggctcacgcacccgcggcagaagttgtggccgcagcgcagagtgactgcgtcgcggaaggggtcgtagcagacggcgcagagcaactcctccttgaaggagcgggaaggcccgggggacacgtcgggactccgctccatggcacgagcagccggctcgggcgcccggaacttttgctccggcccctcccacccgcccggctgccaacgcccgcgacccgagtgctgggaatcgcccagtcccttcccctggaacgctgagagacagcggcgctggccaatcgtgcgggggggatggcgagggggagggagggggcgctcggaggagccccacccacttccggtgtgcgcgggaaatcttgggagagcggggtgggccttctgcccgcagttcccgcctcctcaggtccgggcgggtccctggccggggtagcacggaagggtctcccaggcggcgtagtagggcttccgtgttactggaaacctacttccggctgcaaatgggaaaaggagcctctaccttaaccaatccccgggaacctcaggcccgcggatgggagaaaccagagatgccaacttcctgcttccgaagtagtggctgggtcttaaagcaccgtgagtgcaatcaccacttaagtttgcagcgcctttttgaggacctatgccactcttgcattagtcgtttacttattttggccagtcttcttctggcccgccgcggtaaggagaaacaagagaggggtggcggcagaagagctccgagaaaacctgattcttgtcctgtggttgaaaaagtgaacaggtcatcatgtttcaaagtccatttactcatgagtacaatggctgtaatagctctgtttccatgaagtgtgaggataaagtgaaataaatgtggaaagtgctcatgacaaccactgttttaatgggcaagtgcccattaaaacagtgaaattgaggacttctgcaaagtttagctgagataactagagttcatgctcaattcttgccaggtacagtaggcctggatggttccttcagatcttcattcctgcttcagtttgatcactttacagcctccagatgcagaatacttttcacacgatgcactttcattccttttctattgggagacaattcacatgtgtcatgttcctgcatgtcttgagagagcagaggcactgactgcctttttccaactatcttttcaaggatgtttctgcattgaatagccctggaagacagaattcttgtctctccaaagatctggcagacttattcccaattataagagatgtgagtttcctaaacttggggcccctctcctgtaatgcaacctactgtagccttcatcacatagtcttgcaagaattagggctcagaaactggcccaatgacaatactgtgactactattattgctgttagtattatcctttgtctctgacccaggagtttcatcttttagcagtattcatgaaattttggcatgcaaacttgttagtgttgaaactcagaaaacaataccccaaaatggcctcaaaagcagaaatttttctctgccctcctatctctcagtcccccaaggatagccatagaaattagaattccttttccccaaggcaggtcatagaaaccagaacccctttttcctaaagccagtcttgaaaccttaaaatattactctttctctctgcctttctgtggaataactggccataaagaaattatctgacctaccttgtttgactgtaggccataagagcccgattccagagagggtcctaccccatacctgttaggggtagaaggtgtctgagttaacagcagtgaatctgtatgggtctgcagcaacctcaattcttgcctccttggaagaaagaattagactgaggggcatgatatggtttggctgtgtccccaccccaaatctcatcttgaattgtaatccccataattcccacgtgtcaagggagagaccaggtggaggtaattgaatcacaggggtggttttccccccatgctgttctcctgatagtgagtgagttctcacgagatctgatggttttataagtgtttggtaattcctcctgtgttcattctccttcctgcagccttgcaaaggaggtgtcttgcttcaccttcaccttccactgtgattgtaagttttctgaggcctcgccagccatgcggaactgtgagtcaattaaacctctttcctttataaa

SEQ ID NO: 587997 - DNA, 4001 bp, Homo sapiens
taagtccctaaaggccagggttttgccttgctttgtgacttcccttagagtaaatacagtgacaacctatgttagaggattttgtttttattatcatccaaacaattttaaggcaagactgtctgaactaggaactgggctacttcggaagatgccatttctattaattttctattaagtatttactagatttttttttctttgctttgtagggatctggagctacaaagtgcctgtgaagtgcaaaatgtgtaaaatggatgtaataccaggctttaaggtggagggggacagcagtatgtctctttcagcatcaccatctggaatggattggtgttaatgagtcacttcattcttaaattgatacaaaagcatgggcaccaactcccctctctcctgctgtgagcaactctcagtctcactgggaaggactgacttggaaaaccatttttccataaaacagtctgtgattgataaacaagcattcagcgtagcaacccattaaaacaaacaaacaaaaacaagtttcagatgggcttgacacatggaagagtggaagagtgttacctggtggactcctgcttgtagatgtcaatgatattttccaccagcaggttcctctgaagtccatataccccatgtctatccaaaaccacttcatgtctacaggatgggcagcggaatcggccccctgatgccatggtggtacctcctcttgtgggcaaatacgggttagaggcctgttcttgccaagtaagaaaaaaggaattgggtaatgccacaagcagcttctctgagacttattttcactctctgctactacaaacaacatgaacttctactttaagcttgccataagatcatccctcagggctttctcagcaagtggtcctgaaacacagggtcagaccttatccacagtcatctgcgaatataccattgtccacgtaaggtgcttttccgtccaccactttcagaaccaaaagttccagccagaaactccacactcatgtcttcagcagttactcatttatagttttgaaacacattaaatggtttgacttaaaaaaaaatatgattcttagtattaaaataaaactagatttgggagtaaagaggacacaaaccaaatcattaaaagaaacgtgtttttcttgaaagtaaatgcaactttataaagtttttttgtttgtttgtttttctttttttgagacagagtcttgctctgttgcccaggccggagggcaatggcacgatctccgctcgctgcaatgtccgcctcctgggttcaagcaattctcctgcctcagcctcccaagtacctgagattataggtgcccgccaccatgcccagctaatttttttttttttgtatttttagtggagatggggttttgccatgttggccagcctggtctcgaaggcctgacctcaggtgatccactggcctcagcctcccaaagtgctgggactacaggcgtgagccaaagcgcccggcaaccttataaagttttttaaaggatttcacctcaatgttaagcacttgattccaagaggagggaatcttttccaccccctcccctcaaccaaattccaaacaaacctacctggaaaatatcactggcacatttcctacacaggttgtgctgacaagggagaatcaccacaggtttcgtgaacatctctaagcagatgggacagatgagttgcttctctaagttatccatggtctgctgctctttggaaaaagatttgtaattcagagatgcgctcatctcctcgctgtccccaagtgtgctgccagggaagggtgctgcgagtggctccagcaagtgtttcctggatattattccagggattgtgtgatcaagtgtcctttacgtttctctcggtggaggacattgtttcaggccctggtttggagtgggtgctggagctgtttttagcagcctgcggtcacgtgacggtgggctgacgtgtccatataagccagtgacaggaggatggatcctgacaggtgacggagagcaggagtcaacattcttgccccagggagtgaagagagtgggtgggaaggaggattacaaaccccatttagacggggttgtgaggagaaggaggtcgaagctgacagttgtcaacaacaaatgcaaatgtgcatgcctagccactgaaccatgccctctgtgagcactcactgagaacttggcgatggcttctccaggaaggggcagaacgcagcacagagtctgtgtaactaatgccagccctgtcttgagagtgtaggaattgagtcacggaaagtagcctaatagcaccttcttaggtgaaaatgaacaaaacatgtctcgaaaattgttatcctggcttcacaaaggcaatcatcaaaaagactttcttaatgttaagtatttcatctttgtcagctggggttgtggtctttgaaaaattccaatttaaaagctaaattcaaatcccttcaccataaaggtatccacctaataaataaataaatacatgcataaataaaaattcaaaaccagtggatgatctaattatttgagaaaaaagttacattataaaacaactctagtatgctgtttgctcttccacattgctttcctcttccttggccctctttcatcctatactgccccacctcctacatacacccaaaaacacaaagaaaatttgatagtcttttactgattatttaaattcttaaattatataatagtttgcaacaataatctgtaatgaggtagtaactggcaggcacctggaggtggcagatctattattttattttgtcatcccttgggggacagttaccagtgccattgacaactgaagtataaatggagtcctacttccatatctgcatttcatctgcctccaaaatacctattctcccttgcatttccccttcctccaaggtgacttgttaaaccatagtttctctggtcatttctgatattcttggtctgctcttgagtcataaacatcgattctgacattcatcaggattttgtgaagcaacagtttaaccaatacatattgtatttaaaaatgtttaaatcagatcaaaaataaaaaagaaatccaagtctgtttatatgtgataaatttcggctttctttctccttcattttaaaaaccttgggcaataaacacattttgttaacatatccctggtgtgaattaaattaccagtgaagtgtaggtcagttatgtgtggtcttagtgctgtgtgcacggagagcttattgagaatctagtaagctctattaactaataataagttatatatattcataagcatatcagggatctttagagaattatcttagtcctttcaatatttatttagcaactacagggaggacgggaactggtaaagtttttttactgagttactttggttcacccagcctaggcagttaattgtgtttatcaattcatgggctatggaggggaggtctgagtacaatatgtgggatattttctaggaaagattaagtttctactgcaaaagaccttgctatctaagtaaaagcacttagactaatcatgcacattgcagcagagtcttttcttttagaaggaattcattccttcaaaatacattcattggatatgtgtagtgtgtctccattgtgtgaggctctgggtattgaaagatgaacaagacataggtcattggcctcaaggagctcagtataagagtggagatgagacatgcacacacagaacatagtacaaaataaaatgtgataaagagtacaagccaaaaagtacctgagacaggtctcaatcgagaaagtttgttttgtcaaggttaagggcgcgtgccaggaggcaggcctgcatctttctccaaagaagatttcgaaggctttaatatttaaagggaaaagaatggatattggggaaagagaaaaaaaatttcagttgtgggtagataagaggcaaacagttgcattcttctgagtctttgatca

SEQ ID NO: 587998 - DNA, 4001 bp, Homo sapiens
ggccttgaacaaaggtatgttatggtaagaggcactgtggaagaaaggcaaaagccccactctgctcccagctatgtagccttgggtaaaagttacttagtctctctgtaggatgaggcaagtgggagagaataatttccttatccctaaagaagttgaacaaaaacagggtccatttaggcttaaaattgtgcatttttctgaggagcaagtcaatagctttccttggtttctcaaagtggtaaatgacaccaaaaaggttagtcatcctcgcattaaaaggtaatgtttcccaatcttttcaggtatatatatatatctatatatatatatatatctagtgatattaaagaggaaaaggtgtcattcaagacattacaggttctacctaaccagaaccaacacagaatcaataatgaatagatgagttaatttcttccccatttctaaataaccctaagattaaaaaaaaaaaaaatcacaagggaaatttgaaaatacttaaagctgaatggcaatacttatacgtgtttataaatttggatcatatacacaaaaagattaaaagtgtaatcaataatgctttacatttgtgtggatcattactttaatgatactttcacaaccaattattcctccttttttaggaaggaagggcatatcctagagtctccaatttacagataacgaaacaattattgcccaaggacaaacatttcttaaccatgccagtttcctgacttgtaggccaatgctcctcccaatgttaacaagcagcacaagcttccttcctgggggtttgcactgtaaacctgccagaggaaaataaaagatttttacctcttttgttttttctctctggaatgtttgttgtgctgaatcattaggagacagagtatatgagcaaacaaaggcagatttaaaatggttatctgaggttaccatctcacaccatacttgttgatcattaagtatgagccgagtgaagcaaaaacagctctacaggtttagcacacctctccacagtagagaatgaaagggagattatacattggggctcctctagcaataaattgcttcaacttcttcaggaggcttattaagctcaaacaagcagcagagaactccaagtagaagaaacctaatctccaatccccttttcctagtcatccacgcggacaccaacatctgatggattcaggaatacaccaagctccaagaaaaatacccccgccccacaacctcaccaccaccgataaagccacctaatcctgtctgaatctcttctctgcaaatgttttggtatgcaaatactcgttcattaataagaggaagcaggaaaaagagtgaagaggagtaccatgggaaagggggccccaaaagggaacggcagaacccagagagctgcactgacaagtaagcgaccgcgagtaatcggtcagcacaaaggagccaatcccgagccgcgtggaagaccttgggaggtgggcgggactaacgtgtccagggcccagcggctggcgccagacacgctggcagggcgggaaccgcgcgttccttagcaaccgcaatggccacgcccaccgaacccagcaccctccatcccccatcccgcagccagcgccctactcaacgggaacgggtccttcagtgatcaccgtacctactgggtttcccggactccgggtttctcttgcagagcctccctccgcccagccccaccaagtgccgctcccagggacggaacgatcgtctcccaaacgctttagggctcgctaaagaggtgcgcccgctttcattcccggaccccgagcttcccgggcagggtctccccaatcccctcgcactcgccggacacacacctcagctctgccaaggcaagggccgacaaacttcgtgtcctgtgggaaatgttgctgtccacggttctgtcactcaggggcaggggcgggacaagccagccgcacacccctactcccaaagggtgaggcggaaaagaggcgaggctctgcccccaggggcgggaccaggcctcagcctgctctcggattggtcggcctttctcccgtctgtacgccggtccaggacgcaaaggcgctggccctgaggcctttccctcattttgatgccactccggagttctaatacctgtctcacgaggtgactgtagaaattaaaaataaagactgtgacttgtttagttaatataaaacggaaaaatatgttattttgattattgaaccctcccatctcacacacacacactccccaattcacaggatcatccctaaggagcgtccctaagtggaagggcgcactgtctgtgtaaacaatcaattaattgcccattcaaacagcaaaaaagaaaaaaaaatcgttttatattaacattaaccagagattaataaatttaggaaagattgcaaaaacgtgactgacaattaggatttaggagcctatgttcgggtactcaattttcacatctacaaaatgggaatgaaatattaagatgttacttattggaaaagtattcaaatattaaatgctttataaattatactcatgtaatccttacaaaacccactaagagtattatccacagcctatggacaatgaaacacaggctaggaaaggctagatttattcaaccattcaacaaatctaagtgcctgcagccatcattttttaatattgtggtgaactaaatctaaaattccttcaaaaaattatgcaacctccaatttaatttttctcttgctcacataaaagtcaccttcctctaggccagccccatcatatctttttccaaaagcccttgagaaagaaagtagcatacaaaaaaaaaaaaaaaaaaaaaactgagacaagtataaatagactaaccagaaggctttctgaaatctcacagaatattatggccaggaattgaatccaaaatgtaattttattttccgtcctcctaaatcattttctggtctccagttcctctcccagaaataaaggtagagttaaatgagattatattaatacacttaaccagattacttatgtgtgtggctttaaaatagtgaaactctttttccttccatattaaaccaaaacccagaagggtttatcttgtctgatagatacggttgtagtaagaaaaaagaaaaaaaaaaagagtacctctggacaagtgccttgagattcaattaaaatgttcatcgtactgtgatgcaattgttggaataaaagaaacccattccaattacaaataattttacactcttgacctgctgaatatccaaattcttctgaaagcttgctaaatgtgaataactctctataaaactttcttgatttgtatgactcagagtccccattttctttaatcttttaaaaatatttggtttggccaggtgtggtggttcatgcctgtaatcccagcactttgggaagctgaggtggacggattgcctgaggtcaggagttccagaccagcctggccaacatggtgaaaccccgtctctactaaaaatacaaaaattaggcaggcatggtggcaggcacctgtaatcccagctactcaggagcctgaggcaggagaattgcttgagcccgggaggcagaggttgcagtgagccgagattgcatcattgcactccagcctgggcaactgagtgggactccatctcaaaaaaaaaaaaaaaaaaaaattagttttagactaaaaagaaagagttatgattatatattaataaatatataaataaatgctgtaagatttaaataaaagtggtgaatgtacttgagtccattttcattacataaagatgtacagcaatgcatttgtacagcaaatgcattgaatattctcacatatgtaagatattatacaacaagaagtaaatagcttaatgtaaaattaaaacttccagatgtatgttatatgcttatttctttaccatataaagacatatattattgacttacatttctagcaaattgaaatataattg

SEQ ID NO: 587999 - DNA, 4001 bp, Homo sapiens
atagcaacaaataactgaacattagtagttcccgtttgttagtgctcaaaaaaacaaaaaagtacaatgggaaagggggccccaaaagggaactgcagatgactgaaggccttgaacaaaggtatgttatggtaagaggcactgtggaagaaaggcaaaagccccactctgctcccagctatgtagccttgggtaaaagttacttagtctctctgtaggatgaggcaagtgggagagaataatttccttatccctaaagaagttgaacaaaaacagggtccatttaggcttaaaattgtgcatttttctgaggagcaagtcaatagctttccttggtttctcaaagtggtaaatgacaccaaaaaggttagtcatcctcgcattaaaaggtaatgtttcccaatcttttcaggtatatatatatatctatatatatatatatatctagtgatattaaagaggaaaaggtgtcattcaagacattacaggttctacctaaccagaaccaacacagaatcaataatgaatagatgagttaatttcttccccatttctaaataaccctaagattaaaaaaaaaaaaaatcacaagggaaatttgaaaatacttaaagctgaatggcaatacttatacgtgtttataaatttggatcatatacacaaaaagattaaaagtgtaatcaataatgctttacatttgtgtggatcattactttaatgatactttcacaaccaattattcctccttttttaggaaggaagggcatatcctagagtctccaatttacagataacgaaacaattattgcccaaggacaaacatttcttaaccatgccagtttcctgacttgtaggccaatgctcctcccaatgttaacaagcagcacaagcttccttcctgggggtttgcactgtaaacctgccagaggaaaataaaagatttttacctcttttgttttttctctctggaatgtttgttgtgctgaatcattaggagacagagtatatgagcaaacaaaggcagatttaaaatggttatctgaggttaccatctcacaccatacttgttgatcattaagtatgagccgagtgaagcaaaaacagctctacaggtttagcacacctctccacagtagagaatgaaagggagattatacattggggctcctctagcaataaattgcttcaacttcttcaggaggcttattaagctcaaacaagcagcagagaactccaagtagaagaaacctaatctccaatccccttttcctagtcatccacgcggacaccaacatctgatggattcaggaatacaccaagctccaagaaaaatacccccgccccacaacctcaccaccaccgataaagccacctaatcctgtctgaatctcttctctgcaaatgttttggtatgcaaatactcgttcattaataagaggaagcaggaaaaagagtgaagaggagtaccatgggaaagggggccccaaaagggaacggcagaacccagagagctgcactgacaagtaagcgaccgcgagtaatcggtcagcacaaaggagccaatcccgagccgcgtggaagaccttgggaggtgggcgggactaacgtgtccagggcccagcggctggcgccagacacgctggcagggcgggaaccgcgcgttccttagcaaccgcaatggccacgcccaccgaacccagcaccctccatcccccatcccgcagccagcgccctactcaacgggaacgggtccttcagtgatcaccgtacctactgggtttcccggactccgggtttctcttgcagagcctccctccgcccagccccaccaagtgccgctcccagggacggaacgatcgtctcccaaacgctttagggctcgctaaagaggtgcgcccgctttcattcccggaccccgagcttcccgggcagggtctccccaatcccctcgcactcgccggacacacacctcagctctgccaaggcaagggccgacaaacttcgtgtcctgtgggaaatgttgctgtccacggttctgtcactcaggggcaggggcgggacaagccagccgcacacccctactcccaaagggtgaggcggaaaagaggcgaggctctgcccccaggggcgggaccaggcctcagcctgctctcggattggtcggcctttctcccgtctgtacgccggtccaggacgcaaaggcgctggccctgaggcctttccctcattttgatgccactccggagttctaatacctgtctcacgaggtgactgtagaaattaaaaataaagactgtgacttgtttagttaatataaaacggaaaaatatgttattttgattattgaaccctcccatctcacacacacacactccccaattcacaggatcatccctaaggagcgtccctaagtggaagggcgcactgtctgtgtaaacaatcaattaattgcccattcaaacagcaaaaaagaaaaaaaaatcgttttatattaacattaaccagagattaataaatttaggaaagattgcaaaaacgtgactgacaattaggatttaggagcctatgttcgggtactcaattttcacatctacaaaatgggaatgaaatattaagatgttacttattggaaaagtattcaaatattaaatgctttataaattatactcatgtaatccttacaaaacccactaagagtattatccacagcctatggacaatgaaacacaggctaggaaaggctagatttattcaaccattcaacaaatctaagtgcctgcagccatcattttttaatattgtggtgaactaaatctaaaattccttcaaaaaattatgcaacctccaatttaatttttctcttgctcacataaaagtcaccttcctctaggccagccccatcatatctttttccaaaagcccttgagaaagaaagtagcatacaaaaaaaaaaaaaaaaaaaaaactgagacaagtataaatagactaaccagaaggctttctgaaatctcacagaatattatggccaggaattgaatccaaaatgtaattttattttccgtcctcctaaatcattttctggtctccagttcctctcccagaaataaaggtagagttaaatgagattatattaatacacttaaccagattacttatgtgtgtggctttaaaatagtgaaactctttttccttccatattaaaccaaaacccagaagggtttatcttgtctgatagatacggttgtagtaagaaaaaagaaaaaaaaaaagagtacctctggacaagtgccttgagattcaattaaaatgttcatcgtactgtgatgcaattgttggaataaaagaaacccattccaattacaaataattttacactcttgacctgctgaatatccaaattcttctgaaagcttgctaaatgtgaataactctctataaaactttcttgatttgtatgactcagagtccccattttctttaatcttttaaaaatatttggtttggccaggtgtggtggttcatgcctgtaatcccagcactttgggaagctgaggtggacggattgcctgaggtcaggagttccagaccagcctggccaacatggtgaaaccccgtctctactaaaaatacaaaaattaggcaggcatggtggcaggcacctgtaatcccagctactcaggagcctgaggcaggagaattgcttgagcccgggaggcagaggttgcagtgagccgagattgcatcattgcactccagcctgggcaactgagtgggactccatctcaaaaaaaaaaaaaaaaaaaaattagttttagactaaaaagaaagagttatgattatatattaataaatatataaataaatgctgtaagatttaaataaaagtggtgaatgtacttgagtccattttcattacataaagatgtacagcaatgcatttgtacagcaaatgcattgaatattctcacatatgtaagatattatacaacaagaagtaaata

SEQ ID NO: 588000 - DNA, 4001 bp, Homo sapiens
ttcatctcaaaagtacaattttggccagacgcggtggctcacccctgtaatctcaacactttgggaggccgaggcgggcggatcacctgaggttgggagttcgagaccagcctgaccaacatgaagaaaccccgtctgtactaaaaatacaaaattagccaggtgtggtggtgcactcctgtaatcccagctactcgggaggctgaggcaggagaattgcttgaaccaggaaggcagaggttgtggtgagctgagatagcgccattgcactccagcctgggcaacaagagtgaaactccgtctcaaaaaaaaaaaaaaaatacagtttcacatttttctcaaaatatttgacaatgttctttttacttgtttaaataccagaatatgctttaagaggttatgatcaaagggcatttgggataaaacatagattacatggttttgtaagatagcaacaaataactgaacattagtagttcccgtttgttagtgctcaaaaaaacaaaaaagtacaatgggaaagggggccccaaaagggaactgcagatgactgaaggccttgaacaaaggtatgttatggtaagaggcactgtggaagaaaggcaaaagccccactctgctcccagctatgtagccttgggtaaaagttacttagtctctctgtaggatgaggcaagtgggagagaataatttccttatccctaaagaagttgaacaaaaacagggtccatttaggcttaaaattgtgcatttttctgaggagcaagtcaatagctttccttggtttctcaaagtggtaaatgacaccaaaaaggttagtcatcctcgcattaaaaggtaatgtttcccaatcttttcaggtatatatatatatctatatatatatatatatctagtgatattaaagaggaaaaggtgtcattcaagacattacaggttctacctaaccagaaccaacacagaatcaataatgaatagatgagttaatttcttccccatttctaaataaccctaagattaaaaaaaaaaaaaatcacaagggaaatttgaaaatacttaaagctgaatggcaatacttatacgtgtttataaatttggatcatatacacaaaaagattaaaagtgtaatcaataatgctttacatttgtgtggatcattactttaatgatactttcacaaccaattattcctccttttttaggaaggaagggcatatcctagagtctccaatttacagataacgaaacaattattgcccaaggacaaacatttcttaaccatgccagtttcctgacttgtaggccaatgctcctcccaatgttaacaagcagcacaagcttccttcctgggggtttgcactgtaaacctgccagaggaaaataaaagatttttacctcttttgttttttctctctggaatgtttgttgtgctgaatcattaggagacagagtatatgagcaaacaaaggcagatttaaaatggttatctgaggttaccatctcacaccatacttgttgatcattaagtatgagccgagtgaagcaaaaacagctctacaggtttagcacacctctccacagtagagaatgaaagggagattatacattggggctcctctagcaataaattgcttcaacttcttcaggaggcttattaagctcaaacaagcagcagagaactccaagtagaagaaacctaatctccaatccccttttcctagtcatccacgcggacaccaacatctgatggattcaggaatacaccaagctccaagaaaaatacccccgccccacaacctcaccaccaccgataaagccacctaatcctgtctgaatctcttctctgcaaatgttttggtatgcaaatactcgttcattaataagaggaagcaggaaaaagagtgaagaggagtaccatgggaaagggggccccaaaagggaacggcagaacccagagagctgcactgacaagtaagcgaccgcgagtaatcggtcagcacaaaggagccaatcccgagccgcgtggaagaccttgggaggtgggcgggactaacgtgtccagggcccagcggctggcgccagacacgctggcagggcgggaaccgcgcgttccttagcaaccgcaatggccacgcccaccgaacccagcaccctccatcccccatcccgcagccagcgccctactcaacgggaacgggtccttcagtgatcaccgtacctactgggtttcccggactccgggtttctcttgcagagcctccctccgcccagccccaccaagtgccgctcccagggacggaacgatcgtctcccaaacgctttagggctcgctaaagaggtgcgcccgctttcattcccggaccccgagcttcccgggcagggtctccccaatcccctcgcactcgccggacacacacctcagctctgccaaggcaagggccgacaaacttcgtgtcctgtgggaaatgttgctgtccacggttctgtcactcaggggcaggggcgggacaagccagccgcacacccctactcccaaagggtgaggcggaaaagaggcgaggctctgcccccaggggcgggaccaggcctcagcctgctctcggattggtcggcctttctcccgtctgtacgccggtccaggacgcaaaggcgctggccctgaggcctttccctcattttgatgccactccggagttctaatacctgtctcacgaggtgactgtagaaattaaaaataaagactgtgacttgtttagttaatataaaacggaaaaatatgttattttgattattgaaccctcccatctcacacacacacactccccaattcacaggatcatccctaaggagcgtccctaagtggaagggcgcactgtctgtgtaaacaatcaattaattgcccattcaaacagcaaaaaagaaaaaaaaatcgttttatattaacattaaccagagattaataaatttaggaaagattgcaaaaacgtgactgacaattaggatttaggagcctatgttcgggtactcaattttcacatctacaaaatgggaatgaaatattaagatgttacttattggaaaagtattcaaatattaaatgctttataaattatactcatgtaatccttacaaaacccactaagagtattatccacagcctatggacaatgaaacacaggctaggaaaggctagatttattcaaccattcaacaaatctaagtgcctgcagccatcattttttaatattgtggtgaactaaatctaaaattccttcaaaaaattatgcaacctccaatttaatttttctcttgctcacataaaagtcaccttcctctaggccagccccatcatatctttttccaaaagcccttgagaaagaaagtagcatacaaaaaaaaaaaaaaaaaaaaaactgagacaagtataaatagactaaccagaaggctttctgaaatctcacagaatattatggccaggaattgaatccaaaatgtaattttattttccgtcctcctaaatcattttctggtctccagttcctctcccagaaataaaggtagagttaaatgagattatattaatacacttaaccagattacttatgtgtgtggctttaaaatagtgaaactctttttccttccatattaaaccaaaacccagaagggtttatcttgtctgatagatacggttgtagtaagaaaaaagaaaaaaaaaaagagtacctctggacaagtgccttgagattcaattaaaatgttcatcgtactgtgatgcaattgttggaataaaagaaacccattccaattacaaataattttacactcttgacctgctgaatatccaaattcttctgaaagcttgctaaatgtgaataactctctataaaactttcttgatttgtatgactcagagtccccattttctttaatcttttaaaaatatttggtttggccaggtgtggtggttcatgcctgtaatcccagcactttgggaagctgag

SEQ ID NO: 588001 - DNA, 4001 bp, Homo sapiens
ccatccgagtccaagttaccatcacctcagacctggacaaccacagaagcctcctcactggtctctctgtttccatcttggccctccttcagtcaattttctatatggtagccagagcaatttggaaaaagcactgtgtctttcactctaaaataaccgatgtcctgtgtatagttgcttaatagtcacgtgagacagttcaaagaaactctcattttgcaaataacgaaacccgaggccaaaacatactgaaacttcaattccagaactgaggtcagaatttggaattcataattgcacagatgagcctcatttcaatgggccatgctgcttctcccaaacaggtatttcattttctgttatcaatgaaagacaaatgaaataatttgaattgatctagagcctgctttcagggctataaaatatgaaaaaaactgatcaccaggggacaaaagggatgacaacctggactgaactgatacatttaagggccactcgcacgtggatcccatgtgtcccaggatctacctcctctagccaactgaaggacaggggcagcattccagatccaggactatgtgatccacatggggagcataggatttcactggttggatgtgcagaatttgtgtcttccatggtttcccatgcacctgctgaagaagagtggcgattcgagtttctgcagattctgcccacctttgccactctggcttggtggctggtgacagcatttttcccctagaatccctggtagctccatttttccattggttggtggtaatttgctgaggatacagccaatgctctttctctactttgctgactccaagagcctgaagattcttccctgggaaagattccacattttggtggatatgcaaaatgcctccagcatcctgccttaacacttggcaggcaatgggccagccttcttcagagctgggaatcagccccaggatcaccctatctgcaatatttgagagcttcagttttctgttatctccaaagtgtatttggcaccgatctgctactccattgatctcaaggttatttctcagagcaactacagcatggggattccactcacaagcatggacgaaggcagcaccagcatgaactaggaaaggcaatgtaaaataaccaatccctgcatagagatccaccagcacttctccagcacaggacaacgatgccactcgaagcttctcagtgatgtttccaaaggagaacatacactgggtcacgtcaaacttataacggataccattatccacatgctctacccagccatggtcacccagcagcagtgtcactgctggagttcgagtaccatccggtgatacccgccctcgttttgccaaacgctggacgccaagtgccaaggcaacggtctcccagagttccggtcccagatttttccactgcttggcttggaaacagtcttcactcagcaacaagagattaccatgccgttgccatgatcggggcaaatcagcctccaactcggctgaccacttgactccccgaccctccacccagcgactcacctcaagacacaatttttgggcaggtgaacaaccctgggccctcttcgaaggaacaggatccgggagctgcgtgagcatacagggactgcctggggcaacacgattcctcagctcctgcaggtgctgctctggaagcgtctctcccagcaccggtagcgccaccgagccatccggcatcttttccacacggtgctgtgtatcaaagagtttctgcctctggagatattctctgtatcgctgggtaaaccaaggctcagtcacaactgcgacaacagccacgggcttcccactttctctctccatgttgctaacaaccacattctctctcatcacctcagcgatactccatctcctcagagtcggctcaccaggctgactaaattcccggtcttaaataaggtagcctgcagctcacccggccatgccggtgccggaaatgacgtgcaaagaggccggaactaaatatattgatgcgcttgcttgagaatggcgttgccgttgctgtggagaagctgcggccgccatcttttttatggtcaaccattacttttttttcagcctaggaagacatttataacagggaatcttatggactaaaagacttcaaattgctattttccagaaacctcatgcactctcttcagtgctgctcatgaattcaaagagaaaaattaacatgaaattgtcagaggcgcatgaaccagagcaactccatcttaaataggagctgggtaaaatgaggctgaaacctactgggctgcattcctagacggttaaggcactctaagtcgccagatgagataggaagtcagcataaaatacaggtcaaaaagaccttgctgataaaacaggttgcagtgaaggagcggccaaaatccaccaaaactaaaatggccacgagagtgacctctggtggtgctcactgctacactcccaccagcgccatgacagtttacaaatgccatggcaacgtcaggaagttaccctatatggtctaaaaaggggaggcatgaataatccacccctcgtttagcatatcatctggaaataaccataaaaatgggcaaccagcagccctcatggctgctctgtctatggaatagccattcttttattcctttactttcttaataaacttgctttcactttgcactgcggacttgccctgaattctttcttgcatgagatccaagaaccccatgttgtagtctgcattgggacccctttcctgtaacaaaatgatgatctgaatttggagaaagctttcccatagcctaatgctgctctcaggttagcatcagcagccaccttattttctgaaagtgaagagtcagatacagctccctttttcccttttcatgcagatatagtcatcactgtttcattgtcctttggtccaagaaacaactatttgaaagtcagaaggatctgagttccagtaaatcgtatcacccctcaaaattggaatcttcacttataaaatggaatctaatcttcagaagattgctatagtgagtagagacattatagtgtcttagacaataactagtaaagagtagatacttaaaaagatacaaagtaacaagttggctagctcacaggtactaaatacctgttgaaatgctttgatattcctaaagaagacaaaggggaattccatatagactaaatcaaatagttggatataagaactgtaaagaaaccctatcacttctacttcactcccgctgtcagaggagtccaaaccagagtgactccatcttgaataaaggctgaataaagcaaaacctgctgggttacattcccagaaagttaagtactctccataataagactgaggcaggaaaatagggtctggaggcagggaacctaaggctgattcacactgacttcgtagaactaaatcaaaaggaaaaaaccaactatctatgcctaagtaacagaaggaccagaggttactccctttgcaaacctgcttttctgcagggcagaaggaaaattgaaagtacctctgattggttgcagaaagccaccaatcaatccaaatacccactagaggtttcccattggccacttggtgtgcactccatgcaaatgaaataatggcctcaatcagacgtttgcataggagtgcaactttgtaactttacttcagcctctgattgcaggccactacttcatttgcatggggtgaacaccaagtgaccagtaagaaacctctagtgggtatttggaccccagaagattctgtaacccagctgttgagcccctagacaggggctgctcccatcctggggagtgtactttcattttcaataaatctgattttgttgcttcattctttccttggtttgtacattttgtccaattctttgttcaagatgtcacgaacctggacaccctctacccataacaagaccttttggctgaacgagctaatgattcttactc

SEQ ID NO: 588002 - DNA, 4001 bp, Homo sapiens
atccttcaatctacaaactctatgtagcttctaaaaggcttaaaaaacataagttgctctacgtagatgataaatctaaataaagactattagaaacacgaagacaaataattttgagactcgctgctaagaaatccttcggcaaatatcgctagaaaataaaaccacatgggtgattttagaaatttaaaatttcttcctgtaccatattaattgtaaagatactattccagtggttgaaatctatttatgactcagttctctggagtaagccaaaagaccacagttatcatgctaacattaagaaggacaaaaaatgtctgtggccaaaccggacatgtcaacagactcaccttgggaggcctggctacttggtgtgtgtgattaactatacatgcctgactcacacacacaattggcaatagtgccaattcctgcaacctgcttagagagcaatttgtcaatttctaccaaaattaaagctgtacatacctcttgaccctgctaggactttgacatacagacatatccataaaggtaccaagggacagacagacagagaagctacatctaaactcacagacatactctgtcacatgtgtaacagcaaaacaaaacaaacacaaaacagcttaagtgtccatcagtgcaacactggttaaataaatcatgatctagtcatacagtggaatattatgaagctggtaaaaagagtgaggtaaatctacaagtgccaatttgaaatgtattcaaaaatacattttgtgagtaaatcagagtggaaatctgtgagttcttaactttgcaaataaaacaagatctattagcatgtgtgtttttgtgtaagcattttttttaacctggaaaattcttaagaaactgttaacatggtccctctgtcgaaagagatttgtgatgagggtttggagagacctttttaatgatgtctcaacattttaaaagagcccctttctcctgctgacaatctgatgaaatccagtggtgggctctgagcacccaacagcctctatcccttagactaagccatcaggtagtagctagtgctgcctttaggtccgataactgcataagtaatagaagtgcccatcctagagcctcaggtcactcacccatcttcaaaaggtcacctcccccacagcgtttcctgaagctcctacccctggagaaggaatttgccactcctgcctccgttttattggggacattttctgcaacgctctaagtgcagacaattggtttatctgtttcactctgttagaccagaaggcttctcaacccccagaactcttaaatagttatccaacgactaccagatacagtcattcggctatttggttctaaacaaaatctacggaaaggtccaagtgaaacggcacacattccaaattgtcctgattttaggcagctgcccgatcttgtgccagatgatacagatactttttgagtaggtttccctggactgcagttgcccgtccaggagcaagaattcggttggacaaacaagcaaacaaaatagataaagcaggcgctgtgtgggcgcgtcattagtagggtcacctcttggattgtgcacacaccccaaagcttgcaacccccacgctttctccaaaccaagggctgcccccaaggaaacctccagccgacccccgcccgcacgtcggaacccctccagacccgcgagcccccagagtaccttaagcgattccttgaaatcctccgtgtcgtccggcacatcctcatagacaacgccctggggctccttcttttctccagggcgccacatcttcctcaggctgcgcttcattgaccccaccccggacgccacctggtgcagctgctcaccacgcgcgcgggcacctggggcgagagagcgctgtcagcctgccaggcgctggggtccgcgcgagcccgagctctcccgcgctgcagctcacaggcagcgaaaaagtcgctctgcggaagccctggagaacttctggaaggagttctcaggcccgcgctacttttgtagtgcaggaagcaggcggggcgcggagaggaggtagaaacgcggagctccttcgcaaagagggcggcggcgccgcgtctgccttggactcgccccttcagggacaaagtgactcgcccgtcccgctgtcctgcagctgcagcagcgcactgacggagtcaagcgtgtcaggtcggggtggattgcagagaatttgttataataaactaagaggccccttgccctgccccccaaccttgcatgtgagtgtgtgtgtgtgtgtgtgtgtgtgtgtgtgtgtgtgtgtgtgtgtgttgggtggagggtggggggtgtaaagagagaggaagagggaatgactgggtatattggaaagatttttagttttcaggagttttttctaactaaaatcctacagacctgtgtttcccaccacgtgcaccttcttctggcggcctctttgatttggaaataacgtttttaacaaaacttctcattccaaacgtttgggacaatagctacatcctagcactggtttgagggactagattaagtccctgtgaatatcaggtctcatttcctgtggataataacagtgatccccctcacactttggtgtttaagggtggttaataaaaaggtgaggttaaacgtaagccactgctgactggtgcaagtttgtttgcccccagcttcatttgagagacttatatttataggactgctcttcattaagtgtcaatcgaagtgtctcaatcgaagaggctggttctacttttacgtacagacaagggaactgtctggtacagacaagggaactgttgccgtaagttcaggtttacaaggctagaacgcaagaaacctttctaaggctgattataccttgcacaggacagaatgtagctttgacagtcttttgctttgacagacggtgcttcctgaaggccctggattgtcgtattcacctgctcatctccagcacttaactcaagacccccgtggatccaggaactggcataggtgcactcagcaacggtttgtggactctctgacctaggggctgtggtgggctgagcttagggctaggcagagtggacatgatgatattgaggaaccatgaaaggtccccctaaatcttccaatggatatggcaggttgccatcaattccacccctggagtggaattccttggaaggataatattgaacttaaccacatcatgagtccatgagtatggcttgctggaggatacaggtgttcaacttcacctttgcactcttttctcatcagcatctgtgttcagggtatgcaagataagaatcagttgcacaacttgctatgatttagttgaaggaggtaatgcatttggagaaaccaataaagaaaagaatcccagggttgggtaaaaagaataactctcattgagccattgctgcctacctgatattttccatataccagtttaatgttttaaaatggaaatgcctcataggaatattaagactttttattttttatcattgattattttgatcgattgcttttctcacaacacttagctggaaagggtcactaaggcaaaaactgaataaagaggatgttcgaagtgatcattttggaagctggggcagtgggcatgtcatggcagcaagcatcagatggccctgttggccccgagagacagggggtgacaggggtgggggggggggcagcgtgggccagtgcagggaactccagcaatggatggttgaggggaattctgggagaagggtggctccaggccaacagcacccctcctttgtaatatcccctggagtctgcattcttgcttctctaccccactgacattctccaaagcatgtattctttttaatttgtcttctctgtctttaacactgaaaaatacagttggttaatattatagatatgatttttttcctgctttctgcttataaaagcaaatagattaaaagatagtttaatttttaaaaaa

SEQ ID NO: 588003 - DNA, 4001 bp, Homo sapiens
aggcctcacattcagagaaatcaagttataatgttggtattaaggctctatttgcccctcaggagttttattttcacattattaacatccagaaataatcgtcaaactttagcatgttactagccctgtatattgaactgaatctagagatgtttttatccaaaggtgtagctttaaaaggaagttatgaaatccaaggagagagaaactctaagaatatgtttgacttgttaagattaagcatatcattaataaactttcacttaaaggtaaaaaaaaaaaatcctcaaaatgttggtatcatttccagactgtcctgtcagcatcagaacttacaggaaacgcttcatcttcccatacaaaccctgtatttattcacaaccctggcatacttggggaaagaaaaaaaaaaaagcccacacgattttagatcctgtttgcttttatacgttaactggtggaatatctgagagagccttctaagcaaatgagcggcatgtaaaacttcacaacagtgagttcagaaactttcattctcattttgtccacgtcaagaactggctgcccgcatgactttcctctgctgtcccttgcatttttaactctggcagccttttctaaatgatcaactttttctaaaaccagcaggaaagtaacatgatgccagcaagatccataggttttagcttcagagctggaggactttgaagaattgttggaaggttcctattttatttttgctttgaacaatcaagttttagccaacaaccaggcccagagttatcatttctttgtaattttgtctcaggccctatctgtatttttcttttgtacttattatctctcccagaccctttcctttcctgttcacctggtgtgtttacaaaagttcaatgaatctacaaaagttcaatgaataggcctaacttgtctcagatttaactcctccgctgagcttctcacttcacttacctcgcttaaactctagccgtgattttccaaaatggcataagaatgaatattctatcataatttagattcatcattaagatcaatggcttactcaaaaaactttcaaagcatcaaatatgaggcctaaaaagatagagggaagtaaagccggtcctaaaatttaataagtccaagattccctctgaaacccaccagtccttctcaccctctaacttaaattgctttagagtcctggggccataaaacagttgctgacttccctggggaaagggggaaacaccaccatctcagacaggtactaacgaaaaagctttcccagccacaaaaacagctttacacttcaaacagctcccaccgccgcctcaccctcaaattattcctggggtcctataatcctggagttatttggagggacagcgatgtttgccttggcctttcaaagatgcgtttctctagatcccaaacaggaaccagacagaaggcaaagcgtctgtccgcttggatgtcccaccgctgtcaggcatttaatcaccggccagtgtcccctgacccgcgcgacacatggcgcatcaaccgcatcgcagaggaagtctgccccttcctcagcccctacggaagcgcccgggctgcaaggccctgccacatggtacggacagggcacagaccgctcggccaagctgtcctgagccgctctgaggcgggtgcaccaagggatgcgacacccgccttctccagagcccagctgggcctttaagggaaaaaagtttgaagcctgcatttgcaaactcttcaaagccaaaggcagtcctgtgctgttttcccactttggagaccatacggaggcccgtctctgagaccctcccgaccctcccgagttcgcccaacttactactctgcatgctggtgcctagtctgcgccccgcttgtcacgagcccccagaaaacttgcagtggcggcggcggcggcggcccctcgggtccaaccacctccagctcctccgctgcgcccggtaggagagaattaaaatcagccagaaagagacagcgagggggagtggggctgcgagggggagggggcaccggcctgaaacttctttttttggcaaatggggatttgtttttcctcctccccggcggctgaacttgaccctgctgactccaggggctactgcagtttgaagtcgctggtttccaaagctcagatgcctcagacccaccaaaaggaggagaggaagggggaaaaagggagcagaagagaagaaagaaagaaagaaatcacacgctcaaaaaggaagaaagaaaatgcatgtgaaacccgagaagcctgcgcttggctttctgcacactctccctctgcttttttttttttttttttttttttcaaagaaagtcacttttaattcccagggctccccgctcgcgatcgcccacattttgcgcgcacacgagcgggcgctgcactcgcgtcgcggcgccccgggcccggccgaggggcgcccgcgccccccgcgccccccgcagcccccggccccgcggcccgctcgggcctcccctccttacctgttgattaatcgtcaagaacaccctcggcagcccgaaagatggtggcgcggcggccaaagccatgaaccgtcttctgttgtttgcagagttgatcttggattattgcgggggggagagaaaaaggtctttcctgcctcccccccctttccctcccccacccttattaaaaaagagagagagagagagagagagagaaagagaaaggaaatagagcaaggatgtgcccggtgccgggtgggagaggggagggggtgttgttttttgtttaaaaaaaaaaaaaagaaataggaaggcgagagagcaatcgagaggacgcgaggtctggagaaaccagcagcaccaaaaaagaggacgctagagattgcagtaagatcgggtctttatcagaaatgttatcgcttgtcaggacctcagtctccgcgcattacgtcagtttcaagacaccaacactattaatatcaaaggagccttcgcggaggaaagcgccaccccagaccgagctcccttaaagagacagcgcgcgtccccgcgccgccgccgccgccccgcccggctccgagcacccgccgccgccgcccgccgggaccggccccggccgcggcgagccggctgcgcgagaacttcgcccgagtcggagcgccgcaaatgagagcggcgcggtgcagggacccggctaccttcccgccccgcctctcccccctcctccctcccccacctcccgtctgtgaacgtgcgggctggaaaaggaggaaaaatccgaacgcgttaggaataatgtgataaagacgaggacttaccttggggtagtggggggcaggtggggggcagtgcgtggccgccaaaccgacgttccccagacactcagagatgctaacagaaacaatttaaagaactctcaaagtccttttaccttttctgttgttactttcccttctctctcccaattaaacgacgcaggatgtgtgtgtgcgtgtgcgccccctcccccgccctttatctgtggcaagaagtcttaggacacctagttggtgatcaggattccccacgattttcacggcaagaaggcttgaggagaacaacttgaactctatcctgagttggagaagtgcggactgaggttgctatggttttctgagctaaagagaagccagaaactcaatgggtgctttaagggggtaccacaaaacagacaaaatgggaacattattcaaatgctgcaagattaatacatgcagtttgggttttagtagcagataaggaactctgaattaagcgtgacattcttttttacctactttacatctccatatactctcattattaagagaaattgcctcaacataaagttcactggattgagcttttttttttttttttgacttctaaagatcaacaatgcataaaacattaccatgacaggattcaaagtatagtaggtgttaaaaacaaagtaaacatttcttggg

SEQ ID NO: 588004 - DNA, 4001 bp, Homo sapiens
gaatattctatcataatttagattcatcattaagatcaatggcttactcaaaaaactttcaaagcatcaaatatgaggcctaaaaagatagagggaagtaaagccggtcctaaaatttaataagtccaagattccctctgaaacccaccagtccttctcaccctctaacttaaattgctttagagtcctggggccataaaacagttgctgacttccctggggaaagggggaaacaccaccatctcagacaggtactaacgaaaaagctttcccagccacaaaaacagctttacacttcaaacagctcccaccgccgcctcaccctcaaattattcctggggtcctataatcctggagttatttggagggacagcgatgtttgccttggcctttcaaagatgcgtttctctagatcccaaacaggaaccagacagaaggcaaagcgtctgtccgcttggatgtcccaccgctgtcaggcatttaatcaccggccagtgtcccctgacccgcgcgacacatggcgcatcaaccgcatcgcagaggaagtctgccccttcctcagcccctacggaagcgcccgggctgcaaggccctgccacatggtacggacagggcacagaccgctcggccaagctgtcctgagccgctctgaggcgggtgcaccaagggatgcgacacccgccttctccagagcccagctgggcctttaagggaaaaaagtttgaagcctgcatttgcaaactcttcaaagccaaaggcagtcctgtgctgttttcccactttggagaccatacggaggcccgtctctgagaccctcccgaccctcccgagttcgcccaacttactactctgcatgctggtgcctagtctgcgccccgcttgtcacgagcccccagaaaacttgcagtggcggcggcggcggcggcccctcgggtccaaccacctccagctcctccgctgcgcccggtaggagagaattaaaatcagccagaaagagacagcgagggggagtggggctgcgagggggagggggcaccggcctgaaacttctttttttggcaaatggggatttgtttttcctcctccccggcggctgaacttgaccctgctgactccaggggctactgcagtttgaagtcgctggtttccaaagctcagatgcctcagacccaccaaaaggaggagaggaagggggaaaaagggagcagaagagaagaaagaaagaaagaaatcacacgctcaaaaaggaagaaagaaaatgcatgtgaaacccgagaagcctgcgcttggctttctgcacactctccctctgcttttttttttttttttttttttttcaaagaaagtcacttttaattcccagggctccccgctcgcgatcgcccacattttgcgcgcacacgagcgggcgctgcactcgcgtcgcggcgccccgggcccggccgaggggcgcccgcgccccccgcgccccccgcagcccccggccccgcggcccgctcgggcctcccctccttacctgttgattaatcgtcaagaacaccctcggcagcccgaaagatggtggcgcggcggccaaagccatgaaccgtcttctgttgtttgcagagttgatcttggattattgcgggggggagagaaaaaggtctttcctgcctcccccccctttccctcccccacccttattaaaaaagagagagagagagagagagagagaaagagaaaggaaatagagcaaggatgtgcccggtgccgggtgggagaggggagggggtgttgttttttgtttaaaaaaaaaaaaaagaaataggaaggcgagagagcaatcgagaggacgcgaggtctggagaaaccagcagcaccaaaaaagaggacgctagagattgcagtaagatcgggtctttatcagaaatgttatcgcttgtcaggacctcagtctccgcgcattacgtcagtttcaagacaccaacactattaatatcaaaggagccttcgcggaggaaagcgccaccccagaccgagctcccttaaagagacagcgcgcgtccccgcgccgccgccgccgccccgcccggctccgagcacccgccgccgccgcccgccgggaccggccccggccgcggcgagccggctgcgcgagaacttcgcccgagtcggagcgccgcaaatgagagcggcgcggtgcagggacccggctaccttcccgccccgcctctcccccctcctccctcccccacctcccgtctgtgaacgtgcgggctggaaaaggaggaaaaatccgaacgcgttaggaataatgtgataaagacgaggacttaccttggggtagtggggggcaggtggggggcagtgcgtggccgccaaaccgacgttccccagacactcagagatgctaacagaaacaatttaaagaactctcaaagtccttttaccttttctgttgttactttcccttctctctcccaattaaacgacgcaggatgtgtgtgtgcgtgtgcgccccctcccccgccctttatctgtggcaagaagtcttaggacacctagttggtgatcaggattccccacgattttcacggcaagaaggcttgaggagaacaacttgaactctatcctgagttggagaagtgcggactgaggttgctatggttttctgagctaaagagaagccagaaactcaatgggtgctttaagggggtaccacaaaacagacaaaatgggaacattattcaaatgctgcaagattaatacatgcagtttgggttttagtagcagataaggaactctgaattaagcgtgacattcttttttacctactttacatctccatatactctcattattaagagaaattgcctcaacataaagttcactggattgagcttttttttttttttttgacttctaaagatcaacaatgcataaaacattaccatgacaggattcaaagtatagtaggtgttaaaaacaaagtaaacatttcttgggcgtttggacttcattttcttcagttgggtgactttaagtggcatgtttttcctctggtgaaagtcagtttaaagtaattttgtgctaaaaggagaagcatctttccttttccaaactacaaaatgattaaaattagaatcttaggtacaatcatgaatctgagagccgaagatgaagtaatttcctccaaaatatttttcactaaatgattcttgcatctttttagagaaaagatgggtatattttccaaacatactattatcagaagtgaaaaagccaatcattttaaaaaattaaaactgaagtaggtgcttttagaaccttattcctttttctctatggtctttatttaatatacctagtcaagcagatatgtgattttttttttgtagcacatttattccagaagtattttggtaccgtttcccatacactctttatgagtagaaaaccaataattcttttgcaatagagaaactagtcaggtgaaaaagtagtcaaaatacagtttcacaatgaggcaaacaatatatttcctaaaggagagagaagacaatgagcctcatatgcctggagttattcatatgttatcatccatttaaattaatttgagaacagagttagatttatatatagtactgcatgccgggaaaattaatatcaaaatcttcagtaaatctcatagtcagctactaatgaccacctgcatatttccacactggagtcatttaatactgtccaccaccaatttccactgtaaaatgtattcacatattaaatatagaccttttattttctttttttaagccataaattaacttgctgacttttatggaaatatgcacggcacagtgagaagcatttttattaaaggaaaaaaataaggatctgagtgaaacattcttgagccatgactaactaaaaatattaaatcaattttgaaatatgtattcgaacagtaagactgttttgtattgaaagggttaatatcacctaaaactgctgaagctggtatc

SEQ ID NO: 588005 - DNA, 4001 bp, Homo sapiens
ggtgctgggtggggtgctcaggacacaagggtgacacagcagaggtctatgccacagaggctcccaggcacacaggagagacaaacacgggagtgccagggcattccaagcagaaggctctgcatcgacaggcacaccagtgagaaaagccacagactatgcaggaaaaatgactgcactgtcagggacataaagcagggactgaagatgtggcaggagctgctggcaggagccaaacccaggacctcgctctgcaggccatgaggagctgtggaagagacttagggacacctggctgcccatgagcccctagactgagtgcctaggtctaggctcttgacccagcatctacagaaggccagactcaggggaagtgtccagggaaggttcctggatagagtcagagcagccagaggctgccagatgttcatggggccaggccagcagaggaggagagaaacagaggtgacccagccaaaactcaacctcctccaggaagtcgtcttggatttgccagcctcccacagccacctgcattcacggcctgtgctgctgtgtccaaacatttgttctaccagatttctgctgcggtcctgtgatgtatggggtcgaacggtatgaaagcagcggttcagtcgggggaagcactccagtactaacaaacttcagctttctttcaactcaatactgtgtccacactgggagtatcctaagcaacaatccccacccctgtctcacaggcactaaagataaaacagaaaacaagcagatgagtgacaatgacaaacaagaaatactgtagggagagcggtcagaaaggtgagctcagacataccggaagcggagctgcccccaagccaggagcgagccaggaactaaaagaagaggcaagtgtgcagcagaggaaagaaagggcgccaggtgtggctggaaaggcacctggcaggatgaggggcggagaagcaccggcggagcagcacgcgcgaggcccattttgagccgcaccacaccgctcacagaacttcctgtgataagcagtgttccctacccgcgctgccccacacagccgccaccagacacgtgtggctactgagtgtcggacatgtgaccactggcacggaggacctgaatccttcacgttaaggacaatgtaaacagccacacatgcctaggggctaccacactggacatggcagagcttccagagcaggaggagtgcgccatgaggcaacaaacacgaggtccctggagagtttctgcgggggcagcacagatcaacatcacctgaaagtccctggtggggatgtcgcaggccccagtacccaggaagcaccttcttacaacttggagaagggacagaaaggcatggagaggcaagcacacaggaacggggtccccagctcaggctcgaaggcgggctccgctcgttgagctgcagggcaccaacccttgcacccagcaagtaggcgctggggcgctccccgggacggcactgacctccaggcgcaggcaccggctgcccggcccagagcccaccgacctggggtctgaacagcgcgcgaggacccgccgaggggctcatgtgcccgcgggccggtccccgaaatgcggcgctctcgcggggctgcggctcagggtccctggcgcccctggggtccacccccggcacggtcccgccccctcccctccccaccggcgcggccccgccccccgcccggcctcccgcaagccccataccacgccacgccgcggcccccgccgggctccgggccccgcgctggtccccggccgcctcgccctcgccgccccacgcccggccccggccaggccccagccccaccgccgccgcctcacctgggcctcggtggctcgcggaccgctccgggcgctcacggcgggcgaggcgggcggggcgggcacccaaacatcacgtgacggcccctcccgccgccggcgtgcgcgccccctcccgcaccagccaatggccgccggtcccggacgcgcgcggggactacccgccccagaggccccggcgcggagccggaagcggcgcggacggcggtcggctgggccaagaggcctctgcgggtgcgcgcgcgagtcggctgtcctcacttgcctggtggtgggcctccgtttccccgtttccccgttttgcatatggggatgacggcgaaggtggaggtcacgtggagggcggcggcccggcgctgaggcgcttcgggagcgggctccgcccagcccaggccgagcccggacctcacacgggccaaagctggagcttctgcggggctgcgcaggcggcgggtctcggccagggcagggccgggcacctgcgcgtctcgcgctgcggggacgggcgttgggccccaagtcaggctgcacgggctccgcgtggggccgtgctcggccgggggctggcaggccccgcggggactccggactcccagtgtcaccaacgaggaaactgagtctcaagacatctgagggacctttgcccgaggtcgcagcccctccctggaggagctgaagtgcagagtagggagccccttgcggagaccctcctgggacctccttccgcaggggcctggggcgcctccctttccctgctctgcctgcgggcactgagctcccgaaagactccagcccctcgctctcccggtgacctgctggagaagacacctgggaggaacctgcggacaatgggtgtgtgtccttgggccgccagggtcacctttcagcctgtttccccagaggtgaaccaagagtcacacccaaggcaggagagcaagagtgatgagtccgctgcaccttctccggcaagcggaggttctcccgccgccctcactctgtgatgcttgctgtgcttgcgaggcctacgccaaagccctgcgggcagccctgggctcccgcggacagccttgctgagctcctgggaaggaggcgtgccctccccttcccccaccgccccgctggctggggttctctgcagcccaggactgtgcatgtgtgcgcacacgggttctgtgaacacgaacacaaaagtgtgctcgtggacactgcgtggtactgtgtgcacacagcgcacgtctgtgagctgagggagtgttcctggacaccaggtgcaagtgcacaagtgtgtgtatgctggcacaagtgtgtgcccaggcgcaaacatgggaacggtagtatatggcacaaatgtgtgcacacatgggtgggagggaagaggggcacatgcccaccagcattcctgggctggtgctcaggccggcctgtcctgggcccacccacgctccttgccttggtgtatttcagtctcccctgggctcccaggaggcagtagtgtgtgcctgtcttgcagcctcgccatgatttggacagggcttcactcttcggctaggacagctagagtgcagggaagccggctcctaaccagggaggatgcccatgactgctgaccccccagcttccacttgaaggggaaggttcgccaggaccaatgcctgtctgagagctgtcagtctggactgaggatgccgggtgcctggcacggtgcccacctccccttccgtggctggcgctgtctgtctggccgccacctcactcagcctcctctgacagctccgtgttcaggtgtgcaaaggaggggaaagtgaagccctttcctcccagggcagaccacctccaggagccgctttcttgaccatacaaggcgtatatggggctgtttctgtgcctggacactgcagggggaatggtctagcgtgggtaggaaccaccagaggaggggctccgtacctgttggctcctccgaaatctgggatgagcccgcctgagtgccccacagcaagtcagggaaggtaaacctctccgtggaagagccaggagcccactccctcaggctgagccgatggggagggggaggaggatgctaaggggtcctcaggaagggatgagggaaatagccaatagctgcctgggcctagggccggggctcc

SEQ ID NO: 588006 - DNA, 4001 bp, Homo sapiens
tactgtttcttgcccttaacttcatgcatgcccagcagtcaagtgccattctgcagaacatcaagcaggatgggtatcacagaccacaggccaaagccagaaataaagcaggtgacatctcagctggtgaccccagacccacagaacaggaagttctggctgatgactaataccatgtgcactggcttcattctgcagtggcaatggaaacgcttgcatagatgacatgcatggccagcatgaacacgaagcccagcaagtcactggccctgaaggagcagagcttgaggatgcactggtcgtcctggaggatgactcatgagtgtccatgttaaagacaagtaggaaaggccagagccaagaacaaggtccaggcaatgtagataacagggagcacacatctaaagtatgtgtgcttaacatatgaacagtccgggtgcgatcacataacatgtgacactaacgtagaaaagcaagaggctatgggaggcaaaagaacatgatcataaatgccatattcttgtaactaaagtccaaagggtctatagtacacagaggccaacatgaagagaaggcagagagccaaatatgtagtcaaccaggagcagcccagcaggaggtagcagggagacttgtgcaggatcagttggattggctcaccccaggctgagtagtctccattggctgctttcctggaccttgcctgccttctttttcctttcctttctctacacgagccccttcactcaaaaggtagaactgcaagggattgggccacaattcttcgttgattatctccacaatcttgtcagactcaatggagctgtggtttgaaaaccacccaaagaaactacggttgttttctgggtttccctggcttagggactggagatcatgccctgggagccactggattggagtagaacgagacaccacctggccagaaggaccacacccatattccttgatgagcaccttattttggaaatacgggttgcgatcgaagtagaacttgattttgtagcccaatctggcaaggccgagctcttccacttccaagctgtttaagtagctcagtacctctttctcttggctattcagaaaggatgctagctggggatggttctgaaatgcttgcccccagaagcccgggatattttggatgaggtggttcctgcgctccaagtgctgcagtcgcaactgcccaaacttcctggagagccgaaggtaggccctgtccgcctgggcgttcatgttctccagcttcagctgcacgttctccagcgtatccatgctgccttccgtcgctgggggccccgaccctgcatccctctcttccttcttttcctccccagctgacaccgaggtattctcccctgccgcccctttcttctgcctcccaccagctatgacctgaggccccctccccgcggtgctacaggtttctggggccttcttcccggcagggccacgccggtttccaacgcggggggcatttttcggccttcccacggttcccgctgttcccacgaagacagtgtctgcggccaggcgctccgagagagatgcggccttccccgggccgggcctggccgcggcctgcccgtggtcccccgcagctcgggcccgcagcgcgaggccacagtccagggggagccggcaggcggcctcctccccgagccggaggagctgcgcggacgcagcggcttccaggccaccccaccccgcgccagcctgcacctgtgccgcctgggtgtcttccccgagactctggtactgtgaagggtccgggtcgcgcggggcgtcgtccggagcagggcggactcgggctttggcgcggcctttgccccggtttttggcgcgggaggactttcgaccccgacttcggccgctcatggtggcggcggaggcagcttcaaagacacgctgtgaccctgcggctcctgacgccagctctcggtcgggaccgagcgggtctctccacggcaaccgccgacgtcacgaacgtacaactgtaccgtcgcgagaggacgtgatgcgcccggtgattggcgccgccgctgcggctgcgcaggagacgacccccgcgggcgctcccacccccatctcgcgcggactcgctttaggtctcggcgagtttctctgatatgcgctcgcgggggtgctgccatttcatctcttccgcgcgggctcatcgtgctctcagggtctcgttgaacaaggcaacgctaagagccatcaccacctgtcccccatcacctgttttctaaactaaacatcttcagctcctccagttatctcttgtggcatctgtcatgaagaaagtgctcgggcgtgtgtgtctctctttgaacacctttgctgagggatttgctctggtaccttaactccagagaacgtaaaggtggatgctataatgccgggcgtcaaagcgatttggtacgcagtaagatgatagtagaaattataaaaataatggcaactagtattttgtatcatttgtgccaggcactttactaggtgctttaaatgcattatctcaatttacaaaggaggtgttgatatcattcccattttcgagataagaaaactgcatctcagagacacccgggcacattccccaggttacacagtaagggatggaagcacaattcaaactcaagcccatgggactccgtatcctatgccttatatttggaaatggcaagtccttccagacttgttccactgtcaattactgggctggctcttaagaaatcagccttgctccttaacaaacaggcttccgtggaccacctgaccacctcttctgcctgggaacatcacccgagtcccccagctgcctcagtttacagatctggactatcactctaggtataggaccagaagtgaagacctgtattagagctcctgtaattggagtaagacaagaatgtggtgagaggtgaaattattattcagggagcagattgaggttcagaagcagagcctccacgtggcactgcagaagccctagaaacttcttacactgtgcatggaaacagccggacaacctcccccacagtcccggaggcagccctggaccacgctcttactagtgaggtaataggaccatgaacagtgaggggacctgtggctaatgtaaaaatataaagaaaaaccttttgaggtggtcttttcaggctcaaagggaacaaaaaggcccttgtaaccagctagtggagagataagcccaaaagccccgggacctcattactcaaagtgtggttgtggaccagcagcctgatatcacctgaaagcttgttaaagatgcagaatctcaggcctttccccagacctactaagtcagaatttgaattttaacaagatcctgggtgatttgtatacacccctaagtttaaggaaacaatttaaagaggaattatttttatacagatggccctattttaagccggcctaatacaagtgattcctcattttctcaaaagctctagaatagcctgcaaggccctgtatgatctggcaagtcttctatctgccactacatgagttacctctctgacctcatcttctctctcctctctcccacctctagctacactggcttccttgctgttcttaaactcactaggtaaactcctgcctcagagcctttgcactggctcttccttctaccttaaatgctctttcccaatgtggttggtggccttggccagctgccttcacactttgcttaaatgtcaccttctcaatgaccatcctatttagaattgccacccaccccatccctttatcctatggtactttttctttattccaacacactataccaattatttattatgcttattaactatctcttctctctagaatgtcagctccatgagggaagagatttttgttttgttcactgatgtatcctcagtgcctgcaacagtgtctgacatatcaagagcacttaataaatacttgttgaaagaaagaaccaatcaaagcagagt

SEQ ID NO: 588007 - DNA, 4001 bp, Homo sapiens
aagccagctaaggcaaggctgctgcccagtgactggtggggccaaccctccggaacacagctagccacggcagggcccttacaccacgcccccttcccccagacacaggcagcagatgcacagagcgcggttcacacccctgcaccccagagtgtgtggtgggcccggctaaggggagctgggccagcacagtcctgggagccagaggctccagaggccctggggactcagggggcaggaaccagctcccagtcccacgtggccgctggctcttttcagcctcccaatgctgcaagtcagctccacagctttgcctactgggccaagtgcctccaggccccctgcatggccctctgtccacagcaccaagtgtgagtgactgggggtccctcaggggctgcccccaccaggctgtgccaagccctgatcctcagggacttcctggggtgggaatgtgggcctgtgagagtgggaagcccgccaggaagttcccagaacctgggatcctggtttccagtgcttgctggggccaccctcacttacccagaagtccaaattgtatttgatattccggaacaggccccccaccattgcagcaagatggatgacgtgtgtgggttggaccttctcaaacagggcgcgggtctgtgctgtatccctgtaggaagccaggctgtcaggaggctctggagggaaccagcaccccagggttgggtgccaagtgcaggaactgggtgggactatggcaggagggacagtcaaaagggagggtggccccagggcctggctgatatgagggtgcaggcttccaggaagagatgggagggtgtttgtttttccaggaacacagccaagcacacccaggccaggccagccacctggcaggaaggacccagaaacacagctactgttagactcagcaacatgcccagcctggaactcttagttctagggtggggggtaggatggagaggaagggctgatctggggatgggctcactcacgtgagatcggcgtctttagaggagacaaacacccagtcctctccaggaagtccagctccatctgctaccaccttctggatggctttgcctaccagcccagagccccctgtcactagaatccgcatggatccctggggttcacccatgtcagttgcacctgtaatgtcaaacagtgggaggctgaggtcatcacgctctcatcctttggagccccactcttctgtggcaactggcacagagtgaggccctcagagtggggcatagtccactggcaaccagaaagacccagctggaccgaggcactccctcgtcgcagccctgttcccctgggagctctcagcctacagcgccgcaggggtcctgagctaccacccagcccagagcagctggtcccaacccacgactccccactaggccgagaaaaggtacattctactcccctctgactgacaagaggggaggcagacaaccttgggacgggggctcctggcacaggtcgttaacacggttcgcagctaaagcccgcatgctagggacaggcacgagacggcgcctgtgtgcagcccacgcccactcgaggctggctggtcctggagagccctggcgagccagattcctccagggcaggacaggcctcggggcgcagccaccctcaaggatcccatcctgggagccggaaacctgctcgggctcccccggcagggccccagggccagcccttaggggagggggccctgcgcaggcgtcgcgcggctcccaagcacgcggggagacctcaccgcagccagaccctctaccacagccccaggctgcccccatgcccctcgatcccagacccccacagcgctccctgactctcacggagcatccagggcccagggcgcggctgagtccggtgccacctcacctgcgtccagccccaccgccggctccccgacagcggcttccggccgggtgcgctccggctgcccgcggagccaggtggggggcggggccgggaggctggggcggggcactctgggaaatggagtcccgggggcgcgcagcgtcccgggcacagctgggacttggagtccgcggccgcaaagccgcttgggaagcgcagtctcgtccgccggccgcgcgcgggcgggtccccggacgaagtcccgggccgcaacctctttagcccgcggggcgctgggcccaggccctgcttgggacggcggaaggacacgagacgagggccagccggcagcgccgcgcgggatgcccgcggcgtcggaaggagcctcgccggcgctggggccaggcgggcttacgctgcggcgtctccctttgctccccttccctcccagggttccgcccccgaatacgcagacctcgcgccgcagcctcttggattccggccgcgatgaggagcccgggttgtcgtcccaagcacttgcactgtcacccgcgcccatgggtacgcccaggctcgggcagcaagcagcaaacaacaccagagttacggcgaatcacgttgggtgactgtgggtgacagcgggtcacggcgggttaagaaggatcacatcggatcacgatgggtcacggcgagtcaaggagggtcgcggcggctcacagtggttcccacggtcgcgctgcgagccgccagctgctcctgccctcagctcagagcccagtcctgctgcctggggcgggagggggtggcagcgcggccctgacatcgagaggccaccgtcatcgtcttccatcgaaaggcgtttaaaagcagtcacggccatgcgcggtggctcaggcctgtgatcccagcactttgggaggccgaggcgggcggatcatttgaggtcaggagttcgagaccagcctggcaaaacatggtgaaatccggtatctaataaaaatgaaaaattagtcgggggtagttgcgcgcgcctgtaatcccagctacttgggaggctgaggcaggagaatcgcttgaccccaggaggcagaggttgcagtgagcccaggtggcgccaccgcaccccagcctggacgacagagcgagactccatctcaaataaataaaataaaaacagtcactcaggctgacaagggtaagggaaatgtggtccgcccccaccaccttaacatcttgctatgaaaggacgtttcatgatgataacgtttaaagacatccgtaaggcgatggcttttatctgactggaagttagcaaaacattagagatgactgaagtgagtcgctgctgggtatgtccacctgctctggtgatgggcaggcagcgttgcttaataaagatttcacaattttaggccgggcgcagtggctcacgcctgtaatcccagcactttgggaggccgaggcaggcggatcacgaggtcaggagatcgagaccatcctggctaacacggtgaaaccctgtctctactaaaaaaaaacaaaaaaattagcccggcatggtggggggcgcccgtagtcccagctactccggaggctgaggcaggagaatggcctgaacccgggaggcggagcttgcagtgagccgagatcgcgccactgcactccagcctgggcgacagagcgagactccatctcaaaaaaaaaaaagacttcacagtttctaaattgttatatatttcttccataaaaatttagttttcttcatttcagcagttactaattatgatattaaagtcacataatttgtattctgttgaccatagtgtcgaactacacaatctttcttaagtcattgtacttcttttttgttttcagagatggagtcttgctgtgttgcccaggctggtctcaaattcctgtcctgatcactcaaattcaagcattcctcctgccttggcctcccaaacctctgagattacaggcatgagccattgcactcggcttgtactcttctttttaaaaattggttcggctgggtgtggtggctcacacctgtaatcccagcactttgggaggccgaggtgggcagatcacctgaggtcgggagttcg

SEQ ID NO: 588008 - DNA, 4001 bp, Homo sapiens
gcgtccaccaccatgcccagctaatttttgtatttttagtagagatggggtttcacaatgttggccaggctggtctcgaactcctgaccttaagtgatccacccgcctcggcctcccaaagtgctgggactacaggagtgagccacctcgcccggccacattttgtaattattaactccaagtaagtgggacagaatttccaattttcctaggcagtcgtcctaagggctggaaagagcattggacaactgagcccgaacatctcagttatgacctccaatttgccactatccagttatgtcatttatagcaaatcacaacgtttctgggccttaagagatccgtggttacagcacccttattttactgctgaagaaattgagcttcctttgaggtataacgctataaaaaattaagctagggcaggcgcagtggctcacgcctgtaatcccagcattttgggagcccgaggcgggtggatcacttgaggtcaagagttcaagaccagcctggccaacatggtgaaaccccgtctctactaaaaatacaaaaaatcagccaggcgtggtgacgggcaactgtaatcccagctactccgaaggctgacacaggagaatcgcttgaacccaggaggcggaggttgcagtgagctgagatcgcaacattgcactccaccctgggcaacaagagtgaaactctgtctcgaaaataaataaataataaaaaataaaaataaaaaactgtgaggctcaagtcggtggcaaagggcaggagtactcacttatacaagtcgggtttgagaagccctagtatcaccgaaagtctccctttctcatcttcattttctccatgtaggaatcctgccacagaaccgcattcagtaacttgaagcagtgaggtgagcacctccctagcaacttcccgagatctcggagtggtccatggttgctccaagctgtgtgtgatggcaaaaatataaacgggtcctgccaagtgatgcaggcccgtctgccatgcagggccgaccagggaattcttagcagtctcaactttccctaacagtttaagaaacagtaacccaacttgggctgctttctcggccgcttcggagtgcccatcacctccaccttcctcctccttggagggggctgcatacttctccagggcttttgctacctgccccagtgtctccggcattccgcggagccgtgcaccagtcccctcaaataacctatcaaattctgtggcttctattagatcaccgaggtctttaagaactgcatcttttacattgcctcgtcgtgcctccgggcgggcaagacagtgtaaaatcttggagaaggcctgtccaaaggcggagtgagacaactcctcggacaaattagagtcttcctgcgatggggcttccagagcgctgtcaagctccattcctgactgcagcaccagaaggctggtctctcccacagaacgaggatggaggcggggagggatccgttgaagagggaaggagcgatcacccaaagagaactaaaatcaaataaaataaaacagagagatgtcttggaggagggggcgagtctgaccgggataagaataaagagaaagggtgaacccgggaggcggagtttgcagtgagccgagatcgcgccactgcactccagcctgggcgacagagtgagactccgtctcagtaaaaaaaaaaaaaaaaaaaagaataaagaggaaaggacgcaagaaagggaaaggggactctcagggagtaaaagagtcttacacttttaacagtgacgttaaaagactactgttgcctttctgaagactaaaaagaaaaaaaacttaaaaatttaaagaaataaacttctgagccatgtcaccaacttaaccacccccaggtacctgcaacggctcgcgcccgccggtgtctaacaggatccggacctagctcatattgctgccgcaaaacgcaaggctagcttccgccagtactgccgcaacaccttcttatttcacgacgtatggtcgtaaagcaataaagatccaggctcgggaaaatgacggagaggtggaactatagagaataaatttgcatatataataatccgctcgctaattgtgtttctgttttcctttgctaaggtagaaacaaaagaataatcacagaatctcagtgggactttgaaaatatccaggattttatacgtgaagaatggatgtatcgcattacggtagtcaccctatgtgtaaattagtggcacatacttggcactccttaatgtcaactataagatgatccttttgtagttcatgagcgtgatgattgggtgttcatacgcttgtgtgagatgtgccacccttgaaccttgttacgacgtgggcacattacccgtctgacctgaacttcaaggatcgatttaacacttgtatttgtgggcttgttacttatgataacaggtggcctagtttcatggctttgtgtttaccgttttcgggtgcccttttttctggctgtatgctacacgcacgggtgcttttccgttgtccaactgtgtaatgtgtttttgtgtttgttcttttgtgagtcggagtctcgcgttgtcgccaggctggagttgcagtgttgcgatctcggctcactgcaacccccacctccggttttcgagagattgtcctacctcagcctcccgagtagctgggactataggcgcgcgccaccacgcccagctaatttttgtataaatattggcaaggatggtctcgatctcttgacctcgtgatgcgcccgcctcggcctcccaaagggctgggattacaggcgtgagccaccgcgcctggccaatgcagagctttttaatggctttaattttttaggtttgggagatacctgcgcaggtttgttacctggatatgttgtgggatgctgggatttggagtgcagcttagcccgttttcattgccccctctagtagaccacagtgtctgttgttgccacttttatgtccacgtgttcctaatgtttagctcccacttatgaatgagagcatgcggtatttggttttctgttcaatgcaatactttagctggtttctggagctagcgttttaaagcctgtagccacaagcgtttgaaaattcaaattctagcgtcaaggtagaagcccccagctggcgtctggggcagccctgagggaggtgggtcgtcgggttggcggatccggcttgggcccgccccgccagtgtcggcgccgggtgcgcagggacagcagagcgctgtcttgggcatgggtcgcaggcggcgcccggaacgggccaggggagctggaggctgcagactcgggctcggcgggtgtaggaaccagtggtgtttgcttgggttttgagaaggcgcgagaagggtcgcgcctgtgcgaccgccctgtgttgggtcccccacgccgcgtcggcattgcttgttccctcttcctgcgctttcctggagggtagaattgcgtccgattggccttcagttcccgaggagctgcttccatttaggaccttgtgactctcatagcttccacggtttcgcaggagcccgaggaggcaaacttcatttgtgccactgcacaggcgggagcttcggaccctgggaggggtggcgcgagagagacgtgtcgccagctgctcggagagggactcttattcagcctctaaggcgtcaattgcgcctccagggttccaggagtccagagaaagcccttcggggtcttctgacctggggtagggtgaggggcgtgtgtgcgcgcaggggcgagggaggggtgacgtgtcaggtgtcctttgtcctcgcgaggaggtggttatggggtagagggacatacagtattttcgtcccaccttggggagcgcaccagcttcttggtgcactacttgcaactgtcccatctgcggtgtcttgctgcctactcgcctgcccttctttccattttgctgtctgaccttgggcaaaagttcggtagcctctctgtg

SEQ ID NO: 588009 - DNA, 4001 bp, Homo sapiens
tttgttattttttgtagagatgaggtttcaccatgttgcacaggctgttcgtgagctcctgagctcaattgatccaccatcctcagcctcccaaagtgctgggattgcaggcctgagctactgcgacctttggaaggcactgaaaactctttggaagacagtttgttatattactcaacactgaaaaatacacatctaatttcatccagcaatttcaccggttgaatttatcctgtaaatttatattcctatttatgcacaaagtatgaggacatgaggaatgcccagtcagtgatggaagaaaccacagccgccttgttgactgcatcttgtgtactactaggcaaattgtagagtccaaaaaataattgttgaatgaaggaatgaacagcaataagccctaagtccaataacaggttagatacattttaatatagtctaatatatccatccagtagaataacagcagcccaataaagagtaagatggatgtataccagttgatatgggatgctcctagttcaaagacaggtaagaaaggcaaaatagaaatcacacacaaacatgcttgtgcaacctctggctgtttaaaaagataaatgagtaacactaaccagcctctgggtatgtgactgacaaactaaggtttgaggtagggagcttttttcctttagaaagttactgttagaaacttacttttcacgttttaggattttgtgttacctagattatttttaccataattttacttaagttaaaaacaacctcaggctgctctgtctctatggagtagccattcttttgtttctttacattcttaataaagttgctttcactctaaaacaaacaagagaaaccctcaaaaacctcatactgagacacactggaattttgtactataatatctttcctgctaggcagctgtgtgacactgaacaagccacttagagaaagggctagatctggtcgaactgctgaatgcttactgtgtgccaggcactgtgctgggcacagcttgttttgttaaactggttaatgttcaatcttcacaaaaaatcaatgagacaggcatttccatcattatttaacagataaggacaccaaacctaaagtgacagaactcaaggtcgcatccctctttctgattcctatctttccatcaccttttctttcagtgagctgtaacataccagaaaccaaaagaactgcccgactacaacccagactcgaactatactgggttgctttactgtcttgacacttaagtgttactagtaataatactatgttgctactatatggcttcagaacttcagttttaccagcaatttcattttccccgctatacgtagttaatctggtcacgtgtgataagtctgagcttccaacttgtaagctgttactttgtttgtaccacaggctttcctgcagggagaggaaggcatgtcccccaaactttgtaggttcaggagactcatctagcgcaggagttctccatgcttgagatcaaatgggccattatcccatgactccaacactttctagctttgtcgtttccatgacccagagaaactggaggaccagctctggattctcggaacatctacagcctcagcgcccacgccgggtggttaggggcgcgttacccgccagggtcctgcctgcaccctgggcttcggcaggggtcagatatccggggtcgtggggcgggggacggggcgggtgaggtgcgcactgccgagcgccctgggcacgcacgcttacccgccaggccaggtccagatcgaaatcccgggcgcgcaggaaccgcagcaggaaggagtcggtgagcggcagcggcgcgagcgggacgccagcttcccgggcccggcgccgcagcgccgccaggcccggctgcagcaacggagagtggtccggtagcgcgttgagctgcggccccgccgagggctgggatcgcgcctctgccatgcccgccgccgctgctgcggccgcagctacccgggcacccgggaaaagcgcgcgccccgcgccaccctcggccccgcctctgcggccgctgcccgtcgcacaaccactctccagcctggcagggcggtctccggcctcgcacgccggacccgcggcgagcagagctgcctcttaaaggaaaccgcacagtgtccccacgggtgctagccacctgtttagcagctttagttagggaccccagctttttcccagcgagggaagccactgatgttcaaacaccgaggaaacgatgtcaaagttagttgggatgatttttacgatctactagagaatctttttttttttctttttccttcctccctctctcttccttccattcttccttccttcttgcaatcttggagctgaaaggagccttagaacgagcctttaatggccagtggccgacgcgctactgagccctctcccttctccttccatcagattccagactgatgacccctcgcctcgcactggattacagcatgcattctaaaacacgcattccataatgcctccttggcagcctcaccgcttttctcccttcctcccgattcgggaaaacttctctaatcctggcaccggcccctgttactgacacaaataaatgactagcgcgtaccctgacccccttccgcaccaatatttatatatttatattttttattaatttattatttacttatttagagacagggtctcactgtcgcccaggctggagtgcagcagtctgatcaaggctcacagcagcctccaactcctgggctcaagtgatcctcccgcctgggcctcccaaagttttgggattacaggcctgagccaccatgactggcctccatatatttttagcaccataaacttactctgttacactccaccatcactaaactttaagcatgtctactcgctaaaatggacagtccaaagctgttatatgattgagtctatgaaagcctggggaatgaagatgaagtagggaaataatgtggaaacttgaaaggctgttccgttgtccttttcttgatttctccatattggaactagcctagaattgttttgtcttcccaagagagaatccatgaaaccgtttcttattaaatgcatactatgctccaggtaaatgctggacttggagaaaaacaaattaaaccaaatctttgcttttaaggagctcagagggtggagaaagagactgccatttcattcattaaagaaagagtgattgggtggttactgtgtccagaccctattctaggtactgagggcactcctgtgaacaaaatagacacaactcttgctttcaaggagttttcattcttttgggggagggaatggatgattaacaagataaatcagtaaataatgtgatataagaaatggcagtcaatgctatggggaaacgaagccaaaaagtgggcagcacctacagtgacgttggaataaacacctgagtgaggtgagcgagcttggcccaggggtatctgggactggaaggctgtgggctttggcttctgttctgagggagatgggaagcattagagtaaataatcccaatccaaccagaaagcaactatacctggggacaaaagattcctagctttggcttatactcagagtgagacggaagctatttgagtaaaggtttacaagtcaatgtgacaagtgtacaaaacaggtttggagaccatggtgtgagaacacagaggaacactaccgacactgcctaagagatttggaaaggcctcacaaaggggctgtttgcacggccttagtgaatgcactgggaatgtttgccaaccaaaggagagagggggaaggaagaaagtactagtcaagaggggctgactgtgcaaggcctttctggaagctccgaagaattaaaagacaatggtagcctttcttctctagaagttttaagtgtctaaaaataataagagagggcctatagagcatgttttcctcccttccaaaagatttttttcaatgctctctcc

SEQ ID NO: 588010 - DNA, 4001 bp, Homo sapiens
gtaccctgaccaccttgggcacctgccatcaggacctccagaggctgtgtcaccagtgcatccttaacactggcaaaaaaaaaaaaattgattaaggtcagtcttaaaatactttggggttcacacccttcaaatgaaaattggcgtggtcctagggatcgtcctaggagataaaacatcacaatttccatggagttcttcatcatcttttattgccctttgctttggtaatccacaaaaaaaactgtctactttttcttcactcttctacctttctcgtgaactcctaaatctaaaactcttggaatatggtatacaaataccaagtgctaaaaaaaatcattaatttatatttgtaaatacaatttcagtttaacagtggttctctaaatcccttagcagaacttcaccaataatttcatatgacctactttcatgttaaaatttaaaagctgaagagaggtacattagttaaaattgaacacacaatatttgtttcagactaagaataaagagaaagggaaacaatcactctgcatatgagggtattttttcactgtctctacccagctattaaaattttgttaatatcttaaacccaattcagattttgagccctgtgtaggtgtacaacttaaccaggaaaaactatcttcaattatgtaagcagataactctcaccaaaatggtccacaattagaaaccctagtcacattcccgaaataactatttttgctgaagcagctagatcaactatccatgatggataattagaacttacaaacactccacctactttaaatacaaccagtcacttcaaatctcaaccttttcaaagttaatggtggattaagattgaaatcagattgaatgaacttcagaaataaatccacataaaataaatggcaggttattttcacaagtatacactgagttcaacgtaaagtaaacatacaggataacttaaaacacactctcaatatgttctgttgtacttgcacaaaataaaaaatgcaagcttattctcacaagtatacaccgagttcaacataaacaaaaataaacatacagtgtaacttaaaacacactctgcacaggttctgttgcttcttgaaatgggtaatgaagggagcagagtaagaaaataaggaaaacatatttcctgcaggcttataaatacttccaaagggtattttcacatccaacacaccccttttagtggcaccattgctctaagctgggcttccagctgggaataaaggcgccctgggtctgaaaggtgtgaggtgctcagaagcagtcaagaacacgctttgccgtcgtttttcaagtcagaaccctgctaactccacgtcccggaaacgccccagggcctcccaccctcgcggctcccgccccagcgccggcatcgcccacgccggcgaccaggctgcctagcaacacggcagggctgcctggcaacgcggcccaccctggcccgcccccgcccacaggggaaggccaaggggatccattctacctcctttttcttctgtcctcccccgagctggatgcagagcagcagcagcaggagaaggaagggaaagctcccggtgggcaggtaccgcagccgccgccccgcttgcctacggcgtgaaggagcgccccgggcccccatcgcggcagggcagtgtctcctccacgcgcggtagccgtgcgcgcccagctcctaccgcgcaccacgcctgcccggccagcctccgggagcccgctggctgggccctccgggatggcagcggctttgcgagggacccgggccgcggccgaggacgcagaggaggagactgacagagcatccggttcaccgggagaagacctggaaaggcgcgggatgggggcaggaagtgggcgtggcgagggagccaggcttcgggggcgcggcgtgcgctcccgcccggagcttgcctttcccggaccagcgctgaggagaggagtggtcctttggccctgggacctcaatctgaggccatcctgctactgaacccaattactgggtagtccagcactttacctggggcctagcacagaaagacctgaatgccttcttggatgatgaaggggaagctttggggaatgacaacctggcccctgcggtccccagcaatctctattcccattgagatcattattaggaacacagctcttctccttcagagccctgggaaaccatctaactccagagtcccccgatgcacagaagccgccccacaacttcacaactgttccttccagccccactggaaggcctgaggcacaacctagactccacttcattcaatgactcattcagcatccatggagtgcataagtacagagcaccgtactagctacttttaatataaaaacgaatagacttacttcaatttctattctatgaatattttaagaaccatagcagactggacatggtggctcatgcctgtaatcccagcactttgggaggctgaggcaggtggctcacctgaggtcaggagttcaagaccagcctgccgtaacatggggaaaccccatttctactaaaaatacaaaaagtagccgggcatggtggagcgccttgcagttcctctacttgggaggctgaggcaggagaatggcataaacccgggaggcagaggttgcagtgagccgagatcactccactgcactccagcctgggagacagaatgagactctgtctcaaaaaaaaaaaaaaaaaaaaaaaaagaaccatagcagcagactgtatgttgaacgtttgatatgggcctgatccgttctaatgcatcatggtttttattactctagtatctagagatttcttcacttgtgccatgaacacctttggtaatgtgataaaacctgtagacgccttcttaaaatagcacatatttctaaacgcatgaaattaaatacatagtattagccaggcacggtggctcacacctgtaaacccaatgctttgggagacctatgcaggaggcttgtgtccaagagttggagagcagcctgggcaagatagtgagaccttgtctttacgaaaaaaaaaaaaattaacagctgggtatggtggggagtacttgtagtcctagctattccaagactgaggctggaaggatcactagagcccaggagtttgaggttacagtgagttccgatcatgctacagcactccagcctgggagacagagcaaaaccctgtctccaaaaatatatacagaatataaaaatattatatatataatacttaaggaatatatacgtataattgttcaagatatctgcaacaacttactgagtatgaaaataatttctgtaggaaacaaagttgtaggtactgataatactactgtggtttgttgcctgcctttataattcaaagaaacgaaactgttgtgaggttaatagacataaagttacgattttttcaatacaaagttcacagatgctgaaatttcatggactccagattaagaacgcttgctccacaacaaccctatcaactaggttccactgttaacgattttcagataaagaaattaaggcccagaaaaaatttgaacattgacagtctggctctacagtcatgcttatgctacgatgcctttgttaaaggagtttacaaatatatatcacttttctgtatcgcaagcttttgatttcccactattatgtgaacattttgcctgaattatcactcctgttaaaaactttagacaaaataaactttacaccttatttcagcaaacaacaattcataaatctgcagcactctgaaccagaagtgttcagaaagctcagctccagtggcctgagagcaagcttcaatagactaaacataaaaacaaagtaaggaaattacctaattggctacagctacgtttgccttatttggtcatggtgtaataaggcatttacctatatggctgtggtctgatgggaggtccctagttgtataaccagtcatcctgttggctgtttgtgat

SEQ ID NO: 588011 - DNA, 4001 bp, Homo sapiens
agcaagactgcgtctcaaaaaaaaaaaaaaaaaaaactagtagatgggaacggtggctcacccctgtaatccagcactttgggaggctgaggcgggtggatcacctgaggtgaggagggtgcagtgagccaagatcatgccactgcactccagcctgggcaatgcagcgagactccatctcaaaaaaaaaaaaaaaatacagactccctatgtacaatatgctaataatttatcagtaatctttataatttatattcaacttccaaaacaactaaaagtgattaacaaaaagtatttgccattaatatcatctaacctttggtcttttcaaaatattaacatacactcatgtatagtgttatgaaaaaattgtgtttaataatgcaacccacaaaaggaaaatgaaaagtattaaattaaaatgcattattttattactaaattttcaaaaatctataagaggtcctaagcacaactgttataaagatatggccccgttaacgagcacagattagatttcagcaagcacagtaaagtcataacactaaaattccacttttaaaacaatccttgccttactagctagctgacccaagtatgtatactaccccaacactagaactgctaaagatcttaaaacctatgacacctatatgtaataaagatgtaaaagacaccacttaattaaaatgtatgcagaatgtatcctgaggtattactctaaagcaacaattacaacatatattcaaagccttccatttcagtacatatagatttgaaaattcattttattatgcaatgatggcataaactattaaatcacactgctctatactcttgtttcaacgaagactaggaaaaggcagatcaggccgagcgcggtggctcacacctgtaattccagcactctgggaggccgaagtgggcggatcacctgaggtcaggagttcgagaccagtctggccaacatgacaaaaccccgtctctactaaaaatacaaaaattagccgggcctggtggcacgcgcctgtaatcccagctacttgggaggctgaggcaggagaatcacttgaacctgggaggtggaggttgcagtgagccgagatcacaccactgcattccaactgggcaacagggtgagcctctgactcaaaaaaaaaaaaaaaaagaaaagaaaagaaaaaggcagatcacacgggttaacatttttaaatgtaaactaaagcttaacgtttttaacatttctgaaatggtctaatgtctaaaacctcaacgttaatacttgtgtgctcacaggaaaccaaacattgtattcagtaggaaagaggagttgaacagcttatctaagaaaccacttgttcttcaattagctttcatcttgctctggtcttttattttgtttgcactgcagttttcctcataaataataaaaagatcacacgtattcagtcaggtaagaaagatcctctcgctcttattttaaggagcaatcgtcctctactccccaacccatgtcaaggagagtccaaaggaatgggacccctactctgatccaggacacctcttggcctgacccatcttcggtgccggttggcctgacccatcttcggtgccggaggttgacacccgcccaccttgggcctcctcgcctccctcccgtagagccttcagcctacaactcggacccgcgcccgccggaacctacgggggcgcccgcgcgggagccaccccgcccccagcccgccggcgcgcggccgacgcgcgagcacgacccgccaacccgacggccgccggggcctcggcgccggtcccacccggtcccaggctacgctctgcggagagcgcggcattcgagacagcgcactcgggcttctcccgcacggtcagcgctcgggcgccagcagcagacggaggggcagagccgggtcggagcggaaaatcacgcagcccggcccgggaaccgacctgtggagaccgccatcttctcctgcagcccgacgcagccgcccgcacgcacgcacgaaccgtcgcgcgtcacttccgggagcgcgccgccctgcacgcgtcacagcggactccgcccccggcgggcgcggggcgacccgagggacagcgcgcacgtgggccgaggggtcgcggggcctcgctgctgtttccgcaattcccttgtgaatcccgctctcaaaatgaaacgctaaagaataagttcatgagggccgggcgcggtggctcacgtctgtaatcccagcactttgggaggccgaggcgatcggatcacccgaggtcaggagttcgaaaccagcctggccaacatggcgaaaccccgtctctactaaaaatacaaaaattagccggacgtggtggcgcgcgcctgtaatcccagctatttgggaggctgaggcacgagaatcgtttgaaccggggaggcggaggggcaatgagccgcgattgcgccactgcactccagcctggacaacagagcgagactccgcctcaaaaaaataaataaaaataagtgggcattgacagatttgcgttgataaacgattcaaaagagttggacaataaatttgaacagctagggatgctgaggtgggagggtcacgtgagcccaagaggtgaggctgcagtgagcagaaatcgctgcactccagcctgggcaacagagggagactccatttcaaaaaaaaaaaagaaagaaagaaaaaggaaagtaatacaggctgggcgccgaagctcacttctgtaatcctaacactttgggaggctgaggcaggaggatggcttgaacccaagactttgagaccagcttggacaacatagtgatacctagtctctacataaaactgaaaaaaaaaaaaaaaaaagatttttcacatcccttgtaggttgtattcctaggtatttttattctctttgtagcaattgtgaatgggagttcactcatgatttggctctctgtttgtctgttattagtgtataggaatgcttgtgatttttgcacattgattttgtatcctgagactttgctgaagttgcttgtcagcttaagaagatttggggctgagactatggggttttctaaatatacaatcatgtcatctgcaaacagagacaatttgacttcctcttttcctaattgaataccctttatttctttctcttgcctgattgccctggccagaacttccaatactatgttgaataggagtggtgagagagggcatctttgtcttgtgccggctttcaaagggaatgcttttggccgggcatggatcccagcactttgggaggcggaggcgggcggatcacgaggtcagaagatcaagaccatcttggctaacacagtgaaaccctgtctctactaaaaaaaaaaaaatacaaaaaattagccaggcatggtggcaggcccctgtagtcccagctactcgggaggctgaggcaggagaatggcgtgaacccgggagttggagcttgcagtgaaccgagatggcgacactgcactccaccccagcctaggggacagagcgagactccatctcaaaataaaaaaaaataaaaaataaaaagaatccttcattccagttttcgcccattcagtatgatattggctgtgggtttgtcgtaaatagctcttattattttgagatacattccatcaatgcctagtttattgagagtttttagcatgaagggctgttgaattttgtcgaagccttttctgcatctattgagataatcatgtggtttttgtcattggttctgtttatgtgatggattacatttattgatttgcatatgttgaagcagccttgcatcccagggatgaagccgacttgatcttggtggataagcttttttgatgtgctgctggattcggtttgccagtattttattgagtattttcgcatcaatgttcatcaggggtattgagcccacgtagccaaggcaatcgtaagcaaaaggaacaaagctggaggcatcacactacctacctgact

SEQ ID NO: 588012 - DNA, 4001 bp, Homo sapiens
gagccaagatcgccccattgcactccagcctgggcaacaagagcgaaactccatctcaaaaaagaaaaaagacaccatgtaaagttcaagttcaagattaccaacctctctcttacaaacaaatctgccttttccagatactaaatctaacgagatgacacactacgttctcttgtcaaatacaagtgttgtggattttaatcttaatgtttagcctcaaataatgttttaatcttaatacagataataatcttaaacttgtcataaaaaatgttttaatcttaacacagataaaaatctttaagtggtaatgtagcctattgcatctactgttcaactagcattccactgttccttttttggcctcaaatgacgaaacttctccaacgtctctggggagactagtgtaaagtataatgtttcctgaaattgttcctgttttttccctgcaccattcgtgatatctcttcaactagaaatgttacataaaacttttctgttctgcaggcaagtccagagggagaagcaaggtaaagagaatattgtaaggaaaacaggttgaaaggggaataacataaaagcacaggagtaaatgtgaagcaaagctatatttgtacaaaagaggaagaagatgcagaaaagggaagaaaaacacttttagcagagtaaagaaaaaaaaatggaggaggaacagagacttgcttcttccagaaacaaaagcaaaaaacacttctaagaaaatgtggtctctttacccaaggggatattatgaaaacgctaaagggtactcagctgacactcctattgagcgttctactttctcttccaatgcctttgataccgctagtcttcacctgtgaattaaatgcaggctacagataacgcactcaatccctgcacaactacaattgtggttgccatctttgcctggaaacaaaaaacaaaaaaacccacaactccctagattcgggaaaaaggagtaaattaagttggaaagccagaaaaccacgccttgctaagtcggggggatatggcacaggttaacaaacgcctcctaccaaactaaggttccactaaaggtctgggaataagggcaaagagatgtatagccttatcgcgaccgcaagggtggggccttgcagtgggaaacaaaatagaaggcaagctatcccgagaggtttaagggggctgaggactcggctctcgggagatcgcccatcaggcggtggacacggggcagcttcgagaggaaggagacagtggactgctggaggaatgtccgcgagaataccgaggctgatggaaatagaagatacccacgggcacaggattaagagtcaaagggaagaagagagggacggggccgagcagtctggggggcccggcgtgggaggccggagcagaggccgctaagcgccgtccgcagccagccgccttctccggagacgcattctcggctcccgcacactcagccccccgccgcccctgccccggcaacaaccgcgggcgcagctgtttccgtcgggccagggacagcgggggtaaaggcaaccctggggctggcgggcagcagactggcagcgcccgtgtgtgtgtgcggggagccgattctgagaccgccaacgccagactttgccctttcttccccaaccctcctttatcacccaacttcccggccggctggtgtccgcttcgaccgacggataccgcaccccccacaacgcctctcgccgcctcttacccctcccccgacgccctgagctgagggaaaacaggccacccggaccgatcccgaacccgcccgggtgtccccgaatcgcggacgccacccccgcccgaacgctggcactctctcggcggctccctggcccgcccagatgcagcaaactcctctcacctgcattgacgccatgatggaaccatccccccaagaccggcgaggccagagacgcagggggaggagctgccgtgctcgcgtcacgccgcgggggctcaacatcccgggcgcgggggcggggtctgcgatgggaaggggatggagcgaggggattggctggcgcgcagggcggacgggaggaggggctacggggcggggcgagggcgcggtaaatggcgctctgagtactttctgtctcagtccggctggccgctcacgcgtcgggcccccatttactctcgttactgaggagacacggctccagttttgacccgactacggttgttttcttcgtgtgtaccgcgaaatgctgatgacgtccggttccgcgcagtttttttcctatttcgtttccaaccacagttgtgcggttcacagatttttcccttgggatgtgttttccatacctccaagcccactctcagagccttggggccccataaaacttcatgcgcagctgctttctggtatttgcagacctggaaggcttctcgtattcttaatttggggaagagagacataggtttccttgtacaacgggatgaggatttaagagcagaacgacactgatattttaaaggcgagggtatttagatttgtggagctgaaacttgcctgaaaagggagacaaaatttggaagtttgttgtgtgcagtttctgccccttacccccgcccttcacttttaaactgcgcatatatcaacaatagttacggttgttgcagcagtctaaatttgattatcagaattgaccctaggcatgaatttttttttaaatataccaatgtcgtgttatatacacttataccattatgtccagacttctcttaagcatagttcgtggtgggcagttttgtggtcatttagggatgaacttgggtagggaaagctgagcatacataatttattttaggaatgcaccagttctgccaacatttatcagaagtcacgtttttaaaaagctattctggaactgaagatgtcattggtttataagaggaaaatggaagccaaaagcttacacctcatgctctatctttaaaaattaaggtggcagacacaatgagtagaaggcttttatgttaccagaatgaaggcttaaaatctgtcattttattgactcggctttctttttagaaatttctttaagatataaaagcaatgtggaatatcactctttcacactcttaaaatagattacgttctctggaacttctctaatctgaaatgtgttcaaaaaggaaaaagatctttaaaatacgccagttagtctatggtataatattaaacactattcatcactagagaagttatggtggtataccctcccctttctcagatgtccaccttaatgccagaaatgagcggagtttccctttgttgtgcaaaatgactgtgtccttgagggatgtttggatgctcttggtaaaccggaatcagccagaagcatatccggtgttagccttgttgtgtcatcaacattacaacagtgaggaaacccacatattccaatgaaagaggaaaacttaaagaagaagtttccagtgtattttctttgagatatatttattcctatgacctcagaagatcagcttttaccgtccaaggttcactttgcctaaaagctgattgttcctgtggaaacagtagcatcggatgaccctacaaacaaagcattatgacatcatcagagccaacaacctggcatgacagatactaataaggaaaaaagaggttacaagaattctgacactcatcacagtggatccaatatctggtcccttgggtttcatatatgttagaagtatcttctcaggagggaaaagtcaatgccagtcatatcctttctaggtaatactaaatagcacataataacctgtcttcttttttttttctttttctttgagacggagtctcagtctcacccaggctggagtgcaatggcgcgatcttggctcactgcaacttctgcctcccaggttcaagtgattcgagtaggtgggattacaggcgcacaccgccacgctctgctaattttttgtaatttttttgtatattttgtaga

SEQ ID NO: 588013 - DNA, 4001 bp, Homo sapiens
ggatttaaaagctgtctgctccacttgaggcggttagatacactgacacaagaggccagtatctcagcagcaagttaggcctcttcctccctctgggaagcgcatgacaaacagggcatcatgcaacttaagtcacccggtcacttagcaaaaattctatgtaacttctaaacttgggaccagatggccttctatacgcaaaagaaatgtagagagcagtgaagtactgggagagaggaagacttaaaatgctccactttgtgatcctgtaaacatttagcccatcattagatctgagtcttagattctaagacatgctttaatggaggcctccctcaacctcctgagtctgttttccaacagtgaaggaacttttcctgccttatctcagttccctgagagcatgcggcactgcaattcaatatcctaaactggcaaggaacggtggcggaagaaaaggagaaatccaaaccaaaacagcctataaaagacaaaacataaaataaaatcataattcatcctccgcccatagcaaacccaacccagaaatttacagcgtgttaagaaaagcagcattgcgaactgcaaacgtaagagttttcctttgacactctacgcacggttttcagctgtcaaattacaactcaggaaaacactatcattagaatagaaaaggaaacaaaaaagctcgcaccacaggggctagtagcaggagctgccagcaccatttcaggaggagagtaaagggaatccaatgcacttccccacccccgcttgaatccatcccctcccggggcaggcaaacctcactgcaggggctcaaatttaataataataacaataatcatggcgcttcctccctcactccctcccccaactatcaccttccccccaccccccgcccgctcccagcaatctgccgggaatcggcttctctccccaacccgaccccgggatccccaggtccagaccaccccaccggacacagctgccgggggcccgggacaagcccagcccagcccaccccggggcccctggccccgcttctcctcttccctctctttttacctccaccatcccccatccgcattgtctgtctcaattcaactttgactaatatggattcctcgggccttggccgggcagtaattaccgcctgccccccgggagccagaaaccacccccccatctccgccgagttcaacgccgctccttgcgggagggggaagggggtttacagagcgctctccagtctacaccgcgagtcccgtctacaccgcgctccccccgcggccccctgcccccgggatgagaagtttgccccggaaggagcctagcaggaggcagtaaggacccccgcaccccaccccagctggccggccggcgcgtaaacacccgcacccgcccggcacggcccgtgggggaggggagggagggaagggcgcccctccccccgcgcccgccgacccgccagccctattacctgtcattgagctggtcctcggtgcccggcagcgggtgaaccacgaaatggatggacgtcatggtgctttccttctcgtcctccactcgagggcggccccctcccgctctcgcccgccccccagccctctacccctccccaaaacccacagccgccgccgcctcccagtccccaaatggagggaagcaaatacgcaggggccgccgccgcctccctgccgggcgtgtgtccgcggcccggaggggcgggcaggagggcgaatccacacgccacccgctcccccggcgacagcgcggagtgcgaggcaggcggccgggaccaggggcgcgccgccggccagcggcagacgggcgttgggagaggggcggccgggggaggagaggggcggctgctggctgcgggctacggggacggtctggtcccggcggcggacggggtccggactaggggaggtgaggaaggaggggaaggagatgagcccgcaccgcgcgtcactagcgagaagctgccgccgccatcttcacttctgccccagtttctccgtctcgcaggctccgctccggagcggcgggggaggggcaaacgggaggaggaggagggaggagaccggcgggcgggggcgcggcggcgagaggcggggctccgggaaacgggcggcaaggccccctcgattgggctgctcaacgttgtcgggccacgacgctgtaaggcgcgtgccgattggtccgttcggctcccgagcccagccccgccgggggtgggatgtctccagagtgagtgttccggagagcacgtgttagggaaggaggaggctgcgggctaacctgccgggagggagggtaagtgtgtgtcccagaggaggcgaggaggaagaggggctcttgtgttctttcgctcggattcccctggggcagccctaattatttggcggatccttaggggtttcttgttgcttctcatccttcatccgcagttgtatttatggtgaagttggtaaaatcagttaaggggcaagacatatacagccttttattggaaaagtaaggaaattatgtaagggcctttccagaaggagatagtaggatcctggagttggctttgcagcaacttctattacctcggtctccccagtttcctcaccaccatcacatgcccaaagacaaaatgtggaaatttccactaatttcctgatataaatgattcgtgattttttattacttttaaatgaaagatgataaacctgttctacaaaggagttcaatttatgatcagtggaatcagaacggaaaattattattttttttttttttttccccgagacggagtttcgctcttgttgcccaggctggagtgcaatggcgcggtctcggctcacctcaacctccgcctcccgggttcaagcgattttcctgtctcagtctatggagtagctgggattacaggcatgtgtcaccacgtccggctaattttgtatttcttttttagtagagatgtggtttcaccatgttggccaggctggtctcgaactcctgacctcaggtgatccacccgcctcggcctcccaaagtgctgggattacaggcctgagccaccacgcctggccgagataggatcttttataccgagtttctactataagacactttcagagttttggccacggcgcacagtggctcacgcctgtaatcccagcactttggaaggccgaggatgtcggatcacctgaggttgggagttcgagaccagcctagccaacttggtgaaaccccatctctactaaaaatgcaaaaattagccaggcatggctgtgcgcgcctgtaaaccccactactcaggaagctgaggcagaagacttgcttgaacctggcaagttgcagtgagctgagatcatgccactgcactccagcccgggcaacagaacgagactccatctcaaaaaaaaattttttttaatcaaataagtctgtttttttttccctaaggaaccaattcatgactttcttctcaaaggtttctatgacctcctttaaaaaataaagtacctcttcgaaggcaaaaactgagaacatgacattccttctacagaggtggtctgttaatgaattacacacacacacacacagttttgcttaggaagttcttctgagcaaaatttatgaaaaaatacttacaaatcaggacagacctggtaccctcaaggcagataatggaacacttttgtaggttaccagctcaaccattggcccagattagtttagactaaaaagtgatttcaaggtcactattagatgtccctgggagccctgaggaaggaaggtagaccagtagacactgctagatttcaagccaaacagatctaaaaaaaattttttttttttgagacggagtctttgctctgtcgcccaggctggagtgcaatggcacgatcttggctcactgccacctccgcctcctgggttcaagtgattctcctgcctcagcctcccgagtagctgggattacaggcgctgccaccatg

SEQ ID NO: 588014 - DNA, 4001 bp, Homo sapiens
cttgatacaccaaatcacattcataaagaaatcagttatcttcctactgccctaacctacaacaagtagacaggagatgaaaaaaaaaatccccatcataacttagggtggaaatgaaggcattctcacaattagcaacatctaccagagtatctccaaacattaatcgtactttgatccactggattaagactgcaaacaatttgccaagaatcaggtggtcattaagcaagctgttctcacttttcacataaaaagaagaaatggatttaaattagggaaaggacattaagttacacactctattaactttaatgatattagaattgactagccagggaaagttatagcatctttctcctgaggaaaaaggaatcaaatatttgcccagcaacaactgagccaggataatgtaggaattttgcataggccctttataacattatttaatccttacaccaccaccagcaccctgaccttcctcagtttacaaatgaagacacaggatcagacaggttaagacatttctcctaagttcacaaaactactaagtagcaggactaagaggcaaaccaaaattggtgggactactaactccatgctgcctcttagtgatgtgggtttataataggaaagatgaggtacacaatagcttcctatcccttgatactgtttactactactgaaccaactatgggagctggaactattctacattaagttcacctcctaatgttacactgatctctccagcctccaaattcttcgctttatgcactgcttattttggcacccaatcatactccatcttaaaatgttatgctaagtattcataccctatttctccgaagaaatctgtaggcttccaaaaggtagaactgtcttttacacttacatacctacccatcaatagagttcagcaccgactaaggatttgatgtccttatttccacattcgcaaagctcagcagtatgttacaatggatggtggtttgttcacattagaatgaagtgtggttgtaaagtaatacagtaaaactgttctaccaagattctccttagtatctccttactgatatttacttgtcaaatttttatcaataatcttataatgagacacaaaaacgcctaaaatgagaaaagtggcgttagtatctgataaaacgggatttggtgcgctactatttagctaactaatactagtgtcctacacaacattacgaaattttatttcccagtttcttcagtgcaatgttttaaagaccacagcttagacaactaggctgtatgggcatagagtgcatcgctttccttcacccctttaaaagaaaaacctacctgataaaatggaaccatttttatatttaagtaagcaagtcagaaatagcatccaagacaaaaaagaacaaatcacgtatcattactgttcaggtgactgtctacttccctgcggccacagtaacctttcttctggagtaagtctcaagaaggaagcatcaacccgtgaaccgaccaactgaccccgcaaaatgtcattctaaacgaatagctatttttacatcatacgtggggtggaagggagacaaagcaccagcgctggaggcttgggcacttgtgttcacgaccaccacagtgtcaagacccgacatcgggagaccgggcgccggattctatccccagacggggtcggggaaaggctccgccgaggccagaggtggcctccaactcgcaccagcccgcgccgtcaccagcccgcgtccaccgccgcgctccctcccccggctcctcgcctcacctgcaaatcccgcgcgctcggaggccgcggcccggaagacctcctctcctgctcgccgggctcagggcctccgccctccgccatcttccgctggctagcggcgcccgctgcggacgcacctgccgcaacttccggggccggttgcctggcaaccgcaggaggggcgaagacgcgcaaggtgcgtgcgcgtccccgctacccgaacccgcgcccccgcttccggtgctggcccacctttttggtttctccttttttcttaaagggagtttctccgcagggaaacctctgttaagttttgtgttgctcctgctactcgcctaaaggcactgtaggccgccctagagggcagcatagacttgcagattcatttagctcaacaatgaaaacatcctctggatttttcatctgatgaaaaattgcaacctctccatctagtcttggtcagattctctgatctttcctatcaaggattggatggtacatcgtcaccacagcgtgaattagcactgagagtgaaaaacaccgtaaaaagtgcttggaataatttgctaaaagcagaactctgccgggcctgtggctcacgcctgtagtcccagcactttgggaggccgaggcggacgaggtgatcgagaccatcctggccaacatggtgaaaccccttctctactaaaaaaaaaaatatatatatatatatatatatatatatatatacacacacatatatatatacacatatatacacacacatatatatatacacatatatatacatatatatacacatatatatatatatatatacacaaaaattagctgggcgtggcggagcgtgcctgtagtccgagctactggggagactgaggcaggagaatcgcttgaatcagggagtcggaggttgcagtgagccgagatcgcgccactgcactccagcctggcgacacagggaggatccgtctcaaaaaagaaaaaaagcagatctcgagactatcaagccctcgtcattcaactgaaattgatttagactctggtcttcttatcctaggcactttttgtttttgagacggagcctcgctctgtcgcccaagctggagtgcagtggcgcgacctcggctcactgcagcctccacctcccgggttcaagcaattctcctgcctcagcctcccgagtagcttggactacaggtgcgtgccgccatgcccggctaacttttgtatttttagtaaagacggggtttcaccatgttggccaggatggtcttgatctcctgacctcatgatctgcccacctcggcctcccaaagtgctgggattacaggcgtgagccactgcgcctggcctcctaggcacttttatgcccaagggatgcaaaggtaaaaagaaatagtcccagtcattatgaaactcagtctagtagggaaaagagacatgtaaacgggtaagatgcagcttgcagtagagctttgcttgggagggttacaaaggaaatgtgagccatgtgaggggaaatactccgttggtatctgctgtgtgcaccatgctaggtgctggagtcgacagcttgccgcccgagctttggcatactgatcgttttgatgtataaaggcatttgaggctgggcgtcgtggctgacgcctgtaatcccaactctttgggaggccgaggcagacggatcacttgaggtcaggagtttcagaccagcctggccaacgtggtgaaatcctgtctctactaaaaatacaaaaattagctgggcgtggtggcgcgtgcctgtagtcccagctacttgggaggctgagacaggtgaattgcttgaacccgggaagcagaggttgcagtgagcagagatgcaccattgcacttcagcctgggtgtcacagagagactccgtcttaaaaacaaaaaacaaaaaacaaaaaaaagcatttgataaacagcaggtgcaagaagagcactctgaccttttcttcctgaaagcaggaaaagaaactaccatgtgatagatgccctccctataccaagaggaaagatactcatcaccagagaaggggagttgaggccgagaaacatctgtacagatattgttaaactaaccagtatcttcctagatactcttccacgattgcctctctttgttcaacctagtatataagcacttaggcctagccacttcttcgggtgtttattttcctgtgaggacacccactta

SEQ ID NO: 588015 - DNA, 4001 bp, Homo sapiens
cccaggtgcaatttatagaacccttgtccctagttctattaaactagacactggtaagtgctgggaatacaaaaacaaattccatttggtctctgccttcaagaagcatatttctggctgggcacggtggctcacacctataatcccagcactctgggtggccgaagtgggtggattgcttgagcctaggagttccagaccagcctgggcaacatggcaaaaccacatctctgcaaaaaaatacaaaaaataagcaaggcatggtggtgtggcccctgtattcctagctactcagaaggctgaggtgggaggatcacttgagccgggaagtccaggctacagtaagccatgaccgtgccactgcactgcagcctgggtgactgagcaagaccttgtctcaaaaaataataaatgagcagagtaggggtggatgttgaaaagacaagggaacaggtgaattgcggaaatggtgagtgtgaattcaacatttctgatcctttggataaaggtcttgttatattccaacacagcttgagtgagtgagaagcttcaggacagtctttgtacatttttttaaagcattttattttcatttcttattgcacgcaacatttctaggcatctgactccttgtgagcagggagaaaatgtggagaaagagagggagtacacaaagccaagtttcattatggtctctaactttagaattgaccttaaaaagggagacagacatgtaaactgatcactgaaatgtccaaaaatcaactcatgattctcagcatctccacagtttttctttccatttcccctttaccagtagcactaccaaatacctaggtttgctcagtcccccatgaggcagtcgtccttgaatccttcctttcccttgccccaaacatcaacccataaacaaagcctgttggttgatcctactccgtcaatatcccaattctgtctacatttcatctcctgttattgttctagtccaggccatcatcaccacttgtcaacttccaaagcctgatgtgcctcactgcttccaccatagcttctgtccaaagcattctccatacagaatcgagtgacctttttaaaacttagggaagtcacttaacctccctaaattttagttccctcaactgtaaaatggggattataatagtgcctaccctcctctgattgcagtgcagattaaatgagataataaccagcacctggtgtttggcttataataggtgttcaataaacgtcattatcctgagccaattcctcctcctcctcctcccaactctccttgattcagccacaatggccttcaccttttcctccaacgtgtcacaatctttttgcctaaaatattcctcccctcccccatcccttccctgcccccactggcttttcacgggcgtggccccttatttaaacctagggccgggcgcagtggcgtaggcctgtaatcccagcactttgagaggccgaggcaggaggatctcttgaacccaggagttcgagaccagcctgggcaacatagtgagaccctgtctctaaaaacaaaacaaaaaacttctcagcctaaattctcacaagaccttcatcttatcaacctgtttatttccttttcagtgttcgccaggatgcgaaagcactgtctatgattgcccctgtgctctttgcctctaccctcttacacgtaaaaccatcacacctggagggaaaaggttcctcgaagtgaagtcagctccggaagtgggggggcaggggcgatgcagtctgggagttgtagtcaaagctgctccgaagccacgcagccgaagaggcggtcgttctatgcaacattcctgtgaaaattacccagctgtgactgtcgaagggaaaaagtcacacttacctatatccgggatcccacgccggagctccagacacacaagggggacagcagagaggaagaaaatgccaacaaccccacgtgaagccatggtggcggaagcgcctggtgcaggcggaaagcccgccccttccggccgcgttttccgggaaggaagtggaactcttcttgccgcgggccggctgggagagggtcaataacgtggtaaatactgacggccgtgtcgttattgagggggagctaagccccgtgttttaaagttatagtctgtagccgtgtttcagaagaaaggcaagtcgtcccccaagtcacatgatgtccagaggagcctgggctctagagcggtggctccctggagggtagcagggcaggggctgccccttcggtctttgcagcgtctgtgagaaagcgctttccagagggaaatgaagccgaagaaaaagctgatgctgtgaggaggcagcctgggccccccggccttgtggccgtataggatgaatgtgggctataacaccttccttatctccctaacggttcctggttcctggccccgtccgcagtctctggttcctgcggaaagacaactcgaaagtggggcctggctccaaatacctgccccctaacacgcacgtcctaatgccaggtcctggagacccgctaccccttgttccgccccttttcagttttgcctgcacgcgttattgttaaccttgacttcatagttccatgacctcattgccgtcctataactcaccactgtgcacttctcccaagctactgaggtcctcccaatctacaacatttcgtacttggaaattatctttcctggccaggcgcggtggctcacgcctgtaatctcagcactttgggaggccgaggcgggcggatcacaaggtcaggagttccagaccagcctggcaaatatggtgaaaccccgtctctactaaaaatacaaaaattagccgggtgtggtggcggtcgcctgtaattccagctattcgggaggctgaggcaggagaattgcttgaacccgcatgcggaggttgctttgagccgagtttgcaccactgcactccagcctgggcgacagaatgagaccccgtctcaaaaaaaaaaaaaaaagaaagaaagaaattatatttcctggctaagcgcggtggctcacgcctgtaatcccaacactttgcaagaaaaaagaaaattctttttcctgacccatccatctagcatcccacctgactattcagtttagttcatctgaaatttattgagctccacagtttggtactctacaactcttggatattcaaatatttacaagttactgaatttgtcctcaagaaactcagcttatccgactttgtggttctatggagaagaaaaaaaaaaactgggaaagatagccctgtaagcaaataaacataatgcagttcctgagtgctatgatagagatatacacagggtgttgcagaaccatacccagaaggcttgcaaaaggctttccaaaaggaagtcacgcctacgttgtgttcaaaggttaggaatctgggcaaggatgtccgggaagggtgggatttcaagtttaggaacctgagtgcaaaggaactaccagtgattattgctgcagtttagagcttgaggccgggcgcggtagctcactcctgtattctcagcactttgggaggcggaaggaggcagattgcttcagctcaggagttcgagacccctctgggcaacatagctaaacctgtctaaaaaaaaaaaatagctgcgcgtgatggcgtagcctgtgctcccagctactcaagaggctgaggtgggagaatcacttgagcccaggaggtcaagtctgcagtgagctgagatcatgccagtgcactccagcctgggcgatatagtgagaccctgtctctaaaaataaaataaagctgaatgaaggcttttagaggtagattgttgctagggccgcagaggctttcctttgtatataggctaagaactttatcctccaagcaaaggtgcaaaatattagggcacaatctgaagatcagtaagggtgaggtaatataaattacagcatgacataccataaaataattaattatattgactagtt

SEQ ID NO: 588016 - DNA, 4001 bp, Homo sapiens
acgaatagtaagtggaaactcagacatttagattaacatttagaaaagacccacttttcccataagagtgtattaaaaacaactgagagctgactttgcaatgagacatttgccgtacgtagtaaattaaatggctgaagcttgtgcttcttccagtacgagaaggaactgtggttcatcataacccagggtgtacaatcaccgacgctcatttttaaacctcccctgcttcttacaaagcccgctccattaaaaaaaaaaaaaaaaaaaaaaaaaaacttttcaggaaatgaaatgcaaatgggcaaagaataggatcatacaatggagagcctctatcaacctcttaaaaagaaaatctttctaggcagccggactgcttttaacacgccataagcttttataaaaatgagataacattggttcttttgtgatcgtcctcaaccctttccaccctttcactctccaggctggtcggagcatgttcaggagaccgaacagagcaggtgaagtggtcagctcagctccacctctcccctggcaagtgtaaggcaaatcatttaacggtatcacatattctaagcctgatggatggaacacagagaaggaaaaagggaaagaagggcgggaaggcaaagcttccgatttttttcaaaggtaaagctccggtacttgagctgtgtctgaaactgcctctgatcatcttcaaaacaactccttgggatttatctttaacttgatgctgcctgtcctcgctcaaggtggagctgaaaccagttgcgaaatttccctctgctggagtccagaggatccaagaaaatggggtctaggcttctaagtcggaaagaagcagaggtttccctgcggctcggtggggcccgcgcttccaagccagagtaggcgccgggaagggagaggaggcgcctggtgagcagcctcgggccaagtgctcatcccggctgggcactgcaggcgcggttaaactgggatggtgcacgccgctctcccgagctccagggctggctgggacctcgggctaaggacgcccgaggggtgccaagctaggcgcagagcgaagggacttcagcatgggtgttcctcccctaagggaaaagacaccctctctgttcaagcccaccctacagacactcccatcacctggcccctctccccaggaactctccgacatcgctatgggcgctaactcatgaccaagctcggcttgagaggaagtggagaggagaggggagagcgagattggagtgaagaccgggctactccagtctgcagcaattggggagggcttggaaaatggagcaggcaaggagggtccaggaaaacggtaggggcccgggtcacagccacctgtaggattgcggcagatcgcaaacttgggttggaaggctgtggtcccctcggagtcctccactcggctcccatccggttgggcttggagcgccgaggtgcagggcgcaagttgggaagccaacgccatcggtgcaggtcccgctccgtcaggctggcgcccctgcgccctcgcccccagctgcccgctccgcccagcgcttacctcgggcagccgcggtccctgccgcccagaagcacagccccagccacgggagccagcggcgcgcccctccgccgccgcctgcggtggccgccgctctccccatgctcctcgccgcgttccggagggcggctcttcttcacgctccgggagcccgggaaagggtcggcgatgagggtcccgagtcgaatgggtctcgggagtcttcagagagtgactctgctccacgatcgcttcctaaagcagcggggcagggagctccgagccgccgctgaatgggcaccccgagaaagggcgcgtccccatagcttcccacggcgcggcgaccgctgccgccagcgcggatgccggagtcgcccgcagtccccgccgcgcagttcccagccctcgcgccgctgccgggccccgaactacggagcggaggcgagagtccgcatcgctaatgagacccccgcagccgccccttcccctcccctccgagcggcagccaatgagccgggctggggcggggccgcgggaggggcggtgacgcggcggcgctgggctggggcccgggaggcgcaggtgagccagaggccgctccacgtgcccccggggcgcttcgggccccgcctgcagctcccccccccgctcgcggagagaggaagcgggctgggagtcgggcggcggggatgcggccacgccgcggggagctgagcggagccggctggcctcttggggcgaacgccgcacagatatgtgggcatctcggttgcctaactcagtcacctgcttccaggagacctccgttttgttcatctactttgagcccttctaaagtcctgcctctcctacttccactttttcccattagatcagacatcactcaggaaaacatcctgagaaaaagaaagacttaaaataaatgcgtagtgggaaaaaataataatggagttactccattgctgcaactatgctaacttcattcatataaataaagaagtggggaataacaatcatgggtgcattaaggcttgtataatcgatttttatttttgctttctttttttttcgaattccctattctgttgtcctgaacactccggaatccccaaacttttcagaagctccctcatttcgaatggctcctatttttgtcagttttaatctgagcccaaggaattgccttctggtaagtatcagggaaaggagtgtcgacttaaaaaggaagaaggtgaggcgaaattaatataagtaagagtttatttgggccaagtgtgaggattgcaactcaggagtatagatttaagttgttttgaatatatattttgattagtagtagttataagtggattcttaaaggcaaaaaaaagggggatggggagtggactgatgtaacattgttaggaatttatactgatttattgaaataatgtcgattagtgattagttatatatagttaagtcataggatgtgggttatactgtttgatgtggtattattaggttaatttatagctatttgtagtaatagtatgtagttttaagaaatgaatatatagtttaaaggaaggagtagggcatgattgtggtctcattctaatgtctctctgggcctgacaattaaaaggactttgaaacgcgctggacttttataagaagaaggaaagaagactctttttttttttttttttaagtgtggcttgttttagatagattatcaaatttttatttaactgctttcgaaaatacctcacggttgcctcttccctctgctggaggagtaactttagagagcttgtcctaggtcactcaatttcagagcacacccaggaagttggtggggagtcccaggctccccaattggactacctcattatcgctgccaggatcgagtcctcaaaatggcagcagagctcaccttttgcctggtaatcccccatagaaaagggagccttggtttgaaaggcaaccttcccagcagttcctcactacccacgctcaacatcaagtacttttcaaaaatccatgtctcccgccaatgtgctacctgctcccaaacgcctttctctgaagaataaacagtttaaggtgaggtaattgttctagatgaggtaattgcactaactcactttcttccgaggaaaaggaagataataggcaaaaaagattgattctctgataagcacttttgtgccagccctctcttgagtgccaccagacacgtgaatgtctgtgcaagaagccgattgtttcctccggtcgccttgcggctcaataaaaggtttgggacctagtcaagaaaaccaagctctggggaatggatgcttcaaagcaaagactgatgtggggctggctagggacttgcctggaaatctctttagaatcttggtaaatgagggttttgtccttttctgcttagaaggtgaattgagaattaatctaccaaatatgc

SEQ ID NO: 588017 - DNA, 4001 bp, Homo sapiens
tcataaatagatcacaggaaataattgtaaacttttcatttcaagagagctggagttgtagggaaaagacagtgagatttcagcatagactggcaggtctaaatgaccctcatcctctaaaatttttactcgatattacagttatttcatttggccacattctttaaaaatgtatgtattttggggaggattttgataccattagtcatttaaacattaatatggattcgtaaaagaagtccatttacctcctcctaagcaactaagttccccccaagggaatggatattgaaaaaggatgagaaataggtaattttaaaactgtttggggaacagggctgagcctgatgaagtaacccagcagggtccaagtacagcaggaccgtatctgacattttaggagagacattttacaaaaggagaggtagaacaggtttgtattctcttttaaaattttgtctagggttagcccttaccaaggaaggaaagcaaactctcctttcactcaactctccttgcttgcaaactcagtgcactacagattacgtggctttagcaaatctccttggaaattaagagtcatgtataaaactgctgctagaaaaacaagtatcagtcaacaatctacaaacatacttgtggaagacagattatattcaaccacctatcagtgactataataatattcactaagcacttattgtgcaccaaacactttcctatttgctttaccaacattagctgatttatttacatgtctgttactacagaaggggaagctggcttacagaagtgatcccacccaaggtcagagttagctaatgggagttgagatctggtctatgtagttcccaaacacgcacagaagcagtgtcttgaatttagtaagactccttcaatatctgccaaattaataaaataattatttaaaaagtctcccccacccccaaaaagctcaatgtcaattaggttaacggatgtttctggcaacctgatgtttcctaacagcttcacaattgctgggggcggggagaaaaggatcaacattttttaagctactccaacttggttgcattgcagtgagacgagattgtgccattgcactccagcctgggcgacaaagcaagactccgtctcaaagacaaaacaaacaaacaaacaaaacggctactccaacttgtaccgccagagggcagagattagcaaaaaaaaaaaaaaagaaagaaaaaagaaaaaaagaacctacaataaattcaaatttctccaaacctactgatcaagctgacgctctagataatccaaggtcaacctgaagcgtcgctcgtatcccttgctcaactgtctctgattcgcagtttgagaagcgcgaggggtgcaatgatatttccaattctacttccttgggtcactttgcctcagttatcttatcagcgtaaaagggaaattaatatctccctcgtcgcaatggcaagaaaatttatagggccaatgcacacgatagagcacttgggtcatagaaagcactgagctcattcgggttgaaagtcatccactagttatcctcttgtgccctttaacttttctaaggccaaggggaaggacttccaagcacgggcagctggaactccagggctgtcagagccaccgcgggcaccttcacaaacagcgggttaacatcccaaccctatacaggcaagcccgccctggggacagcaaacgagtggggaagcacatccttttcactggactgaagcagccaatttcccttccgcgacaaacttggccacttacaaagaagagagaaaacggagcaagctgcagcaaaaataaacggtgaagcgcgacgatgccggccaagaagacccccagttacttaccggcctgcttaccagccattttgaccagaaagagaagcgttgccttctgggtaagtcatagaggacaagctgggcccagtccgcaggcgcgttacgtcacatcgcgaacagagaaaggccgcttgcgcaggcgcagttctgacgactgccgttcagcacctgcgtaagcacctctcggccagggtgaggccaatggagtaggcggggcattttgcgtgctacattctaagaagtattggttgtgatgtgatgggaagaacacaggtcaggaattaggagaccaaggcttaaagctgggttctgttatttgctgttaatagctatgggagcgtggacagtattaattcagctctttgtgccaggcaggaagctaaatgttttaagggcatcgtcttactttctattgaaggactgatggatgtgccatcccaaaaatatatggaattggtacattgattatttcgagttgaaaatattggagaaattgtagtttcagaaaaggtttgatgacctatctcttcctgcatgcagcaagccataaagcttcctccaggattcctctggagtacccgtcccttaccagagggagaaaatagcacctatcaccagagacgaaactgggggctgctttggacctgaatatactttccgaagtaaccgttatcttccactaagtttacaccccaacacacacacttttctcctaatgactccgcgagaaatttactgcccctagccagatcccctttcttctgatttgtagttcgtgtaaaaagtataaaggcatcttacattggccacttcactcttttgtgcggatccccatgtacatgtaaaactagtaaaattagtatgcttttctcttgttaatctgccatgtgtcaatttggttcctagattcaaccaaagagcccacataagagcaaaggggagggagggttggaggtgatctctcactcccctaaactatcttttaattctaaaagtactgtaattatctcattgtagagaggagaaagctgaggctcagaaaggttgaataacttgtccaagagcacatgactagaagagtccaggttcttcttccagaatctgaaaatccagatgcaaatttggggctccttaattctagggtcatatgctatactgctacactactaatccaggaaagacaccaagcctttcaggccttgggtttctccagctgaagatctatatctagctattttagtggaaggttaggtcagaaaaggttttgggttttttttgtttgttttttttcacccttttttttgttgttcagcctctgtcacccaggctgaatggcacaatctcggctcactgcaacctctgcctcctgggttcaaatgactcgtgcctcagcctcctgagtagctgggactacaggtgtacacactaccatgcccgctaatttttgtatttttagtagagacggggtttcaccgtgttggccaggctggtatcaaactcttgacctcaagtgatccacccacgtcagcctcccaaaatgctgggttacccgcgtgagccatcatgcccagcagaaaaggtttttaaagattaaatctaagatgtattgcagaatttgcacacaattttaagacaaaagagaagtatatagattttctcacttttaaggtctcaaccccaacatgcgaagtcttaggcataaacatctagagacagaaaacaattagggggagctagcatgactgatagttactggtgaacttctaccattactcagtgatatcttttttttcccctcagttttaagctcagagctgggacaatatagagtagaaccttgtctcatcctaagttcaaaaggttagatttaacgatcttagtcacattccagttctaaaattatattgattttcctttttcttctatctccatgctgtcacaatttcttcattagtcagtcctgtatacagcactaaagctgatgaatgatctatcttacactagccaaagtgaagtctgaaagatgtgaagaaatgcagtacatttgtacattggcacattgccctgcagagggtaggtactcaataaactctcctcccttccaccctttaagttttagcttgctggttacag

SEQ ID NO: 588018 - DNA, 4001 bp, Homo sapiens
caactgacgaatgaaacacaccccaagagaaaataggaaaccgagtcccctgcaataacctcacacgcaaacctacacgtcagtaggtcatattcagaaatacacagtgaatgtcatctaccatgaacacaaacacacagacagtccctccagaggttcggaagactcacgaccccaaaacttgatgtttcccatgtgtgggctcatcctgagatacagccatcactatccagttgtccctgttgtagagacagaaacttggactcctcattactttatgtaggattgacggtgttcgggtttgtttgggggtgtgtgtgtgtgtgtttgcgtgcgtgcttgtgggtgtatttgtgtgtgtgtgtgtgtgcgtgcacccctacgtgtgggtcggcacttccactgagatcactggcacacaagcagagccctcttgctgtgtttgttcttccctttggctctcctggtcctcccttgcagagaagcgagtgtgccagtgttcatggactcctgatctgtccgggtcgtcgaagagaggtttagcagggagctttgctgttcaggatgatggtttttcatcccacacttgtattttgattgatgaatcacaagtgcgttgggaggcagggtaccttcgacttttccgacgttgaactcaggcttcgttttgttttgctcttgcaggaatttccagtggtctaaggtgctttcctgagtggctctttccaccaagtgctcgtccaactcgggtgcctggaggcaggggtggtctctcttgagctctccttgctttgctcgcctgtctgtgtcttcagcgccgagggctcttggttccctgcctcttgacacactctcactgtgtctttcccattcactcttctggatgtaaaagaggacataggcctgttgactcaggacagaaatgatgctacagacagtgacctcggcatcatccattttataccactggacttcttgagctttgacataggagaagtaatgtccgtcgtgacaactccacccagcgtggaccagcacagcatagaggacatagacaagaggtcctgtgttctgctgagacatgtatggctgcatgtcaaggcactcaggatattgcacattcttggcaagtttgttgcctgcgacatcggagaatctcttcaagacaaggatgaggaccttggcagaagtgtgtaaagttaacgtgttggaggccggcgccctctggagacaaagaccgcaatgataggcattctctccattgagttcttcgggcttcaccaactgttccaaagcttgcttgacactctgagctgcctggatatccagggcgatgtccaggtaagggtcaaaagtgtctgaaatcccgtggcagtggagacacttgatttgagatctccagcagcctccaaatatttggtggatgagggtggtgtccttgcagtgatgatctacctgcttgtggccgggaaggcatgcctttttcatggcatccacagtgaacatgagaaattcatggacatcttcctgcttgcctctatggaagccagcagccaatgcctgtgagggctggatgacatggccaggactgtggagggcccatgtgatgtgagcttgcatagtacagagcatgcagcacttgggacgctgacatgtttgagagtgctcccgggacagcatgtagttggcaaggggcagtgtgtatgtcaggcactgcagggaagcgttctcgtagcaggtatttcccatattctggagcccagcccccaccgcagcaggtctcctgctactcagaggaagcttctccctgggagcgagctgtcttgccacaggagccaaatcatcacagaggtcgacacgggtctcagatgagagtggtgacttctcagggagagaagtccgctggatttcagcaaaagctgcatctggccgagaagatgtgagttttgaaaagtggttgaactgccactcacctcccaagtagagtgagtcgtcccccatgtcgcccgcaacaaggatcacaaggtttttctgctgggaccgcaggttgcagcaagacgctatctcttccgagagagtcttcaaatgacgagctctctggccgcatcatcccttatagaactcacccccaccaaccgcgaacaccccacccacccatcaggtgcgcgataaaacaatcaaatatcagcactcaattaaggaatgagtcacagggtgtgtccccttgcatcgctgggaattcaacagacacagcccacatcatgacttctagaacacctgaatcaaattactcctcagggtgataggcacatataatatgagtgtaaccgggtttgggcagtggccgcacagttgccttattttaggtaaaagaatgtcagggaagaaatctttacctatgaaaccctgtgtgtgtctgtgtgtgtgtgtgtgtgtgtgtgtgtgtgtgtgtgtttatgtgtgtgtgtgctcgtgctgggatgaacttccaagtatgtacttttggcagctatcatcatcctctcagcgacagaaggacaagaaatcggaagtgtgctttctgacctgagattagtcaatgaagtatggtatttagcacagcgtatttttttctttaataagaaaggagagatccgtggaatgaaacagagcttccagcgataacctttctacgttcagcctattgattctctgtgcgaatgaaattaccttccagtggagaacaagagaactctttgcctgacatgctcttgtggaagctaggttgccaaataataaagcatcaaatggtagaaatatgcactgaagtttgaagagatactcattgcacaaagtagactgtgaaagactttggggaaatcatgcaatcaccgagagactaattgatgacattccccaaatttatgtgtgccagaaaagagagatggtcctgacattgtatagtgagtggtttcggacgtgcggcggcagtttaagaaaacatgaaacaaaaaccttgagaaatcagaaggtatcccaactataagcttttgtttattaaagaattgaccaaaataaaaacaacttatctcacagcattggtgatactatttccatacgtatgtgataatggatcaacatttcatagatatgaaataaaatgttctaattttgacaaaagcaaacaaggaaaattataccttagaaaagcccaggtgacagtagtgaggccctttctcaagaagaatacatcggagacgtttaaaagcaggcagtgaaatagaagacagcataaagtttttaatacttgcccttgtttcacagggaaaaggcaaaaataagccgtgtatctcctggattctctcatcgattgttcatgatctgagatgttccctccatttccagttatgcattgtatggtggaattgcagttagcacatttggtgcaaaaattgtaatgctgacgaaagtagacctgttccctgaactaagagggacagaatttgggtgtgtctttcggctctctggcttaccaggaatgaaggtcctggctctagtgattttcccaaaatgtcttagacagtaaggaacagggcagaattgaggcccggcgccaaggcctctaggtgtaaagaaacagccctgtcttcagggctcatgaaattaggatgattttaaggatgatgatgtaatgagaggactgtgacctttggccctttttctttcccttgtcttttcatgggccaggtgtgctccatcagaaggcttcctgcacctcatgtaaagtgtcctgggggaagaaagggcactgcttagaaagatgctccacagggagaaaggagccaccattttctggagaatgatccccagaatcatgagcaagccagatgcggtggcttcacacaggttgttggatggtcttatctctttaagcgggacctaggaattggttttctttaatgctcacaactgatttgaggtgagccgaattgatattctgtcttcgtgtcatgctcattgca

SEQ ID NO: 588019 - DNA, 4001 bp, Homo sapiens
cgcccaacaactgacgaatgaaacacaccccaagagaaaataggaaaccgagtcccctgcaataacctcacactcaaacctacacgtcagtaggtcatattcagaaatacacagtgaatgtcatctaccatgaacacaaacacacagacagtctctccagaggttcggaagactcacgaccccaaaacttgatgtttcccatgtgtgggctcatcctgagatgcagccatcactatccagttgtccctgttgtagagacagaaacttggactcctcattactttatgtaggattgacggtgttcgtgtttgtgtgtgtgtgtgtgtttgcgtgcgcgcttgtgggtgtatttgtgcgtgtgtgtgtgtgcgttcacccctacgtgtgggtcggcacttccactgagatcactggcacacaagcagagccctcttgctgtgtttgttcttccctttggatctcctggtcctcccttgcagagaagcgagggtgccagtgttcacggactcctgatctgtccgggtcgtcgaagagaggtttagcagggagctttgctgttcaggatgatggtttttcatcccacacttgtatttcgattgatgaatcacaagtacgttgggaggcagggtaccttcgacttttctgacgttgaactcaggcttcgttttgttttgctcttgggggaatttccagtggtctaaggtgctttcctgagtggctctttccaccaagcgctcgtccaactcgggtgcctggaggcaggggtggtctctcttgagctctccttgcgttgctcgcctgtctgtgtcttcagcgccgagggctcttggttccctgcctcttgacacactctcactgtgtctttcccattcactcttctggatgtaaaagaggacataggcctgttgactcaggacagaagtgatgctacaggcagtgaccttggcatcatccattttataccactggccttcttgagctttgacataagagaagtaatgtccgtcgtgacaactccacccagcgtggaccagcacagcatagaggacatagacaagaggtcctgtgttctgctgagacatgtatggctgcatgtcaaggcactcaggatattgcacattcttggcaagtttgttgcctgtgacatcggagaatctcttcaagacaaggatgaggaccttggcagaagtgtgtaaagttaacgtcttggaggccggcgccctctggagacaaagaccgcaatgataggcattctctccattgagttcttcgggcttcaccaactgttccaaagcttgcttgacactctgagctgcctggatatccagggcgatgtccaggtaagggtcaaaagtgtctgaaatcccgtggcagtggagacacttgatttgagatctccagcagcctccaaatatttggtggatgagggtggtgtccttagagtgatgatctacctgcttgtggccgggaaggcatgcctttttcatggcatccacagtgaacatgagaaattcatgggcatcttcctgcttgcctctatggaagccagcagccaatgcctgtgagggctggatgacatgaccaggactgtggagggcccatgtgatgtgagcttgcatagtacagagcatgcagcacttgggacgctgacatgtttgagagtgctcccgggacagcatgtagttggcaaggggcggtgtgtatgtcaggcactgcagggaagcgttctcgtagcaggtatttcccatattctggagcccagcccccaccgcagcaggtctcctgctactcagaggaagcttcttcctgggagcaagctgtcttgccacaggagccaaatcatcacagaggtcgacacgggcctcagatgagagtggtgacttctcagggagagaagtccgctggatttcagcaaaagctgcatctggccgagaagatgtgagttttgaaaagtggttgaactgccactcacctcccaagtagagtgagtcgtcctccatgtcgcccgcaacaaggatcacaaggtttttctgctgggactgcaggttgcagcaagacgctatctcttccaagagagtcttcaaatgacgagctctctggccgcatcagcccttatataactcacccccaccaaccgcgaacaccccacccacccatcaggtgtgcgataaaccaatcaaatatcagcactcaattaaggaatgagtcacagggtgtgtccccttgcatcgctgggaattcaacagacacagcccacatcatgacttctagaacacctgaatcaaattactcctcagggtgataggcacatataatatgagtgtaaccgggttgggacagtggccacacagttgccttattttaggtaaaagaatgtcagggaagaaatctttacctatgaaaccgtgtgtgtatctctctgtgtgtgtgtgtgtgtgtgtgtgtttgtgtgtgtgtgtgtgtgcttgtgctgggatgaacttccaagtatgtacttttggcagctaccgtcatcctctcatcgacggaaggacaagaagtctgaagtgcgctttctgacctgagaatagtcaatgaagtatagtatttagcacagcgtattttcttccttaataataaaggagatatccgtggcatcaaacagaccttccagggataacctttccacgttcagcctattgactctctatccgagtgaaattactggccagtggagaacaagacaagtctttgcatgaaatgctcttgtggaagctaggctgccaaataataaagcatcaaatggtagaaacatgcactgaagtttgaagagttactcagtgcacaaagtaggctgtgaaagactttggggaaatcatgcaatcaccgagagactaattgatgacattccccaaatttatgtgtgccagaaaagagagatggtcctgacattgtatagtgagtggtttcggacgtgcggcggcagtttaagaaaacttgaaacaaaaaacttgagaaatccaaaggtatcccaactataagcttttgtttattaaagaactgatgaaaataaaaacaacgtatctcacagcatgggtgatactatttccatacttacgtgataatggatcaacatttcatagagatgaaataaaaagttctaattttgacaaaagcaaacaaggaaaattataccgtagaaaagcccgggtgacgggagtgaggccctgtctgaagaagaaaacatcggagacgtttaaaagcagtgagtgaaacagagggtagcataacctttttaatactggctcttgtttcactgggaaatggcaaaaataaaccgtgtatctcctggattctcgcatcggttgttcatgctctgagatgttccctccatttccagttatgcattgtatggtggaattgcagttagcacctttgatgcaaaaattgtaatgctgacgaaagtggacatgttccctgaactaagagggacagcatttgggtgtgtcttcaggctctctggcttaccaggaatgaagatcctggctctagggattttcccaaaatgtcttagacagtaaggaacagggcagaattgaggcccggcgccaaggcctctgggtgtaaagaaacagccctggcttcatggcccatgaaattaggatgattttaaggatggtgatgaaatgagtgggctgtgacctttggccctgtttctttcctttgtcttttcatgggccaggtgtgcttcatcagaaggcttcctatgcccgatgtaaagtgtcctgggggaagaaaggagcactgcttagaaagatgctccacagggagaaaggagccgccattttcagaagaatgttccccagaaacatgagcaatccagatgccgtggcttcacacagggtgttggatggtcttatctctttaagcgggacctaggaattgttgtcctttaatgctcataactgcttttgaggtgagccgaattgatgtcctgcctgcgtgtcatgctcattgcactt

SEQ ID NO: 588020 - DNA, 4001 bp, Homo sapiens
ctgacgaatgaaacataccccaagagaaaataggaaaccgagtcccctgcaataacctcacacgcaaacctacacgtcagtaggtcatattcagaaatacacagtgaatgtcatctaccatgaacacaaacacacagacaatccctccagaggttcggaagactcacgaccccaaaacttgatgtttcccatgtgtgggctcatcctgagatgcagccatcactatccagttgtccctgttgtagagacagaaacttggactcctcattactttatgtaggattgacggtgttcgggtttgtttgggggtgtgtgtgtgtgtgtttgcgtgcgtgcttgtgggtgtatttgtgtgtgtgtgtgtgtgtgcgtgcacccctacgtgtgggtcgacacttccactgagatcactggcacacaagcagagccctcttgctgtgtttgttcttccctttggctctcctggtcctcccttgcagagaagcgagtgtgccagtgttcatggactcctgatctgtccgggtcgtcgaagagaggtttagcagggagctttgctgttcaggatgatggtttttcatcccacacttgtattttgattgatgaatcacaagtgcgttgggaggcagggtaccttcgacttttccgacgttgaactcaggcttcgttttgttttgctcttggaggaatttccagtggtctaaggtgctttcctgagtggctctttccaccaagtgctcgtccaactcgggtgcctggaggcaggggtggtctctcttgagctctccttgctttgctcgcctgtctgtgtcttcagcgccgagggctcttggttccctgcctcttgacacactctcactgtgtctttcccattcactcttctggatgtaaaagaggacataggcctgttgactcaggacagaagtgatgctacagacagtgacctcggcatcatccattttataccactggccttcttgagctttgacataagagaagtaatgtccgtcgtgacaactccacccagcgtggaccagcacagcatagaggacatagacaagaggtcctgtgttctgctgagacatgtatggctgcatgtcaaggcactcaggatattgcacattcttggcaagtttgttgcctgcgacatcggagaatctcttcaagacaaggatgaggaccttggcagaagtgtgtaaagttaacgtgttggaggccggcgccctctggagacaaagaccgcaatgataggcattctctccattgagttcttcgggcttcaccaactgttccaaagcttgcttgacactctgagctgcctggatatccagggcgatgtccaggtaagggtcaaaagtgtctgaaatcccgtggcagtggagacacttgatttgagatctccagcagcctccaaatatttggtggatgagggtggtgtccttagagtgatgatctacctgcttgtggccgggaaggcatgcctttttcatggcatccacagtgaacatgagaaattcatggacatcttcctgcttgcctctatggaagccagaagccaatgcctgtgagggctggatgacatggccaggactgtggagggcccatgtgatgtgagcttgcatagtacagagcatgcagcacttgggacgctgacatgtttgagagtgctcccgggacagcatgtagttggcaaggggcagtgtgtatgtcaggcactgcagggaagcgttctcgtagcaggtatttcccatattctggagcccagcccccaccgcagcaggtctcctgctactcagaggaagcttctccctgggagcgagctgtcttgccacaggagccaaatcatcacagaggtcgacacgggtctcagatgagagtggtgacttctcagggagagaagtccgctggatttcagcaaaagctgcatctggccgagaagatgtgagttttgaaaagtggttgaactgccactcacctcccaagtagagtgagtcatcccccatgtcgcccgcaacaaggatcacaaggtttttctgctgggaccgcaggttgcagcaagacgctatctcttccgagagagtcttcaaatgacgagctctctggccgcatcatcccttatagaactcacccccaccagccgctaacaccccacccacccatcaggtgcgcgataaaacaatcaaatatcagcactcaattaaggaatgagtcacagggtgtgtccccttgcatcgctgggaattcaacagacacagcccacatcatgacttctagaacacctgaatcaaattactcctcagggtgataggcacatataatatgagtgtaaccgggtttgggcagtggccacacagttgccttattttaggtaaaagaatgtcagggaagaaatcttcacctatgaaaccctgtgtgtgtctgtgtgtgtgtgtgtgtgtgtgtgtgtgtgtgtgtgtgtgtatgtgtgtgtgtgctcgtgctgggatgaacttccaagtatgtacttttggcagctatcatcatcctctcagcgacagaaggacaagaaatcggaagtgtgctttctgacctgagattagtcaatgaagtatggtatttagcacagcgtatttttttctttaataagaaaggagagatccgtggaatgaaacagagcttccagcgataacctttctacgttcagcctattgattctctgtgcgaatgaaattaccttccagtggagaacaagagaactctttgcctgacatgctcttgtggaagctaggttgccaaataataaagcatcaaatggtagaaatatgcactgaagtttgaagagatactcattgcacaaagtagactgtgaaagactttggggaaatcatgcaatcaccgagagactaattgatgacattccccaaatttatgtgtgccagaaaagagagatggtcctgacattgtatagtgagtggtttcggacgtgcggcggcagtttaagaaaacatgaaacaaaaaccttgagaaatcagaaggtatcccaactataaccttttgtttattaaagaattgaccaaaataaaaacaacttatcacacagcattggtgatactatttccatacgtatgtgataatggatcaacatttcatagatatgaaataaaatgttctaattttgacaaaagcaaacaaggaaaattataccttagaaaagcccaggtgacagtagtgaggccctttctcaagaagaatacatcggagacgtttaaaagcaggcagtgaaatagaagacagcataaagtttttaatacttgcccttgtttcacagggaaaaggcaaaaataagccgtgtatctcctggattctctcatcgattgttcatgatctgagatgttccctccatttccagttatgcattgtatggtggaattgcagttagcacatttggtgcaaaaattgtaatgctgacgaaagtagacctgttccctgaactaagagggacagaatttgggtgtgtctttcggctctctggcttaccaggaatgaaggtcctggctctagtgattttcccaaaatgtcttagacagtaaggaacagggcagaattgaggcccggcgccaaggcctctaggtgtaaagaaacagccctgtcttcagggctcatgaaattaggatgattttaaggatgatgatgtaatgagaggactgtgacctttggccctttttctttcccttgtcttttcatgggccaggtgtgctccatcagaaggcttcctgcacctcatgtaaagtgtcctgggggaagaaagggcactgcttagaaagatgctccacagggagaaaggagccaccattttctggagaatgatccccagaatcatgagcaagccagatgcggtggcttcacacaggttgttggatggtcttatctctttaagcgggacctaggaattggttttctttaatgctcacaactgatttgaggtgagccgaattgatattctgtcttcctgtcatgctcattgc

SEQ ID NO: 588021 - DNA, 4001 bp, Homo sapiens
gaccaacaactgacgaaagaaacaaaccccaagaggaaatagtaaaccatgtcccctgcaataacctcacacgcaaacctacaggtcaataggtcacattaagaaatacacactgaatgtcatctaccatgaacacaaacacacagacagtccctccagaggttcggaagactcacgaccccaaaacatgatgtttcccatatgtgggctcatcctgagacgcagccatcactatccaattgtccctgttgtagagacagaaactggggctcctcattactttatgtaggattcacggtgttcgtgtttgtgtgggtgtgggtgtgtttccgtgcgcgcttgtgggtgtatttgtgtttgtgtgtgtgtgtgtgtacccctcagtgtgggtcggtacttccactctgatcactggcacacaagcagagatctcttgctgtgtttgttcttccctttggatctcctggtcctcccttgcagagaagcgagtgtgccagtgttcatggactcctgatctgtcgagttcatcgaagagaggtttagcagggagctttgctgttcaggatggtggtttttcatcccacacttgtattttgattgatgaatcacaagtacgttgggaggcagggtaccttcaacttttctgacgttgaactcaggcttcattttgttttgctcttgggggaatttccagtggtctaaggtgctttcctcagtggctctttccaccaagtgctcgtccaactcgggtacctggaggcaagggtggtctctcttgagctctccttgcgttgctggcctgtctgtgtcttcagcgccaagggctcttggttccctgcctcttgacacactctcactgtgtctttcccattcactcttctggatgtaaaagaggacataggcctgttgactcaggacagaagtgatgctacagacagtgacctcggcatcatccattttataccactggccttcttgagctttgacataagagaagtaatatccgtcgtgacaactccacccagcgtggaccagcacagcatagaggacatagacaagaggtcctgtgttctgctgagacatgtatggctgcatgtcaaggcactcaggatattgcacattcttggcaagtttgttgcctgcgacatcggagaatctcttcaagacaaggatgaggaccttggcagaagtgtgtaaagttaacgtgttggaggccggcgccctctggagacaaagaccgcaatgataggcattctctccattgagttcttcgggcttcaccaactgttccaaagcttgcttgacactctgagctgcctggatatccagggcgatgtccaggtaagggtcaaaagtgtctgaaatcccgtggcagtggagacacttgatttgagatctccagcagcctccaaatatttggtggatgagggtggtgtccttagagtgatgatctacctgcttgtggccgggaaggcatgcctttttcatggcatccacagtgaacatgagaaattcatggacatcttcctgcttgcctctatggaagccagcagccaatgcctgtgagggctggatgacatggccaggactgtggagggcccatgtgatgtgagcttgcatagtacagagcatgcagcacttgggacgctgacatgtttgagagtgctcccgggacagcatgtagttggcaaggggcagtgtgtatgtcaggcactgcagggaagcgttctcgtagcaggtatttcccatattctggagcccagcccccaccgcagcaggtctcctgctactcagaggaagcttctccctgggagcgagctgtcttgccacaggagccaaatcatcacagaggtcgacacgggtctcagatgagagtggtgacttctcagggagagaagtccgctggatttcagcaaaagctgcatctggccgagaagatgtgagttttgaaaagtggttgaactgccactcacctcccaagtagagtgagtcgtcccccatgtcgcccgcaacaaggatcacaaggtttttctgctgggaccgcaggttgcagcaagacgctatctcttccgagagagtcttcaaatgacgagctctctggccgcatcatcccttatagaactcacccccaccagccgggaacaccccacccacccatcaggtgcgcgataaaacaatcaaatatcagcactcaattaaggaatgagtcacagggtgtgtccccttgcatcgctgggaattcaacagacacagcccacatcatgacttctagaacacctgaatcaaattactcctcagggtgataggcacatataatatgagtgtaaccgggttgggacagtggccacacagttgccttattttaggtaaaagaatgtcagggaagaaatctttatctatgaaaccgtgtgtgtgtctctgtgtgtgtgtgtgtgtgtgtgtgtgtgtgtgtgcgcttgtgctgggatgaacttccaagtatgtacttttggcagctatcatcatcctctcagcgatggaagcacaagaagtctgaagtgcactttctgacctgagaatagtcaatgaagtatagtatttagcacagcgtatatttttccttaataataaaggagagatccgtggaatccaacagaccttccagcgatgacctttccacgttcagactattgattctctatccgagtgaaattaccggccagtggagaacaagacaggtctttgcatgaaatgctcttgtggaagctaggctgccaaatactaaagcatcaaatggtagaaacatgcactgaagtttgaagagatactcagcgcacaaagtagactgtgaaagactttggggaaatcatgcaatcaccgagagactaattgatgacattccccaaatttatgtgtgccagaaaagagagatggtcctgacattgtatagtgagtggtttcggacgtgcggcggcagtttaagaaaacatgaaacaaaaaccttgagaaatccaaaggtatcccaactataagcttttgtttattaaagaactgatgaaaatcaaaacaacgtatctcacagcatgggtgatactatttccacacgtatgtgataatggctcaacatttcatagagatgaaataaaaagttctaattttgacaaaagcaaacaaggaaaattataccgtagaaaagcccgggtgacgggaatgaggccctgtctcaagaagaaaacatcggagacgtttaaaagcagggagtgaaacagaagatagcataacctttttactgctggcccttgtttcacagggaaaaggcaaaaataagccgtgtgtctcctggattctcgcatcgattgttcatgatctgagatgttccctccatttccagttatgcattgtatggtggaattgcagttagcacatttggtgcaaaaattgtaatgctgacgaaagtggacatgttccctgaactaagagggacagcatttgggtgtgtcttcaggctctctggcttaccaggaatgaagatcctggctctagggattttcccaaaatgtcttagacagtaaggaacagggcagaattgaggcccggcgccaaggcctctagttttaaagaaacagccctggcttcagggcccatgaaattcggatgattttaaggaggatgatggaatgagaggactgtgacctttggccccgtttctttcccttgtcttttcatgggccaggtgtggtccatcagaaggcttcgtgcgcctgatgtaaagtgtcctgggggaagaaaggagcactgcttagaaagatgctccacagggagaaagaagccaccattttcaggagaatgatccccagaagcatgagcaacgcagatgccgtggcttcacacaagacgtcggagggtcttattcctgcagccgggacctgggcatcggtgtgctttcatgttcctaactgattttgaggggagcccaatcgataacctgtctgcgagtcatgctcatcacactgtagttttca

SEQ ID NO: 588022 - DNA, 4001 bp, Homo sapiens
caacaactgacgaatgaaacaaaccccaagaggaaatagtaaaccatgtcccctgcaataacctcacacgcaaacctacaggtcaataggtcacattaagaaatacacactgaatgtcatctaccatgaacacaaacacacagacagtccctccagaggttcggaagactcacgaacccaaaacttgatgtttcccatgtgtgggctcatcctgagacgcagccatcactatccaattgtccctgttgtagagacagaaactggggctcctcattactttatgtaggattgacggtgttcgtgtttgtgtgggtgtgtgtgtgtttccgtgcgcgcttgtgggtgtatttgtgtttgtgtgtgtgtgtgtgtgcacccatcagtgtgggtcggtacttccactgtgatcactggcacacaagcagagatctcttgctgtgtttgttattccctttggatctcctggtgctcccttgcagagaagcgagtgtgccagtgttcatggactcctgatctgtcggtttcgtcgaagagaggtttagcagggagctttgctgttcaggatgatggtttttcataccacacttgtattttgattgatgaatcacaagtacgttgggaggcagggtaccttcaacttttctgacgttgaactcaggcttcgttttgttttgctcttgggggaatttccagtggtctaaggtgctttcctgagtggctctttccaccaagtgctcgtccaactcgggtacctggaggcaagggtggtctctcttgagctctccttgcgttgctggcctgtctgtgtcttcagcaccaagggctcttggttccctgcctcttgacacactctcactgtgtctttcccattcactcttctggatgtaaaagaggacataggcctgttgactcaggacagaggtgatgccagaggcagtgacctcggcatcatccattttataccactggccttcttgagctttgacataagagaagtaatgtccgttgtgacaactccacccagcgtggaccagcacagcatagaggacatagacaagaggtcctgtgttctgctgagacatgtatggctgcatgtcacggcacttaggatattgcacattcttggcaagtttgttgcctgtgacatcggagaatctcttcaatacaagaatgaggaccttggcagaagtgggtaaagttaacgtcttggaggcaggcgccttctggagacaaagaccacaatgataggcattctctccattgagttctttgggcttcaccaactgttccaaagcttgcttgacactctgagctgcctggatatccagggcgatgtccaggtaagggtcaaaggtgtctgaaacgccgtggcagtggagatacttgatttgagatctccaatacgctccaaatatttggtggatgagggtggtgtccttggagtgatgatctagctgcttgtgcccgggaaggcatgcctttttcatggcatccacagtaaacatgagaaattcatgggcatcctcctgctcacctctatggaagccagcagccaatacctgtgagggctggatgacatggccaggactgtggagggcccatgtgatgtgagcttgcatagtacagaacatgcagcacttgtgaagatgacacgtttgagagtcctcccgggacagcatgtagttggaaagcggcagtgtgtatgtcaggcactgcagggaaacgttcacatagaaggtatttcctatcttctggagcccagcccccaccgcagcaggtctcctgctactcagaggaagcttctccctgggagcaagctgtcttgccacaggagccaaatcatcacagaggtcgaaacgggtctcagatgagagtggtgacttttcagagagagaagtccgctggatttcagcaaaagctgcatctagccgagaagatgtgagttttgaaaagtgattgaactgccagtcacctcccaaatagagtgagtcgtcttccatgtcgcccgcaacaaggatcacaaggtttttctgctgggaccgcaggttgcagcaagacgctatctcttccgagagagtcttcaaatgaccagctctctggccgcatcagcccttatataactcaccccctccaaccgcgaacaccccacccacccatcaggtgtgcgataaaccaatcaaatatcagcactcaattaaggaatgagtcacagggtgtgtccccttgcatcgctgggaattcaacagacacagcccacatcatgacttctagaacacctgaatcaaattactcctcaggctgatagacacatgtaatatgagtgtaaccgggttgggacagtggccacacagttgccttattttaggtaaaagaatgtcagggaagaaatctttacctatgaaaccgtgtgtgtgtctgtgtgtgtgtgtgtgtgtgtgtgtgtgtgtgtgtgtgtgtgtgtttgtgtgtgtgtgtgtgtgcttgtgctgggatgaacttccaagtatgtacttttggcagctaccatcatcctctcagcgatggaagcacaagaagtctgaagtgcactttctgacctgagaatagtcaatgaagtatagtatttagcacagcgtatatttttccttaataataaaggagagatccgtggaatcaaacagaccttccagcgataacctttccacgttcagactattgattctctatccgagtgaaattacctgccagtggagaacaagacaagtctttgcatgaaatactcttgtggaagctaggctgccaaataaagcatcaaatggtagaaacatgcactgaagtttgaagagttactcagtgcacaaagtagactgtgaaagactttggggaaatcatgcaatcaccgagagactaattgatgactttccccaaatttatgtgtgccagaaaagagagatggtcctgacattgtatagtgagtggtttcggacgtgcggcggcagtttaagaaaacatgaaacaaaaaccttgagaaatccaaaggtatcccaactataagcttttgtttattaaagaactgatgaaaatcaaaacaacatatctcacagcatgggtgatactgtttccatacgtatgtgataatggctcaacatttcatagagatgaaataaaaagttctaattttgacaaaagcaaacaaggaaaattataccgtagaaaagcccgggtgacgggagtgaggccctgtctgaagaagaaaacatcggagacgtttaaaagcagggagtgaaacagaagatagcataacctttttaatgctggcccttgtttcacagggaaaaggcaaaaatgcaaaaataagccgtgtgtctcctggattctctcatcgattgttcatggtctgagatgttccctccatttccagttatgcattgtatggtggaattgcagttagtacatttggtgcaaaaattgtaatgctgacgaaagtggacatgttccctgaactaagagggacagcatttgggtgtgtcttcaggctctctggcttaccaggaatgaagatcctggctctagggattttcccaaaatgtcttagacagtaaggaacagggcagaattgaggcccggcgccaaggcctctgggtgtaaagaaacagccctggcttcaagggctcatgaaattcggatgattttaaggaggatgatggaatgagaggactgtgacctttggccccgtttctttcccttgtcttttcatgggccaggtgtgctccatcagaaggcttcgtgcgcctgatgtaaagtgtcctgggggaagaaaggagcactgcttagaaagatgctccacagggagaaagaagccaccattttcaggagaatgatccccagaagcatgagcaatgcagatgtcgtggcttcacacaagacgtcggagggtcttattcctgcagccgggacctgggcatcggtgtgctttcatgttcctaactgattttgaggggagcccaatcgataacctgtct

SEQ ID NO: 588023 - DNA, 4001 bp, Homo sapiens
accaacaactgacgaaagaaacaaaccccaagaggaaatagtaaaccatgtcgcctgcaataacctcacacgcaaacctacaggtcaataggtcacattaagaaatacacactgaatgtcatctaccatgaacacaaacacacagacagtccctccagaggttcggaagactcacgaccccaaaacatgatgtttcccatatgtgggctcatcctgagacgcagccatcactatccaattgtccctgttgtagagacagaaactggggctcctcattactttatgtaggattcacggtgttcgtgtttgtgtgggtgtgtgtgtgtttccgtgcgcgcttgtgggtgtatttgtgtttgtgtgtgtgtgtgtgtacccctcagtgtgggtcggtacttccactctgatcactggcacacaagcagagatctcttgctgtgtttgttcttccctttggatctcctggtcctcccttgcagagaagcgagtgtgccagtgttcatggactcctgatctgtcgagttcatcgaagagaggtttagcagggagctttgctgttcaggatggtggtttttcatcccacacttgtattttgattgatgaatcacaagtacgttgggaggcagggtaccttcaacttttctgacgttgaactcaggcttcattttgttttgctcttgggggaatttccagtggtctaaggtgctttcctcagtggctctttccaccaagtgctcgtccaactcgggtacctggaggcaagggtggtctctcttgagctctccttgcgttgctggcctgtctgtgtcttcagcgccaagggctcttggttccctgcctcttgacacactctcactgtgtctttcccattcactcttctggatgtaaaagaggacataggcctgttgactcaggacagaagtgatgctacaggcagtgacctcggcatcatccattttataccactggccttcttgagctttgacataagagaagtaatatccgttgtgacaactccacccagcgtggaccagcacagcatagaggacatagacaagaggtcctgtgttctgctgagacatgtatggctgcatgtcaaggcactcaggatattgcacattcttggcaagtttgttgcctgtgacatcgcagaatctcttcaagacaaggatgaggaccttggcagaagtgtgtaaagttaacgtgttggaggccggcgccctctggagacaaagaccgcaaggataggcattctctccattgagttcttcgggcttcaccaactgttccaaagcttgcttgacactctgagctgcctggatatccagggcgatgtccaggtaagggtcaaaagtgtctgaaatcccgtggcagtggagacacttgatttgagatctccagcagcctccaaatatttggtggatgagggtggtgtccttagagtgatgatctacctgcttgtggccgggaaggcatgcctttttcatggcatccacagtgaacatgagaaattcatgggcatcttcctgcttgcctctatggaagccagcagccaatgcctgtgagggctggatgacatggccaggactgtggagggcccatgtgatgtgagcttgcatagtacagagcatgcagcacttgggacgctgacatgtttgagagtgctcccgggacagcatgtagttggcaaggggcggtgtgtatgtcaggcactgcagggaagcattcaagtagcaggtatttcccatattctggagaccagcccccacagcagcaggtctcctgctactcagaggaagcttctccctgggagcaagctgtcttgccacaggagccaaatcatcacagaggtcgacacgggtctcagatgagagtggtgacttctcagggagagaagtccgctggatttcagcaaaagctgcatctggccgaggagatgtgagttttgaaaagtggttgaactgccactcacctcccaagtagagtgagtcgtcctccatgtcgcccgcaacaaggatcacaaggtttttctgctgggaccgcaggttgcagcaagacgctatctcttccgagagagtcttcaaatgacgagctctctggccgcatcagcccttatataactcacccccaccaaccgtgaacaccccacccacccatcaggtgcgcgataaaccaatcaaatatcagcactcaattaaggaatgagtcacagggtgtgtccccttgcatcgctgggaattcaacagacacagcccacatcatgacttctagaacctgaatcaaattactcctcagggtgataggcacatataatatgagtgtaaccgggttgggacagtggccacacagttgccttattttaggtaaaagaatgtcagggaagaaatctttacctatgaaaccgtgtgtgtgtctgtgtgtgtgtgtgtgtgtgtgtgtgtgtgtgtgtgtgtgcgcttgtgctgggatgaacttccaagtatgtacttttggcagctatcatcatcctctcagcgatggaagcacaagaagtctgaagtgcactttctgacctgagaatagtcaatgaagtatagtatttagcacagcgtatatttttccttaataataaaggagagatccgtggaatccaacagaccttccagcgatgacctttccacgttcagactattgattctctatccgagtgaaattaccggccagtggagaacaagacaggtctttgcatgaaatgctcttgtggaagctaggctgccaaatactaaagcatcaaatggtagaaacatgcactgaagtttgaagagatactcagtgcacaaagtagactgtgaaagactttggggaaatcatgcaatcaccgagagactaattgatggcattccccaaatttatgtgtaccagaaaagagagatggtcctgacattgtatagtgagtggtttcggacgtgcggcggcagtttaagaaaacatgaaacaaaaaccttgagaaatccaaaggtatcccaactataagcttttgtttattaaagaactgatgaaaatcaaaacaacgtatctcacagcatgggtgatactatttccacacgtatgtgataatggctcaacatttcatagagatgaaataaaaagttctaattttgacaaaagaaaacaaggaaaattataccgtagaaaagcccgggtgacgggaatgaggccctgtctcaagaagaaaacatcggagacgtttaaaagcagggagtgaaacagaagatagcataacctttttactgctggcccttgtttcacagggaaaaggcaaaaataagccgtgtgtctcctggattctcgcatcgattgttcatgatctgagatgttccctccatttccagttatgcattgtatggtggaattgcagttagcacatttggtgcaaaaattgtaatgctgacgaaagtggacatgttccctgaactaagagggacagcatttgggtgtgtcttcaggctctctggcttaccaggaatgaagatcctggctctagggattttcccaaaatgtcttagacagtaaggaacagggcagaattgaggcccggcgccaaggcctctagttttaaagaaacagccctggcttcagggcccatgaaattcggatgattttaaggaggatgatggaatgagaggactgtgacctttggccccgtttctttcccttgtcttttcatgggccaggtgtggtccatcagaaggcttcgtgcgcctgatgtaaagtgtcctgggggaagaaaggagcactgcttagaaagatgctccacagggagaaagaagccaccattttcaggagaatgatccccagaagcatgagcaacgcagatgccgtggcttcacacaagacgtcggagggtcttattcctgcagccgggacctgggcatcggtgtgctttcatgttcctaactgattttgaggggagcccaatcgataacctgtctgcgagtcatgctcatcacactgtagttttc

SEQ ID NO: 588024 - DNA, 4001 bp, Homo sapiens
ttggccatgttaataactgcaaaagctggagagaggtttcattatattattctacctttgagttgtctgaaaaattccagagttaaaataaatttgttagaaaaattgctgtagaatataattttatgtggcacttctcaacctttttaatatcatagcactatatttaaaatgttaatatttctatggcacacaggagtatatggacaaattgcttgtagacaaaagcaatcaattcaggagcaaagactactgaaggatttgttagacagccctaaagactaaggggatcaaaactttgggggtatctgtaacccagccgagaccctgcttgagaaattctgaacaaatacagatagctgttcattaagtaatcgtatgtgaggaaaaggagactattaacacagtatacacagaaaaagcccatactttgttatggctgtagttagagatgggggtttcctacgttgctcaggctcacctcaaactcctagactcaggcaaccctcctgtctcagcctcctgtgtagctactaggattacaagtgtgagccaccttgcctggcttaaaagtccattcttgtgcttgtgtgagtgtgtataaagaactggatggatgacactgcacatgttaacagtgattattcgtgagtagtggtattatgagtcattttaattttctttttttgctttttaaaagtaaatattctacaatgaaaaaactactaaatttcttaatagttcttcatggcctagcctcaatttgccttcttcctagtttcactcccaaatatattctgtgctgcaacctctttcccaggcatttcataactccatttcgtgtgaagaggtctccacaacaagaagtgtcattcttttctgtcattcaaaatagttcttcctctcagaactgaacaagtgaatgggctcaaatgttatctgaaatctgtcacaattctctcctctctcctcttcatcccgacaagcttccatcctaagtgttcccacatttcaatgaagtggggaaacatcagacctagagtgaaaacacacactgcagactgacttatgcactttactggccatgagggagcagtatgtggcatataggaggtacttaataaagcgagttgaataaacaaatgtgcttgggcagattccttaatctcaagtactgactttttgccctggacatcaaagatggtaactcacaggttcactgtgaggcttgcagagttttggtttaaactaagaaaagctatgcaaatgacagcaaccatttgaagacgggtacactttggataccgaaaaatgctctagtacactatactcgtttgagcttacagcaatcttctaagcagttatcatctttattttacaaatgaggaatccgaggctcagagaggctaaataacttgacagaaatcacagagctggtagaactgggatcaagattcgaagtcggatctctctgctataatgtgctctcattcgccaggctaacgacacgtgatattcacagggcactgtccaatctgcctctattataggtattcgcctgaccaccttcacctctccacttaactgtcaactccacgtgggcggggcgttttgcacctcctgagctcgcaatgaaggtctgtgagcaacggcctcgcctctacaacacccgacggaccctctgtgcctcctccccagccccccgggcccaccttgtggtgcacagctgcgtctcccccatgaggtagcggggcagctgctcccgcagctggatgcggccccgcagcgccgcctgacagaaggtgccgtccagcaggatctggtacggctcgcggactccgaagttgttgcggaagaagccaagatgcttcttggcatgtttctgccttgtgatcttcatgcctggcttaccgggaccgaggccaccggaccaggaagcatcagtaaacgcctcacgcacgccccagtaccctcaatgccagtttcacccggaaatgaagcgcctttggccacggaagcaaacgcctctgtcttccgggcctgcccattggtttacgtcatgtccagaccagcgcgcgcttccaccgcagtgcccgcgcttaaaggggcggtcccttagggcggaacttgtgcgtacgctggaaaaccgctggggtgcgcgattccgcacgggggcgcacatgcgcagtctggggccacggtaaaagaaaattacgagaatacatttagcgtgttacctacgttttagaggcgcgtagcaagagcttctctgaaagactggcagtatagtagtagtcagtgataatattgagccttaatatgttccagacactgtcctaagtgatttaccttacattattcccctgaatgtttataattcccaagtgaaagaaggaaatgatatattggatagctatgagtggggaggtttgtactggctgctttcccataaagaaattaagcacgttcacgaagggcacgtagtttgttagtgtctggaacccagttttcgtgcctgaagttcaaatgttcttgctacaccaccatagaaactaacgtcactcaggaaccatttgtcagggcaaagggtgccaccattttgcatttcctcctgccttaggaccatcctaaatcactcgcatggagtgttttggaagaactctcaagagcttcgtttgcctagagtcagaattcctaaccttgagtcctggttttgccacaaacccaagccgtttgatcttgggcaactcccgaagaaagctgggttcaacttcctcactgtcaaactggttgtaggtctagataagtttcaagtactctttttatgtgcatggtctctgacataggaagactacatactgggccagtaacaggaaggcacaaagctgactggaggtttaaaaattacttggtcaatttgattaatgaggagaatgaatcagaaaatttcaagttctcccgtggctaactgtcgagtatccacttcaaggtaaaataatcaaagaatggggagtatggaattttgcatttttgtccttgcctggaatctgtcccagatctagttttggctaaagattgaaagaaccagcacagaaaatgatttacaacgtgattgaatgcattgtttgcatttggggttttatttcaatatgtaggtttatgaaattggaataagatctataatgttagccctgatctgagtcccagcacatcacttagatggttgctttcatttaaacttaaaatgaatttaggaattggaagccatgaaaacttttgcagggttggattcaaggtctttgagtgtaattgctcagtacttttcaatttgaatcctctttttatccctgtatgccaactctctactccaactatgcgcccaccacagacagagaaacgagataccacctgagtcttgcaaaacagttaaaacattttttcttaaatagcctcagatttatctaccagctccttggccacttttcagtactaagaaaaatgtggtgcagcactagggattttagtcttatcttagtttttgttgtcgttttttaatttaccaagctacagcacattttttccccaagctctatgtatatgacagtgccagtttgcaccctatctttattatgaaaacatgaagatggtctataatggtgattatcaagtttaaaacaaagttttcggccgggcatggtggctcatgcctgtaataccagaacttcgggagcccgaggcgggaggatcacttgagcccaggagttggaaaccagcctgggcaaaatagggagcccctgtctctgctaaattaaaagaagacaaaaagagaaaaaaatagagttttctattacagcagtgtttctcaaaacaaggtcctgggatatgcagaaaaagctcttagtgtgcttgtttaaaatgcccatttctgattcagaataagtattgagggagaggggtactattcaaagaggaagtgacatttattacaatctccccaaatc

SEQ ID NO: 588025 - DNA, 4001 bp, Homo sapiens
cccaaaagtgtttgaatccacaaccacatttgccaccagtggacctagaattagttctgtctccatccaaatacacaatagacccatctcctctgacctttcgcacagatgtgccatggcaccaattacaagctgttaggttactcattccatagtctggtaccagaacatctttcactgaatcatatgagcaaaccaaattgttcaagggaaagctgtaatttttgtcagtcctcagctgtccatgagtactttttgccaggttatacaatttccctccaggagccaaccactctggaggaacatgaagttcagaaagggcaccacagagcaaacatttgtgaaggcgattatccattactgcttttttagcagctgctgtgacttcctcaggctgaactcctatcactccagtccttctgtagaaatactgatggacatcagcaaccaaactaggatggataccatgtttgtccataaagacttcttccatagcagcaacaagcctaagtaagtatttatcttgcaaacttctgtcacctccaataacacaaccaccatcctcttcaagttttatgtactttttaataaggtcctgaggcacaccccatgctttaggaagcaaattcataggcagtttgggcaaagcagccccttttatgcctaccaaggggatataatggtttctaccggagctgctccatgcaatacagattggtttgttcaaatgaccatctttcccagtgcacttctctgcagggatgagcccaggtagaaaggtggctgaataatcaccagagcttctcatgccactgagggaatctaacagaataataggacgatgtagcacattggcaagaccaaatatgtggatattcctcaggcccaagggaacaccctcaggtggtacaaacagagggtcacactcattgataatgtcctcccactcagcagcatcaatgaagtcatggaacagagcttgatatcgggccaggtgctgctgaaagtgctgtttaagattctctcttaaggcatgccagaagagctctcggcctactagagcccgagacacagcatgcaccaagcagtgtccatccccgtccacatgcactggaatgagacattcctggcttttattggcccgcttaatgtcctccagagtgtcatgcaaatacaggaggcttccggagcggtccttgccatagcccacagtgttaacatgctctggttctatgaggaaggcgcggtcacccagtaaggcgcaatcgaacagttcgccctggttcatgtcccggagaagcttggcccggcctgtctgtttgtccattccatagcgagctaatatgggcgacaacaatttgcagtgatagttggaaaggcccatcacctttaccagttccgtgttcttcttgggtgcccccgtaaccccgagcagcgcgttccgcagcaggttgtgtagcactacgtccgggtcggtcacctcctcaacccccagcagctgttgctgctcgtgccgctggccgcactcggtacactcgatgctgacagaaccggaggccgggaaaaatagacgcgcctgacacttcggatccgggcagctcccggaaaggattctccggtctctccgcttcaaaagcccccccgaagcagccgccgacgccaaggacgacggagtctgtggagcctcagggggaggaggtggcggcggcaacggaggcggcggcggcggcggctgagacatagctcctggctctcgtgtctcgctccgcgtcccaggcgaccctcaaaagctcatagcccagacccccaccaacccgactcggtccagtccaggcccagggcgaagcactttcctttccctaccagctcttcctcctcctaagcgaaggcggaagcgccggacgttgtttctcttcttacttctccactgccgtagccgttgccccgaacgtaacggccaccaccccaccccgcactcacactcactcactctcgctctctctccctcagacacagacatacacgccctcattgagtgtgcgcaggcgcagcttccgctctgccctctgggaattagagtcttccagcctctgtgctggccatcaagccctaggatcttgagtccagaaggaactacaagtaccgtgaggccaagcggttcagcgctagaggagaggaggaagaggacggcaacaggaaaaggggcgaaagaaagatggtgactcgcgttgcctgccggtagttgtagttttactgggctctccttcgtcgtcttccccactctgcagcccaaggcaaagagtctgagagaccacatttcctaggatgccgtgcggtgcgtctagctgcacttcctccttaggcggaggggaggattcagggaagcttggttaaaaacagttatggcagtgggagtcgaagcgagggtctgaagttcacgactactagaaggggaggggagtggaaaggctctcagtgaaaaaggtacagtaaataaatgtccagggatattgggggctgggaagttgaataaatggtctaatctaggctggaggccataagggggaaaacagttgattctcggaagctctgccttctccccctctctagtgcgaatcactgaggcgccatttgatttctcgtttcctgcatgttttggcagtttacagtgcaaataacggtaccttggatgtctgtagagttttgtgtgcatatacaaattctcttaactaggtttaatttcatttgctctttaccaccctactccccagagaataataagagccatcatgtgttaagttcttaatatgtgtctggacagcatttgcataacacgatatcatttgatcttaaaaaataaccttcttaggaaacaggcccagaaaggaaatgacttgctaaagttcacgcagctgataagtgagtggatagacattcagatctcaacctgtcttctttttacagatcaggacataggcaggaaaggttaggcctgtattacatagaatagtaactagcatttgcttactattgccttatagtttacatatttaataatatgttcacatgtatcatctcatcctcacaccagtcctgtaatacctttaccaggtggtgttgacttcatttacaatcagggaaactgagactaaaaggaattaagtgacttgcccaaggtcaagtcaccagttatgctggatcccaatctcaaaccttgagagtgatttttacgctgctgcttaccaaaaaatcccggccgggcgcggtggctcacgcctgtagtcccagcactttgggacgctgaggcggatgcatcacgaagtcaggagatcgagaccatcctggctaacatggtgaaaccccgtctctactaaaaatacaaaaaaattagccgggcgtagtggcgggcgcctgtagtcccagctacttgggaggccgaggcaggagaatggcgtgaacccgggaggcggagcttgcagtgagccgagatcacgccactgcactccagcctgggcgacagagcaagactccgtctcaaaaaaaaaaaaaaaacccaaaatgttaggctcaaatcttttgctaggccttagagtctcctcttagtgatgaagggatgtttaatgttaaggaggcaacagctttattcttttttcacttgggtaggaaactgcctcttcatacagaacaatattcatatgttaattgaaagctagtattatttttgtacattcatcctctttcacttattacggaaattcttgctttctggaagtttagtatcaccttaggtaagtggactacctcaaaatttctgaaacatttggcaccaactagaaacattagtgaagtccatgagatcatttgagtcttctgtagctgcccaggaaaccgcctgattaggttgtgtgtgtgtgtgtgtgtgtgtgtgtgtgtgtgtgtgtatgtatgtatgtagaacttgatgctttgaaatgaaccatctgcaaaatagaggcccataa

SEQ ID NO: 588026 - DNA, 4001 bp, Homo sapiens
gaaattcagttcttaaaataagaatttaccatacgaattgaagtgtattcatctagaatatatcttctctcaaagctcttcttaaagtgctataattttacccattaaccagaaatatgacagattctacctgcagcaacctgcttaccaaaagttagtgtaaactctgaagttaaagccttcaaaaacctcaggtgccttgatttttcatcttgcctactaaaaatctgcccagctttgctactggtaatatgaccctcatatcaaattctcagagctatcaacactgctgattatctcattcctttgccctctttgtatcatgggaaatctttctgcagcaggttcttctgtattcctctcgcagactcaaaagctatgtctaaccaattacagagccacctctagcagtgccattagcccatatgtcagaaaaatccagagtaccagctagcccttgcaattgctacgcctgaatgatctacacatttaagctcatatttatttatatatagcccagctcttaatccagacttctgctaagcttctgcctaccccatcataccaaacatatacatatgatgcacttaaatgggaatgcatttaagttttgttccttaacataaacctgtcaaatatgacagacactatgatataaagagactagtataaaaaactaaaaagaaaaaaaaattaaagaggaaacggtagtataaatgtactgactcattccatagtaaaactttgctctaagctaccaggtttcataattcacttacagaacgattattttacaattcaatcccttgtactaaagtgatcaattctaggctttttatattatcccaattgcaatttgatattactctttatgattacaactgatgttgatatttgttgaaattttgccagaagtctgtaatttgggaagtaagtatagaaatgcaggcagtatatattgaaatagaaatgttaaagctttacagtctggtttttcatactgccgagaaaagatacacttaaatgtttagaagcactatatatacgtctagggactatttacaatatttcagcattttgttttgttatttttcaaaaccagtacgagatactatgcaaaagtcacgtagctggtttagtatactaactgacctcaattctgcctagttcaagctgactttttcaggcctatgactctgatgggaaatgcactgctagtatgatcaagcaaaaatcgagaacaacagaaacttcatgttcctcgagagtaaagctacaaccacacgtctccaccagctctacagaatgcacctgcccatagatgtgcacactgcacagaggctgcaggagacgcagacggggaaaggcgttaagccggttgctactgctttacaaagccactaacttgacagccagtacagagcccttttcgttcctcgcttctccgttttgaattgcacgcagggcaccctccctcggccgtaaggagggggcaggggcgggcgggagatgggtgtggggttcgaggatccaacttccctagaaccgatctcctttctagctgacccctgggaggaaagtgcggtccacacgccggcgggataggtcgctgcccgcgcccggaggccacttgccccgccgtgctgcggctccatcgcctgaggtggcccgggcgggtcccggcgggagcgagcggccccggccccccgcgccccggtagcctgctccctgcccacagagcctccgttaggcccgcctcccgcctggcgctctgctcggccgcggcccaccgctctccgggactggagcccgcgcggcctcagctctcctcacctccaccccgagggcctgtctctgctccgccagggcaacgctgaaggtcttcaaaccaacgccgtccgcgcctgcgcagcctcgcacccccagccgcgcctgcgcgccgcccctccccgagagcgcctgtgcgccggcgtgtcgcgccacggtcgcgcgcttcggagcaaggcgcggagacgaacagccgggccaagccagcaccaccaactgtccggctccgcagcgcgcgtgcgcaggagggctcggtgtggacagtgaggttgactgggggcccaagaggctggggaccgcacctgtgcccttgaggggactcattctcgcgagaatgcgcgaggttgctagttaactgttgccatgggtgcggccgcgaaaaggccgcagggtgccggaccccaggtttgaggcatgccgcaggccggagtgtagtggcgcgatcttggctcactggagcctcgacctcctgggctcaagccgtcctcctgcctaagcctcctgagtaggagggtccacagaagcgcgccaccacgcccggctaatttaatttttttttttttttttttttggtaaagacgggaatctccctatgtttccaggctggtctcgaactccacggcataagtgatccgcccgcctgcgcctaccagagtgctgggatcacaggcctgagcccacgcccagcctcttatgggaatttcatttcagactgaccagacttcaagagtgtcactcttaggtcatctcgtcttaaggatgagaatacacaggtccccagggagtaagtgattgattcaagatcccacaagtagtgagagatgataattcaaaggggcagaggatgtggaggagaaaaagctcttctgtagaggagaagaccaactaataaaggtagaatagatgacagaaatagaaaatcatcgtcttggaaccaccatgataataattgattcaggctgaaatgatcagtggaccgttgaggatgttcatatggtttcaaagtatcacccccatagattactcactaaagagaaaagggtaccttcacatcaaagagactgatcaaacgggggatggtagggactgacatatgcccctggtgtgaggcacagagagggacacagagataatattcttgtaaaagtgtgtaatttgcctctcttcaggacgaaacaatcaggcaaatccaaactgagagacctgcaagacaactgcccagtcttcaaaaatgtcagtttcatgaaagattaggaaaaaggctagtgaactgctctaggttaaaggaagcagcctgtaatcccagcactttgggaggcagaggcgggcggatcatgaggtcaggagatcgagaccatcctggctaacacagtgaaaccccgcctctactaaaaatacaaaaaattagccgggcgtggtggcgggcgcctgtagtcccagctactcgggaggctgaggcaggagaatggcgtgaacccgggaggcggagcttgcagtgagccgagatcgcgccactgcactccagcctgggcgacagagcgagactccgtctcaaaaaaaaaaaaaaaaaaaaaaaggaagcaaaagatatggcactaaaagcaatgtgtgatcctaaattagaccctgaataaaaaccaaacaaacaaaaccagctactgaggaacgttattgggacaatcggggaaatttgaatggagagtagattagtgtggcaacaatgtaaaattttctgagggggccccgggcgcggtggctcacgcctgtaatcctagcactttgggaggccgaggggggcggatcacttgaggtcaggagttcgagaccagcctggccaacatggtgaaactccgactctagtaaaaatacagaaaattagctgggcatggtggcgggtgcctgtaatcccagctactggggaggctgaagcaggagaatcaacttgaaccccggaggtggacgttgcagtgagccaagatcgtgccattgcactccagcctgggtgacagggcaagactccgtctaaaaaaaaaaaaaaaattctaaggatagtgtacgttggttatgcagaaatggccttgattttaggagatgcatgctgaagtatttagaagtgaaatatcatgtagctgcaactaaccctcaaatgatccagaaaaaaagaaaaagcaaat

SEQ ID NO: 588027 - DNA, 4001 bp, Homo sapiens
ccagcctgggcaacagagcaagactccgtctcaaaaaaaaaaaaaaaaaaattgagctgttacacttgggatttgtgctcattaaaaaataaaataaaatgaaaatattaaatattaagccactcaactaaccttgggaagaggaaaaagaagcagccaggagtattatttcttagtgctaagtctagattgacttaataaaagagtaataaaagaggctgtggactataactaaaaattataaataaccatcactgtcagattaagtcttcccttatctcctaaaaagcagttggtctctgactcttctgagcttgcacagatcctcaagcctaacagaatttcttggcatgttactaataaatgtaataaatgaattaatgaatatgtgatctttgaagttacggttcttttgcatcagacaaatctcatgttaaaagaaactaaaacgattaataaagaagtttccaattttactgccattctcaatgtatctactcaacactctgaggatgccgtgggaaatgtcatctttcctcatgatctgaatctgctcttttttttttttttttttgtctttttttcctcgacccccacaagccagccacccttcctgctggctttcaaacccttccattgcccaaaaaggagaatgagaatgtgatgttttccaggctcatacagaattttgacaacataaattagcacattcataatgcttgaaaattgagtaagtagaccgaacaattctgacatgaacaatgaaatcgtctttctgtcaaagcaactttaagtaatcccattctaatataccaaaactgggaacaaactatttttaaaaattatgcaggccgggcgcggtggctcacgcctataatcccagcacttcggaagactgaggcgggcggatcacctaagctcaggagttcgagaccagcctggccaacatggtgaaaccccgtctctactaaaaatacaaaaattagccaggcgtggtggtgcgcgcctgtaatcccagctattagggaggctacggcaggagaactgcctgagtcccggaggcggaggttgcagtgagccgagatcacgcagctgcactccagcttgggcgacaaagcgagactccatctcaaaaaaaaaaaaaaaaaaaaaaaaagaaagaaagaaaaagaaaatagtgtaaaataaagcccccttgtttcagggtagctcaaaatacatcagtagaaaagttacgtttttacagcataaagtcaaagcttaggaaacaatagattaccgtctaaacaagctgaaaactgtttccagttaatgacagctaaatagcttacctgttccagcacatccaactttaactcgagcttgctgagtaccacgtctccaccccatagtgaaagctgtagatccgacggctttaagttcttgatgtagcgattcacatagctcattaaaattggagttacatatgactccagcatcttttaaggtaaggagtcgaagtcggaagctgaaaggagtagacagaaacgttagaagtcggcggtagagtgaaggaaagagcgttcgttatctcaggccgaaagcagtaagtccccaccaaagcggccgttcgcctcctcttagaaacagagaaaaactccagcggactcccagctccagctgcgacttcctcacaagtacaacacccttcgccaagcgaagtgagggaggaagacgtagtgaccagaagagagcgggtccctcagagtggaagaatgaagtgaggcgggctccccttcggccgcagtagcccttcaccaacccagccaccccgcgaggccctcgcttcccggaacccagccggatctgccaccatagaaccaaagctagaagacctcccgtcccgctcccgctccctctgcactccaccctcggctcacacgccagagtaccgccgcgtcccctccacctccaagtccctggcacccgcccccgccggcagtgctgctcctgtaccgcgccacttccgggtgtgtcccacttggtgctcaaaacaaactgtccctccacggctgccactctacgcagccggaccggatttctcaggctggagaagctactctgcgcgtcttcgtgaaggagaactcttgcgttctgctagccagggtcccagctccgaccctgctagttaggacaaagctctaggaggtgtctaagggggtggggggaaccgtaaaggggaaacactcgagatccggaagtggcgctccggggagaaggtggctgcggctgctggggccgctgcgccggcggcggttcccgatgtggaggtccgtcttgggtggggaggcacccaggtcgctggttcgatgcagaggaagaaaccacacctagcacgtaaagccctgaaaaaatagaggtggttgtttttcttgagaaatgggaggactgggaagaggaacttggttgggttcactggggagggcagaagcaataggccgctggtaggaggagcgaaataagtgacagatttcaacttagttccaaggtttatttgctggaaggagggtggatgtgggaagaaaattgaagggattaggacatacaccgttggaggatgcgttttggccaaacgtgtagacaagttctcgcattctggtactttcacaaagcaatggtaaagtactccctagtttgctgatgaggggcgggggaagggatggtcaaagagaatattgcggggaaccataggattgcagtctgacgtgggatttagggaagctgcgggaataaccaaaatgaagacagaattgagagttctagagacaaagtgaaaataactgataagtaatgaattcagagttgtaagggtcggtgttggttttattaggctgtaatgagtataaaatattacctttccgtataatagcttacaagctaacaaagtcaagaaactcaaacattaactcggaaaatatacactgggcttcaaggaatcgcataggacatgctccccaagttttgcccagattgtcttatttttggttatcgctgaagaaaacacctacaactgcattttgaaactagactcctggccaggcgcggtgatgcatgcctgtaatcccagcactttggtaggccaaggcctccaaattgcttgagcgcagaagtttgagaccagtctggccaacatggaaaaaacccgtctctacaaagataatagtaatacaaaaataagctgggcatggtgccagtagtccctgctactcaggaggctgaggtgggaggatcacttgagccccagaggtggaagctgcagtgagccgtgatcacaccactgcactccagcctgggcgacagaatgagactctgtcgaaaaacaaaacaaaaaatcagaaactagatttcttaaaaggttattaaatacccacccatgcctaaagctctttcctggaattcaaaattaccatttcttgaaagagcttcagtaactgcaacagaaaagaggcctgaggatgccaaggtgtttaggtttattttgtgattgaaaataaggaaataagtttcaccaaaagaagcagcagctaattgccaattcagagcagctgttccttcacaaaaatgccataataactcaaatatttgagtattatcaaaacttgccaaattatacaaatgaattaatttgtttttctgttatctgcttcatctgaaacacaggtcaaagccatgacttagaggttttaacgtaaagaaaatggttccgctaattgtatagaacctctcagcagtctacaacagtagctccaggtcttgtcgtttttctagagaaaaagggcctagttttcttctgtggtgatctattaaataaaaacactatattaagataaattggccaaatataggagtagaaatgtgactaagatgtttgaacaaataacatatggaatgctaaacatatggaatgctaaacgtatgccatttttctcctggaaccaacaaaaaatagacaaattcctggc

SEQ ID NO: 588028 - DNA, 4001 bp, Homo sapiens
ctgcacaacagtggccacgccctgctcgtggctcatgatgcagtgccaacaaggctcaccacacacagcctctcccctgggattggtgacacagggtgcccaggacccccaccgttctggccacaccgaagctcatcatctctgcccagcaggaccaagccagttctgtctggaggtttctgagccctcagtgctcctgcaatgaactatttagcccctggccacccccaaggctgtacgagagcagggtcagatacctccccacccccgatccccaatacccaatactgcccgtcagcccctgcagaagcggctgaaagcctgcgcccttccagccacactcacctcctatgcccggcgtggctgggatcccatgaaacatcctctaggctctggggggggcacagcactgagacctggggagcagagccagggccgactcaaagatggcccctaagccaggcgctggctcacacctgtaatcccagcactttgggaggccgaggtgagcggatcacctgaggtcaggagtttgagaccagcctggccaacatggtgaaaccctgtctctactaaaattacaaaattagccggacgttgtggcatacggttgtaatcccagctactcaggaggctgaggcaggagaatcgcttgaacccaggaggtgaaggtttcaatgagccaagaccgagccactgcactccagcctgggagacagagcaagaccctgtctcaaaacaaacaaacgaacaacaaaaaaaaccgacaaaaaaagacagcccgtaagtgccaggtcctggagacccagggctccatgaagagctctcctaagctcaataatggtgaacacacagggtgctataggggctaccagaaaaagtgaggtactatggacactcaggagagcggggcgggggctgcagtggagtgtggttcaagctggaggttgagggaggttatgagggcggcaggcagctgtttgatggcccacgaggagagtttggggcacaggaaacaacacacttaacagcccgcctttaagtaggcatgaacttggaggaaccaacaagctgaaggtgcagcttctcgaaagagggggtcctagggaatgaagatggagaggtgcccctagttgggcagcgagctgtggagaaacaatgggagcggggcccgtgggagggtcctgcctagcacggaagctgggccagctccagacgttctctctttgaaagtggagccgtcagatccgccgagggatttgagataggattaaaataaaggagttacgaacgacacccctgtttttggcccaatgggccgggcagtaagataaactcagacggagaggggaggaggagcgggcctggcgggcaggcgcaggaagctctcggtggagaggcccgggagagcagcgctgagccggctaactgggagtggacggtgctaccggggatgggagaagagcagaagtgagggaaggccgcccgcgccgaagccctggggcgccccagccgaggaagagccgggaaagggcgtcgccgctcatgtaggtagggaacgtctgggtcaagctctccgagggtcgaggccattgcgagccgcggggtggggaccgaggctgctcggcagccgtcacggagccgccaggcaggagagcgccgaggagccaaccgccccaaccacgcaggagcttctgcctaacagcgaaagcggacgttctgcggccacaagcaaatgtgcaaaacaacctcgcagagtggacaacgagcaaggaaagccagtttctagaacatgccaataacgtgacttttgcggcgctcagccgaagctgtgccggggcctaggcgcgcccagagggtgccaggccctgagtcgcctctccccactctgccccttccccgcccaccggccgggccccgggtacctggacggctcgcggtcgggaagatggcgccgggggcggggtgcgctcggtcagcgactcggcattcgcccctcatgtctgcgcctgcgcgcgtcggggcgaccccccgcccctccgtccccatcggcagctcggcgctcagccctcacgcctgcgcccgcgcccgcccggacttcgggacattccctccagccgcgcagcccccgggacgtaaccggcgcagcagactcgaagcccggtcttaccccgcccacccgcctgccaggcagccacggggagggaggcagcagcttcatttattttatttttttttttttttgagacggagtctcggtctgtcgcccaggctggagtgcagtggtgcgatctcggctcactgcaagctccgcctcccgggttcacgccattctcctgcctcagcctccggagtagctgggactacaggcttccaccaccacgcccggctaatttttggtatttttagtagagacggggtttcaccatgttagccaggatggtctcgatctcctgacctcgtgatccgcccgcctgggcctcccaaagtgttgggattacaggcgtgagccaccgcgcccggccagcagcttcatttattaggggcttcggtgagggtggggaaaggcagcgccagggtcagaggcgccgaaagaagagcttggagccgtggtccagcgtgcactcgccggggcccggccgactgggctgcagctggcgcagggcgtccctgtcctcagcgcagaggcgtctgctgcacagctgcagttcccggagctgcgcggctatcttgtcccacaggcccaggcccaggggaccctggacggcgcagcctgcggaggggaagagggcagacctcagcgctgcgggggccggcggcgtcctggtgcccgcggcaggctccagggaacaaactcgctttcgctgagggccccagggctgtagcgaggggcagtgggcagagctccggagaggccccatgactctccaggaaggggtgggatcatctgcacagccagcggtcagacaggaggaagggtggctcccttctttacctctgacagtgcccgatctcaaagtccatgcctacacgtcagtctccccacccataagaaggacataatggatctgcttgcaaatctgtacatcgtgggcctgagtggatcaagagaacactaagctcaggaattcagggagctgggtgggaaggtacagatgccaggaactgaggtgtggggaaggggtctcacaccagcactcgggggccttcctggaaaaggcggcctggccctgggaggtgaaggggagggggcacaggaagaaagcagagccccgcttcgtgcacattcacttaagccctcatcccctggagggcacagcctgccccggccccagtggggcaagccaggtcatcaaagcccttcctggggttgtcttccagacagctcaggttggggactgccctgatgtggctcaagagagaacaagctaaatcagaccacagccctgggcagggttgtgtcagaggagcccctgccaggaagtaggagggtcccttggcagctttcaacaccctgaccttgggatcccttttcctgccagggacaagaagaaagtccctgtggaacagggtcttgcctaccatagtctgctctgaaggttgggttggagagaccagaggcagatacccacctcgccccctaacccatggttttaggagctgggatcatgccccttttctgtcactgtcactctgccccctgctgccccagcctcatggagcccagccttgctgcctggctggtagcagtgacagccccttaggaggaggcacctgggtctcaggcaggtccctgaaaaggccgaacatggcaggcgtggccaccataccagcactcacctgacaggccaaggaagctaaggccttggggccgcttttggagggtggacaggagctcttccaagctggcacagctgatctcagggttggcagacagatccagtgagatgagtgaggggcacagagagagacatctgagataacatgggaagaagtgcaaa

SEQ ID NO: 588029 - DNA, 4001 bp, Homo sapiens
tgtaagaactttgcgaacttaattttccagaatgaaagccaccaataacagcctgccattcttttctgttaaacagcataaaatttcaccttttgaaagttctgaacaaacagaacaattgagacaacgaaccaagaaacacctaaagttcagtcagcatcaggccttattttagccaaactgattttgcagtaaatttttctattaactagactatttaattaaaaattattccattttaaataagaattattcgatattatctgaggatacatattttttaactgtatgaaaataatatttttaaaagggctaggagcccggcgaggtggcttattcctgtaatcccagcactttgggaggccgaagcgggtggataatctaaggtcaggagttcgagaccagcctgaccaatgtggtgaaaccccgtctctactaaaaatacaaaatattagccgcgcatggtggcgcgcacctgtaatcccagctactcggaggggtgtggggagctgagggaggatgattgcttgaatccgggagacggaggttgcagtgaaccgagatcgcgccactgcgctccagcctgggcaacaggagagccgtacccccggcaaaaaaaaaaaaaaaaaaaggggttagggacttaacaatgttgtcatctttatttaaaatagtgtgaaactgttaagtaaatatacttgcaaaatgcataaaatataaagaagcagttctaatttttgaaaaccattagagaccatagacatttgcaatgtaaaaggctgcagcaaaccaatttacagtaaaagttgaaataatatgaattgtaaaaatatttctaaactgaccatgataaaatgaaaaactcacaggaagacaacagaacaatcaagatgaacataaagtaattcttgagcgtggggacaagactatgaaagaagtgagaaatgtacatgcactggtcgctgtgagatggggagagactgctccaacagggtaaatcttagagactcaagaagactgactacgtgataagtgactctcagacgagaagcattcactgatgaaaactctggcttccctttcctttgatgttgcaacagttctattttccattctttgtgaaacctggagattactcttcacaattgtattttaacaattctgctgacgcggcaatcaggtgggcaaagggaaagatcagtggcgaagcctgggcagcaagggatactggaaatagactatgagagagattgagagattacagtcagcagctatgtgtcaggagggatgaggaaatccgagttagaagcgctgagcagtggtgcggcaggaggcagggagggtccggaggaaaacagtaaaagggggcaggagtggcagagcaagcgtgtgacccacaaccaagggaggtaaaccacatgaggagctggtggggagcagactgaggcgctgtgagggtggttaggacaagcccgccctcccaccctactttttcctccggtggagaggcagcgaccagtcacctggagtgtgagttccggagggactcgatcaggcgctgcttctgctgctggaggctggtgaggccaccgggggacccagccgcggaggaggaggcgctcttggtcaggggaaaaagccagctcatcctcctcgggtccacgggccggaggccctggaaggctctggcctgcttctcccagtggctcggcccggcggttctccagcgacagaggagcggggtgggacgtccgtggcccaagcgctggggaccgcgtcttctctaagcctgtcctgcctgcgctccccgagttctgggggacatgctacgaacggcgggcggctggagagggaaacttgcggcccggaacaggaggtcccaccttcacggcccagacgcccaaaccggccagccagggagcctggccgcccagcgctccaccacccgcgccgccgtcacttgcgtgccccgcccccgggggcgctctccgccccctctgcgtgtcgcgtcatcatctagcgcccccgtcaggacgtgcgaaaagcgacggcgcagcacggtgcggcgcagctcctgctcgcctttcccttcgctgggcgagaggtgtctatggggcacccgctgccgccgccgctaccgccaccgccaccgccaccgccgccgagtgctgtctctatggcgaggaggaggaggaggagcgcgagctcagcgacacaagtagatcttgcatccgctgcagccttacggggggaggggcgggttagggaagtagaaagggggcggggacgatgaacctgagagggtgcgcgatggcgccagctggagtgcggctggcggaggaaggagcctggcggcgggttgggggctgggtaactggggctgggggtttgtcaaggggttggcgcgtagtgatgacgcaaaggctttgtacctggggcttcgcagtgggacggaaattgggagtggagggcggtggcctagatcctcacctcttcgtattgtttcacgcggcagtgcttgggagtcagtgtagctccagtcagtgttatcagcaccttcgcactggcgctttgccagggaagagagttatctatggcttgaatacctcggtgccgtcctctcgtttctctgggaaactgcagtacggagatgctttctccagtaatgagaaggcctttggtgtctcttcggggcttctgggactgcagtagagagagaggtggaggaaaacaatgttagactacagggtctttccaagtctttgtgtttttgtgcttatgtgtgtgtgtgtgcctatcggggtgggagagttataaaggaggggtgtcctggatctcctttagtttctctacttggagaattggaagttacatttgtgactcttcagagtttagaagacagtcataagaccctctttttactcttgttttttttttttccaatttgtatgaaaaatgcagaaggatttgaaatttccctgcccaagaatcaacaggaactctgtttatagaccagaaatgtgacatctatctttggtaaccatgcaatatgctctaagttttagacgttctattgtgttctttttccgttctgcaactgcgaacattcagataattttcatggccgttacttttttctcagagcatttacaaacatttttgacccctctagtctagttagaataaacgccggtaaagtagatcttgttatcaagtcggattttggttgttttattaatgaggaataaaaataaacaccatctttgccatggtaacatctgatcttgtcacatgtaaataagtaatttttcattttttgtctggaaatggatggctttataaagttttatgcagagtagttgaactcagataaataattagtggaaagttataaaatatgattagtatgtatgtgtaaaaaagctattttaaaataactgaaattaggaccaggaaatctgtactgtagtcctttttttcctatagactagctgtgtgaccttaagttactttctaaactttgattttttttttttatgagtcaagaactttgaataaataacttcttaggttcctgctggatcaattattctgtgattcagatttgatatatctggtcttcatattgtttttttattttgacaggtacataaataaaggataaaatattttatgaaacaaatcttcaatcaagtataacattttgatgcttggcatctagactcccttgtgccctcactatgccagcggcaactgtagatcatagccaaagaatttgtgaagtttgggcttgcaacttggatgaagagatgaagaaaattcgtcaagttatccgaaaatataattacgttgctatggtatgcccacaagcagatctttaaaacgcttcatataaaggaggaaaaggaaattttaaagtcttgaattcaacccttttggttgatatttttagggattaatttcaccatgaaaagtaaaatttgtcactgccctccagccaa

SEQ ID NO: 588030 - DNA, 4001 bp, Homo sapiens
gcctcctcactgttcctatcacactcacagcaccattccttctcagagcctttgtacctgctgttctccctgcttaaacaaccatcctccaatagttgcaaagctcccaccctcttttttcagatctcttttcaaatatcaccttatcaacaatgtcttctcaaaatatcctaatagaagataagtcaccatcctttatcttatttttctcatagtatttaacatcacccaaacatggtttacttgtttttttggctttttattttttttttttttttgagatggagtcttgctctgttgcccaggcaggaaggggcagtggcatcagctcactggaacctccacctcccaggttcaagcgattttcctgcctcagcttcccgagtagctgggattacaggtgcacgccaccacacctggctaatttttgtatttttagtagaggcagggtttctgcatgtcggccaggctggtctcagactcctggcctcaagagatccgcccacctcggcctcccaaagtgctggaattacaggcgtgagccatcgcaccgggccttatctgcttttctctcaaaatgaaagaaccaagggatccatgagggaatttgtcgattttgttcactgctatatccccagtgcccagaagtatgccacatactccaagtgcctaataaacatttattgaatgaatgaataaaacaatgactggacattagggaggagaactaacgggatttagaagagaggcaggacagaaaaatagtgcagtagttaagatgcatgaacttcagaatcacgaagaggttccagtttcagcaccaccacttgctagatgtgtgatttgggggcacagaacagcctctctgtggctcagtctttttattagtaaaatgaggataacgataataaaagaaggtacctcctggacatcgatggaagcacctgccactgagcctgacatgcaatcagggccgaacaaatgttaagctcttggtggcattggtttagtgaccagcagaagggggaggagtaggtttagatagcactgaggtttcctgtacaaggactagaagctggggaagaagccattactcaggaaagagtaggtatgaggactaaggcaagggcggtacttcagctgcagaggtggcctaggacaggggtgcactgcgtggattccggggccagaccctgactgtaaatccccactccttcattcacaagctacgtggccctgcgcaaattacttgcagccctctgtgcttcagtgctctcatctttcaactggggataacaatacctacctcttacggttattgtgatgctcagtgatttagtttacctaaaccacccagaacaacgcgtggcatatagcaagtgctgtatgaaaaactctccgtgccttcattctcttacaaaattaaaatgaccttcacctcagtctgaaaccccacaggcttcagcagagtaacccccaaagattttcagagctccacccttcctggccccgaagcagagatctgctgagcaaatccaaccgacaagcgccaggcacaggtaatgcactatcgaccctatgattccggacgaattcccaaccccatccaatagcccacgctctactcaagagacgagagctgccattcccgctccctcctcccgcaaaactgtagaacccgccggtagaggccgggagcgcccccgaggaggggccgggaagaggcggggcccggttgcgactcgccgcccgggagcctgggagacccagaggctgcgcccgcgccccctcaccagtagcagctgctgtagacgcaggcgtcccgcggggggctggccggctggtagtggacagcagcggggccattaccttccatggccggctagctgggccagggcccgggccggaggaagaccgactggaccagacgtaggaaagggcgggcttgtagtggcccgcgtgggttcccggcgtggggtgggcggagcccggggggagagggccggggcagtttccgggtggtggggccagtagcgcggtgggcggggccagggcgggactagcagcacgagttcccggcgcgggaagcccgggacgaagtaggcggagctcggggcaagcggcgccagttcctgggagggtggagcccaagcgaagtgggcgggtccggggtggggtgagtggcgcgaactcccggtgggcggagcccgggacgaggaggacagcgcgcttccgggtaggcggagcccggctggtgggtggggcccgggatggggcgggactggaggaccgggctctggtgggcggagtcaggggcggggccccggtgagctttgggagaagaggggtctctggcggcggcttggggaggagctaggtttgggcttggagttgggccctgaatggcgctttgctgtgaatctccgcggggaggctcttccaaccaggggctgagcttctgcgctgtggagaagccaggtgagacactgaaataacagaggtttgggtgtgaaaatccacgcttctgcactcagcctggagtctgcgggagcccagagaagaggggagtggaggttaattccaatatgaccgcatcgaggacgctttccgaaagggatagcaccccaaatctcactctattgtaacttaatcttttaaattggaaggcctgtagctattggctcgaaaagatatattaattccctgatacagtaaatttgaaaaaaaaaagtttaaagagtccatatggtatcctttttgtgttaatcatatattttgttcaattactggcagtctggaagaaaagacaccatattgttaaaatagtgtttagggccgggtgcggtggctcacgcctgtaatcccagcactttgggagaccgaggcgggtggatcacgaggtcaggggttcgagacgagcctggccaacatggtgaaactccgtctctactaaaaatacaaaaattagttgggcgtggaggcgcgcgcctgtaatcccagatactcgggaggctgaggcaagagaatcgcctgaacccgggaggcggaggttgcagtgagccgagatggtgccattgcactccagcctgggcaacagggtgagactccgtctcaaaaaaaaaaaatagtgtttatctctggtgaatgaatgatattaatatcagggactttcagtttcaaggtctttacactttacagtcttctgaattgtttatatttgcaatgagcatagctagctaatcagggtacttcccattataaaaactgagatgtttacattgattttagccatccacagttggattctccaatctcttcagtctcaaagctgataaatcctaaagacttggagcacagttcctgtgtcaattaccaattttattgcctctcagctcctaatacaaacttccacatagcctctatgctatataacaactctggtaaacatttctcctttaaagtgagtgggaaaccctataagctagaagggattggggccctatctttagcctcctcaaacaaaacaattatcagccaataattttgtatccagcgaaactaagcatcatatattaaggaaagatacagtctttttcagacaaatggtgagagaatttgccactaccaagccaccactacaggaactgctaaaaggagttctaaatcttgaaacaaatcctggaaacacatcaaaacagaacctcgttaaagcataaatcacacaggacctatacaacaaaaatacaatttaaaaaacaacaaaaaaaaacaaggtacacaggcaacaaagcacgatgaatggaatggtacctcacaagtcaatcctaacattgaatgtaaatggtctaaatgctccatttaaagtgagtgggacaggtgtagtggtgagaacatccttgtggagtctgccccagccccagactcagaacatggtcccttcctaaccttgcaggtttagcctggcaataacctttcttcagcctcttgacacaaaaaccagg

SEQ ID NO: 588031 - DNA, 4001 bp, Homo sapiens
taaaaatacatacatttctaatttttcaacattcaaaatacagcaagccgataatctaccacaagcagagcttcctacccctttcacccggacacagcgctttgccaagagcacaggcccaagtaaaataaccgatgcaatttccttgtttacttaaagaattgcagaaaacatgttgactgcttctgaggcttccgaaacaaacgaattttcaatacgtaaaagacttcacgatcatgtttgatatgtaagcgtagtaatgattccttcagctagtaaaaatctagttttaaattgattaaatgggttaaatttacactgcagctcattagcataccttgtttgcaaccagaaggaagagggtaaagagagggagaaaagcatcaaaaaggtagtgatggaaaacatcactacctcctttggcggttatgaataatttaaaatgacccaagacgtaaggggaaaagagttcatgaatagaaagaaagggggctaacagtctgaattggccccttccagattcatactgatgtcggagaggaaaaggaatttatttacactgcagtgccttggcagcaaacatggctgcccctgccccctttaaatcgaaataatcttcactccctccccaaaaccatcaaattatggccatgtctctccctgcctcccttccataacacaaacacatcgccttctccctcaaaacagtaaaacccacacctccccatttcacaacaatcacaatcccataaccaccagcttctctattctctagccttgaaagaaagacacagaatacacacaaatacaggaacaaaaggcctcccttcctaacactttaacgacctccatccccttctcttcctcccactctgacgctaagtcgatcgttctcatccctgtcatcattcagttaatttccttccctagcccaatcctgtcttccagtttcctgcgtctatttcccattctcctattgcagcctgcctcatcccctttcctaatccaccttttccttcacttccattcctcatttctcccttcattcccataaaatgccccatttctccagcaaatttatccccttctcccagactcttctggttcctacactccatccccaaatctccctatttatcagtccacccaggtctgtaatctccatgcaactcttctcccctttccctgcccctccccgatccatccttatccccgcccccatcccactttcccaattcccagctcagcgccactccgactcccatcccactccccacctcccctggcccaccccccaattccctccacaccccccaccttgccatctgctcctccgtcaggactcccctcgagccctttcaggccacccgcttccccttccattcctcctggggtctggcgctccatccctaggtcgccccctccccgtcgttccctcctcagcccttcctagcactacacacgcgcgcgcgcgcacacacacacacacacacacacacacatacacacacgcacacgcactttaccttcagtttgttccattctaaccccccggccgtgtcagtgcgatcacaggagagacacggaggcccggagtggggctggggtgcgggcagccgctggggccgcgcgaggaggaggcggaaccgagctaggccgcatgaaatccccgggctagattttccccgcgccggacgcctctgccatggcggccggcactgaggagggccacggccgggccgggccgggcgtgctgcgggaagaggaaggctcgggaggtgggatgggaaggggaggccgagggacgggggtcgccgcgccgccgctgctgccagagaggagcctgcggctggcagcccggcctgggtagcacggtcctcggcgctcggctcggaattcgcacgcctctccgcggcgacctgtgcacagccccctcggcctccgcctccgtgctggccgccgccgccgcctctcccgccgccgccgcgcacaaagcccccccaccccgactctcggggcgccgccgccgccaaatcctcagcccctcattggccgcgggccgcggcgcctgccgggaaatgcagtccctggttcgggacgctggggctccggaggaagcggcgagtcggcggggcggagggggcgggagcgcgaaccaggaacgcccgcggcagctagcgtctggacgactagggagaccgggcgagagggccgaggaacgagggacggggagggactgtacgtgggagagtgacacacaaaacaccccgggaagccggaggaggcgtggaaaggtggggcccgggaggtaaaactgggatcggcgcgttcagtgaggctgattaaagaacaacgcgcaaccagcgccatacggcgctcctcagggtgactcggctctctagctcttaagggttagaagcgaccctcgcacggtccccggtgggtcaccgcgcgagggcggggcagtccaggcgacccctcggccgtctcccgtcctacggctgtcagggaagggctccggttccggtagggtctgcatttggaaagccgggggcgatgcaagaccgccttggcgtcgtctccctctcagccccggctgagctgtcggatggtccccctcccccggttgcaagcagtaggagacccggccggcggcgccggctcgccgagggagcgcctcgacctccccggcaggcgccggccccgcgcgcctcttcctgctctgctgcggcccggaggcttgtgggtaaccgggaggacgacgtcagcgcccgccgcatccccgggtgccccccagccgcgggggaccgcgacggctccgtgaccgtcacgtgccggaggccgcggctgctcgcggccagaccttcgcatcgagggacgtgagggacatttgtcctagagggcccaagataagaacgagaggaagaaccgggaggcaactctccgtcatcctctagccccccgcatcctaggaaacgtatggaaaacaatggaaggttaagtgtgtgcacagtgatctggccctgcaggagtgtgccgaccaggtgatatttcctggggcctggtgataaggatttggaaggttacagcacagagacgtgaacgtaaaaaggaaacagaggcagcaagcaaatgaggaaaccgatactctgttctgagaataaagccattttaccgctagacgtcatactctgtagacgttatagtgctggatgtctttggtactattacaagaaattagatatctctatctttaaatatcacttaaggaaattaaatgatttctacagatcagttatttaaaagggcactaattatgaactattttttttaaacgtaacccggttaatactagatactgagaattatcagtattggctgggcgcagtggctcacgcctgtaatcccagcactttgggaggccgaggcaggcggatcacgaggtccggaaatcgagaccatcctggctaagacggtgaaaccccgtctctactaaaaatacaaaaaattagccgggcgtggtggggggcgcctgtagtcccagctactcaggaggctgaggcaggagaatggcgtgaacccgggaagcggagcttgcagtgagccgagatcgcgccactgcactccagcctgggcgacacagagaggctatgtctcaaaaaaaaaaaaaaaaatctcattactattaatcattaaatatttttaaacgtatgctttaagtagtaccacaagttacagctatcagtaaaagcatactttttatttgtgatatgacattttaaaacacagatggccaaagcgggccaccaagtctagcttaattctatctccaggaaagagggattaaattggtcttttttttttttctatgagcctttctacctccattcttctttttcttcctcctgtgtcttccttgctttgttgataaactgttgccttgacccggcacctgggtttctcccttgaggagaatctagtaaattgtccccagggatctt

SEQ ID NO: 588032 - DNA, 4001 bp, Homo sapiens
cctctgtcccagaagcatctaaatcatgaaacaagcatggggtgggtggtctgggttccccaggcaggggctgcctagaagagaggtaccttgtgctggtcccgggagccttccctccaacctgctccctgggtccctccacacgctctgctcctttgctggtctcctctggctgagtcctcggctctgtccttcactcctcctcagcaccggctgttctgggagctgactggggctccagagtacttggactcatgcttaaacctctcgcctcctctgcccactcagactttggcttctctcaaacgctcaccttttctccatcctctccctgccctcccagacatagcaacctgcaaagctatacccaaataaaggcgcagccatacccagagccgaaataaacagcgacttagctccttctgggcactcctgtaggacacagtcagcttcccctaagtaggaatggttagaaattggcatcagaagatctaagtttgggccctggccacttattaatgaggagctcctgggcaagtcctttacttgctctcactttccatttctttcatttgtgaaatggagctgataactttctggtaaggtggttctgaaccaactatagtcaggcaccatgccaggcgtgaggatttaaccaagatgaaacagacccactccccgccatcattacacacaccgaggcattgagaggaattcctatttcccaggtctcagtttgctgtcggctctcggcctcagttctggctgaagcagacctagagtctgattctggcaagtggtttaaccccaacacacggtttccttatctgtgaagggggcttcttaacccccaaggaagccatcagtgtcatttggggataaacactcttttgccatcacccctccgtctctaggctgttctgccaggagcaggtcctgccctgggctgtggaatctggggctcagaagctgccaggtacccacctcctgccctccttgcactgcctgcctctgccttttcctcaccatgcctggccctagcaggctggctctacacggtcacatatgtgactcccctggcttttggaggtgcagacctttgtcccttccccttggtgtaccctggggtgcaggtggaagagagagagactctggggtgcccacatcacccccaccctggaacagcaggcttcataggcaggacccaagtatggacactctgcagactgcagagggctgtgcagaccggaggtgacagcagttggggttagacatcaccctgagcactgtttgctcaataaggagcttttgttgaaagctggcatttttctttccaattttttttggctttttccatctcccatcttcgcagcatctccaatgcttggagtcttggagttttcaaactcagagactctagaagtcacctaacaacttcgtcgctttacgctgctcctggagggtgagtgacccacccgaggccacacagccaggttaggcgaagacgggtctggagcccgggcccctgactcccagttctgctgagggccccgttctttctgcactgtttcaggtggggagagagggcaggctggacctgtgcagtttgtttccccaagtgtcgcaccgtcctcctcaccctgccagcttcagccaacctgggcagctgactcctcaccctgggctctgtccttgccctgtaagtggccaccttccagccccaaaccttcctggcccttttcatcctgcccaccagcccccatgtagcaggacccagtagagaagggagctgggtctccctctgagcccctccaggcaggactcaccgtggccaggacggtgctggcggctgctgctgtcactgctgccagcgtccagggcaggaaccacctcatgcctggacgtcagtggcacaggcatcgaccgagcagcccagaggatccgaccacctctcgggggagctgggcccagactggccggcccatcaggagcaccagatatgcctcttccgcagcccttggggggttttattaaagcaagatctgacgtcagggtgaaggacaaaccctgcattttcctctgaaaaaacttttcctgcctctctctcttttttttttttctttcttccctctgtccccacctccagcctgagcttggccagcctccccagctctgacagttcttaaagggaaagttacaaggctatgacttcacactagggtgtgaaattctcacagaggagctggggtcatcctgcctaggtctttcactactgtagggaggggggagcatgggagggtgcaggatgtccgaggagatactgttaccccaggcaggcgggtgtgtgggctttgagagggctcccagtgggaaatcaactccctgtcatttcttcaggctgctcctacttctggttttctttttccttttctttttctttttcttttcttttctttttttttttttttttttttttttttgagacagagtctcgctctgtcggccaggctggagtgcagtggcgcgatctctgctcactgcaacctctgtctcccaggctcaagcaattctcctgcctcagcctcctgaatagctgagattacaggcatgtgccaccacacccagctgatttttgtatttttagtagagacgaggtttcaccatgttggccaggctggtctcaaactcctgacctcaggtaatccgcccacatcagcctcccaaagtgctgggattacaggcgtgaggcattgcgcccaaccctacttctggttttcatttgccctcttgcactcccctctacctagctgcaagcgaaagaggtggctttcagtccacccatctagagatgataggaattcacaaataaaatgagctctgaggctcaggttacagcatcaccttcatgacacgtgaaagccacggtaacgcatttgctgtttgccgtctctgctcattggtcagaagccgtttggtgctggagctgtccccacgtgtctctggatgcttgctatccctggggggttgggtttcctggcctgtacccttattgcactgctgccactgagtctcttccttgggcaagaaaggagatgggatgtcttctatgggctgtcctagtccagccctgtgctccccatggggaccgctgccacagcctcctgactgatacccagcctccctgcccaccttctaccatccacacatctcagagcaatccttgaactagcgtcatgtatagatcatcttctggatacaactgtccaaagcctgcccatcacacagcacagagtccccagtcctggcgtggcccctgggccagccagctccctgtacacttcttcctctctccctttcgtgcaccatgcccaaccacaatggcctccttgcaactcctctcacaccttggcaagttctcagcatctccaggtctcagtaggaatactcgacactgaggtttaaatgacagttactccttctcttctcttttcctgtagcttattaacaagggatgctgaagcatgtgtggctgcttggaggtagcagcaggcttgtgttcatggaagaggtttatgatccctatagacatgaccccagaagagatggtgctcatgatttctccatttactgacctggggatgtgcctctgatccaattccggccaatgagacataagggaaacctgctagggtcttctagaaaagattcccttcctcaggaagagaatgaccatctactcattcttttctttccttgtgtgcaaatgtgatggttggagctgcagcagccattttgggtatatgaggctgagaataaaaagtcaacaaattgaggatggcagagtggaagcaaaaaaaaggtctgagtcgttgggacttcatgttgttgttggagccaccattcagacttctcattacatgaaataatttaatattttattgtttaaactgtagttagtctgaattttcttttgttggagtcaagttgtatactaattgata

SEQ ID NO: 588033 - DNA, 4001 bp, Homo sapiens
cctttcctttttaatctctattttcaccttctgtcatcctataattttactttttgcctgtctctttccactaaaatgtaagctccaaaaggagagagatgtttgtctgttttgttcattgttggtatctctagtgcctagagcagtccttaataaacatttgttggattaataaagggagaccactgtgggggaaaaaaaataaaagaaaataaaattttagctgaagaatgcaagcccctttaaattatcaggcccagagaggcattagaatgaaaaaacagtcccgtctcactcccggtctgagctggataattatctcttaaagcccacctgctatatgggctctagactggaaccaagaagccataaaatgccatatgctggacacgataactcataccctatgagttacagtgtacagccaatcactaagcaatggtatctctgtaaaccaataacaattcctgaccaactttgtctcagcccactcttccccttcgcctttaaaaacctgcttgtaaccaaggctgaaggagcactccccaaggcaactgggaaatgagtcctgggcagctgtcctcattttggctgaagtaaacactttaaattataattttgtgccccagcctcttccttttaggtagacaccactattcaatgacatcaagatctgaactgtcctacttatcccaatatcccacccctaaaaagaaatgtaccgaaccataaaaagcctgaagtactccgacttacagactcctgtattagcatcctaagaattatattaccctcttcaatagggagtagtatttttcatatcaaacctagcctgagaacaactgagattcaactaggaaaaaaagaaaagaaaatccattaaagactgagtgatttgaactcaaaaatatccatcatcacttgctaaatcatagacagcaggttatttccctcgactttgctgtgcagacctgtagtggctcaatttctgccataataaaggccgtactagaaagagcaatcctaactaagcgcgcaaggtaaacatcaagctggggccgtcaggggcggggaaacactttctgaatggcggaagctccgagagacgcctttcccagctgctccagaggggaaaggaaaagggagaaagtctgtttttccagaatctcccaaacacagcccaggggcctgctccgcgggcctaagcgcctccacgtgtctcagaagcctagcactatagataccccggggcacggagctgggaaaacgggaataggaagacactttaccccgagaagatccagtccaacaggtcttcttcagccggatgactgtggagcgccaccacaagcagggcctgcaacccaggcatccaggctagacaccaaatcagcaaactttattcccgcgctgccgagtacaagccggcgcctccccggcgcacacagtacacatcagctccgggagacctacccgacccgcccctccagcgccgtccccgcccccgttcctgccccacccctttccccgcccccggcccggctcgcctttctcgcggcgctgcaaccctcccaccacagcccatccagccccgcccagcgcgccgcggtgcgcatgcgtggaggccctcgctgccgctgagcacctcgggaagtgtagtctcttcgcaggtgcggctgggcagctagagtcctgcatcccggtggaatccggagaagtgagaacattcccgccgcccggtcctcattcccatcttcccacctgtccagtcccctcgcactcccgctgcaccccacgcgccgggcttcagtcagagagtgcactgaggaagagcggagaccccctcttcccctcagcaggctgtgccgggggaggcggggtccaccgcccgccccccgccgtcgctctccccgcctccccttccctcccctcctggcgggtgcggggccggtgtccgaagtcaggcggcggcccccgcagcggccgcaggaggggcggctgcggtgggcgccgcgggcgatgcccctgcccggctgctccggcggggggcagtgcgagcggcggcggcgggggaggaggcggggggcggcggctgcggcggctgcagcagaggggccgagagctggcggtggcggcggcggtggtcgtgaagggcatcggcggcggcggtgatggcagagatgatgtgagtgcccgccggctggagacctggggccgcggagcgcgggacgggcggcggcggcgtgcgggagcggccccgggggcggcggagggatgcggggagcgcgggcagagccggagcggcggccgccaaccggccggcagtggctggagccccgcgctgcggcgccgggggagccgggcccggcgtgggggtcgcgggcggcggcggggcggtcaggccgaggggcgtctgcgattgttctcaacacccctcccccaccccatcccgtgtgtctgtttgttacttgcagctgaagatggaaagagccaggcgaaggggaggcggcggcggccgcggccgcggaggcaagaatgtagggggctctggcctaagcaagagtagactctatccccaggcccagcactcccactacccccactacgcggcctcagccacccctaatcaggccgggggcgcagccgaaatccaggagctggcctccaaacgagtggacatccagaaaaagaggttttacctagacgtgaagcaaagctcccggggccgcttcctaaagatagccgaagtctggatagggagaggccggcaggacaacatcagaaagagtaaactgaccctctccctgtctgtggcagcggagctgaaggactgtctaggggacttcatcgagcactatgcccacctgggcctgaaaggccaccggcaagagcatggccacagcaaagagcaaggctccagaaggaggcagaagcactcggcaccctccccaccagtctcggtggggtccgaagagcatcctcacagtgtcctgaaaacagactatatcgagagggacaataggaaatattacctagacctaaaggaaaatcagcggggtcgcttcctacggattagacaaaccatgatgcgggggactggcatgataggttattttggccacagtttgggccaagaacagactattgtcctcccagcacaaggaatgattgagtttcgtgatgccttggttcagctgattgaagactatggcgaaggagacatagaagaacgaagaggtggagacgatgacccgcttgaactcccagaggggacttctttcagagtggacaataaaaggttctactttgatgtgggctctaataaatatggaattttcctgaaggtaagtgaggtgagaccaccttaccgtaatactattactgttccattcaaagcttggacaaggtttggggagaattttatcaagtatgaagaagagatgaggaaaatttgcaacagccataaagaaaagagaatggatggcagaaaggccagtggtgaagaacaagaatgcctcgactagagtgaaattgaactccatcaggcaaaatttaaaatcacaaattggctaaaagtactgatccattatcctttgaagaagtttttcctcttttttggcccgttgttattagtaatacctctagtagttgatacttcaggaagtctgattctcatgttatgttacacatagatcactataattcttacgggaattccaaccttcccagagctaaatagtttagctgcttcaactgctccagactattgaagtatgcaaatcagcacaaaatgtgacattctgacattctaaataccataactaagatttacattgcactatgacataatcccgaaaaaagatacatatacttaaatagaagtgtgactttcccccaaaagtatttcaattctacttcattaaaagctgctaagcttacctgtagggcagttaccacagaaacagaaattgacctccggtatatataaatatttacttata

SEQ ID NO: 588034 - DNA, 4001 bp, Homo sapiens
agagatacctctctgctaggattacctttcctgcctatccaaagtcataatcgtccttcaaaaccacgatttcagaagccaggagctctacaaactaaccctcttatccctaccttgccaagtaagatctgagctctactctctttgaagttgacttctgagaggattttggtaccatttatgaaacttatatattaaaagacaaataaggcatttgtgtatagcactatctacctaattagtgtgaaggcagaaattgctaatcggttcatctttgtatttcccaaaatacctcccacaattatgcagtaaatgcttaacaactgtacaaggaagtaaaggaaatttcagccaccgtggggtaaacagcaaagattaccatctctttgaaggcagaaactttatctgcgacatcctgtattatgccggtagctcataattattgcttttcaaaaccctgatgtagatcttaccagcagtttcacattttaaggtaagaactatctgaaaatgttgataagctatgtcccaaagaactattccacatactttacaattctcaatctgagtagctcccaatacttggccactacactttccattttttaaaatactaaccatttatgaaaaatgatcatttctagttgcagctaatttactacttgatggctaaaaacaagtcacacaataaaagaacgactttcttctttaaaaggtgcattttgcttgtataatacacacagatttggtgaggcaggtaaagtggatttacacataaacatgaactcttgttaaaaaaaaaaaatgcaggtaactgtaaaccaactatttcaggtaaaaacaccaaacggggaaaacaaagataattttggacatgattttttttcccactactattaccagtaacattttaaagcagaaacacaaaatcttgttccacattaacctacacacacacagaaaaaaatttgttaaacttatcaaatagaaaaagaaggcaaaatcaagcccctggaaaatattttattctgaaagagtaaaaatgtcaaaattataacagacactactcttctttggtaatgaaggtttcatatatttaccacagcagagaaaactccaaatcggcagagcaaagaaaggactgtgaacaagactgatcatttaaaggtcgtaaaggtaaggagcaaactacaaaattaaatttttttaaaaaaagaacacgaagatgaaaggagagtctgtaagtcacagacaagataaggactggtaaaatctgcaaggtcactggaacctaccaggtcacaaaaggtggaggtgggggttgcgctgggggggcgggggatggggagctgcagagtcggtgaagaacggagagtgataaaaacatgtcagaaaaagacgttccaaagctggagtccttggtttgcaacgctgaaattggggtgaaagtcagggaacgggcaatgagtccatgtatttgtgttttcagggaggtgttagggaaaggtggaggaaggcgaagagaaggctaaggaagcctaagaactgcggctgcagagtcacggaaacacttcgctccgctccaggatcactggcacaggcctttgccagggcgaactccgggcaagacccgtgaccccaccccagaaaactcccgactcccgggctggagaaggtagccaaggtagggcggaccgtcccccgacgggtcctaggagggtccagcccgggggcggacggcgccgggcgcccagcaccgcggccaaggctcagggcccgtgccccctcccgccctgcccattcgcacccccagccccgcgccgcgccgtccttacccggcgcgaagctgtcggctcccggcagccgggcggccacggcagcggcacctcctcctgcggcgggcgccctcacccttccgcgcccaagatcgccatctcgcagcaggcgcggcggcagcagccacccaggcgtcggccccggcagcccaggccgccagcagccactcggaacccgcacgcggagctcgccgacacccgaccctccccccacccccaccccgtccacgcgccacccccagccgaccccacacctcccttcctcgggagcgcgccgcgtggccgcgtcgccggcgccgcgccctaagcgcgcgcctccccgccggccccggcaccgcgcgctacgccgcggccgcccaaagcctccaactccggacccggaatccgcctcccccgagcatgcgcagcgagggcgctcggatgctgccttaggaaaactccgctcctccgggtcttccgagcagtctagcggagggggacggacagccaatagtagggaggggcggggcctgaacgtgtggaaggggcggggccgccgctgagatttgggaagaggctgctctaagctcgcgctgggcactgctaatttgactttccggtcggcggctgatcccggagcaggacttcttaaggtccgggggcaaaagtaggctgtccataaatactccttgacctagctgggtgacctcgaacacattgcaagagtaaataattgcatttagccattggtcatacccgaagactttcagtccattttttattaatcaaaacgttcatctgtggaagccccaccacctagtcctcactcacatcagcccggtgataaagcagatacttattgaccgagtatacgtgtccgcacaattaacgcacacaacaatctgacaaagtagtgtctactgtctgcattttacagaaaagtcaactagtttagaaaagtactgttggttatgtgtattgcttttagaagaaaggccaatgtgcaaatagaagtcagtgggaccacattgcttaccaggtgacccggtttctacttcagagaagcagaagccttcaggcatggatttctacagcttttgcccaaccacctgaccaacccccatagattatatctacgtccacacccagacttactagttttccttctatctcggaggctagatgtccctgctcctctccactgcctgctccccactgtgggcggtccttggcacatctttaacttcaccctctccactgcctacaactcctcagcataatcacgttttaagattaggtcctaaattttcccttgattttaaaacctctggttctctctccccttccattttaactgagctttttgaaagaactgtgtaccaaaaacaaccccaacacttcatgagtgtgtacagaattcaacaagtatctcttgactgaacaatgcacattcccgcctacctccatgcattagttcttgtcctctggcttcatagttgaaattggtgcacattatatccacaaagatcattcgaaaatatacatctgtgtcattccactgcttaaaatcattctttggcttttcggagctctcctgacaaagattaacgtgatattcaaggttcctttgatgctcacatgctctatctctcctgttatgaaaaactcttcacagtgccccatatgtgcccactcatctctgctttaaacatgtactaagattttcttcatctttttgcttttgctgtctggtccctttaaatagatgcaataatgtgcttacaaacacgtcctcagaaattccgtaggtattccccagcagggatctggactccttctccagaatgcatgcaggcctcctcttcctgctctgtgtctcactttcagctcccctcattgctcaatttcctccccgttcagaagctcttagtactcacctagtcctcaagctgacacccaatattgaaccagccttttgttattgactgtttggtttcaaatgaacaatattataaatagtattccataaccattgttcatgtccttattaactgtcttagataaattattaaaagtaataaaaaagtatgaacaagtttagcccttttgaaacatattggcaactaccttccagaaagagcataggctcaggtatcacatcgcccagcatcaaaacacagctctgcc

SEQ ID NO: 588035 - DNA, 4001 bp, Homo sapiens
acaaaaatagccacaaataaaattgaaaaagagcaccagtaccacagagtgtagtcccatattggtgtactttctaggaattgtcctcatttcgcttataccacctgtttactaagttattttaaaaccaaaaaagctctgacatgttagaatctatagacttccatataagtaatttttatagatgtaaaatattgcttcgaaatctgctagtagcatataaaagtcaaaagaatgtattcctgagcatactatttcattctgctcctaagtccatgcagtgactgttcaagtggtggtttccctctgcccaagtttagccttgtattccagtttataactgaagtgatccctgtgtaaaaagacttggtagatcagatgacaagcagcaaagtagccaacgaagataccaagtacaactaaagttaacatggtgccccaccccttttccaaaggcttgtaattatatgagaaattagatatggagatattgcaagataatcagaaagggcactctaaaagtaaatctgggccccataaagcttactgaatcatgctcggggatatatatatatatatatatatatatatatatatatatatatacaaagtcatttgcctattaggatctttactttgagtaaagcacttctccagcagtgatcattaatatgtgggtacttttgagcagcagcaactcccatttcactagaattagcaattttttttccccagggaacaaaagaaaccatccaaatggcaacacacacctcaaattcaatataataataaaggaattttagaagatgtgacaggaatcctctcctactcactgaaacaatatcactaaaaatggggaagcggggaggggggttgtggcatgccaagagcaagaagccagtaaggcagagtgggaagacagaagggatgaggtgatcgaaaccactttgctgtccttcccttgcttctcacttccctcccaccctagactgagattgcaaattttaaaaatgcaagccccagttcaaaagaaacccaaaaaactggaagagtgtgactagggttactaccaaagcaaccctgaaagatttccgtgcaaaagcaaagcagtggggatgtagtagcagcagcaagcctcccttttcccccacccattacagtacctccagatttgcccgagctgcaagatgtggatgagtgactgcaggagccagatgcagaaggagcaggacgcagacctgtgcttgccactggcccgggtagccccgctgctgttgctgccgctgttggccgcggcgatgttgctcttgctggcgttagatgcttgcctttgcggcgtggaaggacgagcctcgccttccccggctgcagacccaccgccgaccaccgtcttgcaatcggctccaggctgcgggcagctggaggcagcagcggccgtggcgctgtcctcggtgctgaaatcgtgcacaaaccagcggaagctgaacacttgcaccgacagagagccgagcaccacgaagaagagcgtgagcccgaaccaccagcgctggccgcgcaggtagtagtccacggcgagccagacgtctgtgcccacgtccgcgaagtacacggccacggcggccaggatccagaggcagtcccacagtgagtagcgccgctgctccctgcccaggcgcaggcacagcgcagccgagcccgccccgccgccgcccgggccggcgacgccgccggagccgcccgagcccgcggagccgccactcccggcgcagcagcagcagcagcgcgagcagccgccgccgtccgggcagcagccgcccccggccgcctcctcgtcctcggctcccgaccccgacggcaagcctggagccaatccctgcaccgagcccgagtggtccgagttctgcagcggggtgaacgccacgtcgctgcttttcttcattttcagcctcccgtctgatttagcggccatgatgcctccacaccggaggagagccctcctttatctgacacctttccccgctgtctcctcctcccgccacctcctcgcctcgccccggcttccctcccaggcggtgcggctccccctcctcctgctcctgcgtcggctcgcctgccgtccgccgccgcccgccgcccgccgggctgggcgctgggccgggctagcggcgcgcctggggccggcaggagcgccgcctggctgcctgcgcggagccaagctgctcgcggcgccccgcgcgcgcccctgcccgccgcccgcgctcctcgccgtcccggcttcgctgctgccgcccgagccgccgccgccgccagcagcaggagcagcagcggccgccgcggcgctcctcggacctgcacattcctctcctcccctcgcgcgcgctccctcctcccgcttcctctcctccaccagctgactccgagggagaggatgacctcatcccttctcttccagctgccgtcgctcccaccctggctcgggaggggcgagggaggaggagggacccggaggaggggccgggaccgagaggagcggcgggcgggggttgggggactgccctggcgggtcccaagggccgggaggagcggccaagggggcctgagggtgacagtcgaaggcccccactcccgggatttcggaacgctgggtggatttgagcgacactgggggagggggaggagcgcgctgagaggaggggtccctgcgtgcagccctcgcggaggacggcggagagtgggcacggacgggtgtggcggcagcaagggccagggaggagcaggcctctttgtattccggtcggagccgccagcacctggagaagggctgggagcgcggctctggccgacgatggtggggagaatgggtgtaactcgggcgcccgggctcggaggccagcagcggcagtgggcgtgcccggccttgccagagagtgcaggggagagaaaggcgtacggggctcggagcgcggagcctggtgccgcgccggcagctgagggcgggcgggtccgctgggagccccgagccagcgccctcggtggaggcagccggcattccgagggctcccggcttctccggcgggcgggggtgcctgagctcaggcaggtgcggaggcgctcccgcccttcgcggcccaggcccctgcccgacgccggggtccctcgcacgttctcggcggctggaaagctctgagccgggaggagcggcagcccagtgggcaccgcaccggccctcgaggcgtcctgcggcaggtgggaagcgcagcacccctggcggcggcgcggggcgcggccggcagccgcgggaaaccgagtgccaccccacccccggcccgcgggcggggagtggcggagcccggagcaggcgccacctcccttactccttactccaaaactagaaataccttctcttaaagctatagggattgcaaactagctgtgtggtcccacaactccagaaatgactcgaaaaattaaatctgtgatcggagtgattcaaggagaatacaaaatatgttgtggttttaagagatttttaaaacctcaataaaatataggatcttcatttttttaataaggaaacttaagctttgatttgtctcacttagcttttgcaaatgtaagaaatagagagtgtaattcttaaattatactgtgactcacatacttgggaggtaagtgaggcaacacgagttacactgccactaggagcaccagttggatcttctaaatcaggaggcaaaccatgacaccccccacccacccccgcttctctctggtaggcgccaggtgagttcgaactagtacacagtgccattcttaatgagtaacattatgaaatagaagtgcacggatttctctgcacgtggaaagagccgcctcacgcattgtgtgctacgtatcaagggctgtgtcatcaccaacctggataaagtggaatttgccccacgctctggattcattgccttttattctcacagactggtgcccaggaccctcccttggtt

SEQ ID NO: 588036 - DNA, 4001 bp, Homo sapiens
ggcggagtttgcagtgagtcgagattgggccactgcattccagcctgggccacagagcaagactcttgtctcaaaacaaaacaaaacagtaaccaaccaacacagtgtccccatcaccagcaagagtctcctaggagcaggctgggagccagcagagcctctggcaacagggacaggcattcactaaatgacattgtcagggctttccagagctgttgggcaatatacgacatgtgtgaagcgcctagcatcttgtgcatcctcgagaacgatgaaacctcctctctggtttgtttgcttgtttgtttttgatggtggttacgcagtggagagagaatgtgcactccgcagtcagtaactccgcactacgaaaccgttagtccctgtggggtcacagctctctctgtggggtcccttttctcctactttcacatggggaactccctggcctggaactctgggcctccccaatactcctagcacggcctcctcagggttgtctgaggctgatcttggaggcggtgcgctggtagaggcaccgcacacaggcatcgtttcacacaactgttacttaggttttccaatagtaaagttctaagtggatgaatgaacacaagccgcggattttagggaaactgggaaaactgccctgaggtacagctgcagacgctgcagctctagaccgcggggtccgggctcaggcagcccttagcgcccaggctgggtccggctgtcaccaccccgagcgtcctgcggcagcctcccttgcacgaaaagccttcggtgctgcagggctggggaatgctgacacccagtccgtgcccagctggagggcaagggaggacacctggggtgggtgccgacccccgcaggtcctgtctcagcccttccagtccggggcgcggagccagggcgcttgcgcgtcctccgtgtgcgtcctgctcggcgcgcctcggaagcagcgggacctgcggggacgcccgcgaactcagggaaaagtcccaaggcggcgttcccagggtaccccctcttccaccccagggactctgcccgggaaaaagcttccgcagggagcccggcggaagtgggcggagacgctcctcccggcactgaaggagttacgcgttcaaaccagaagggcgcgaaaaatggggccatcttgctccgccgcggctggcgggctctgggttccccctgcgacggaggtggcctcgaagggccgcgtcccgccccgtcctaaaccccgaagcggagtcgccgtcctacagggccgcgtggatgcggagccctgtccccctccccccgccaccccttctgcgagcggcctccaagtcgcagggtccccctggacggccgggggtcgggggagagcccgggcgcccccagacttgcgctcagcacatcttggcatcgcagcactttgcaaagcttgtgatggaaggaagggcggatacatctcccctgcttctgcgaggggatcttgcatgcgtggggcggggggatcgtgcatgggcgggaggaagtcaagcaccagtcgggaggggggggaaccgagcatgggtggaggaaaatcatgcatccttggggggatggtgcatgcgtgggcatctactaaggacgggaggacgtgctctgcaggtgggatggccaccaccgtgcgtcaccggcgcgcagtgctgggcgcaggctggggcagtgcccgcccgggcataggcagcctgtgcggctcccggcgccggggtggggttaggggctgcaggggtgagcacagcctcgggctgccgcactcacgcgcgctctgctcggccgcctgcagcagggccgagagccccaggagcctcgcgtgcatcttccgtgccgaccccgcagcctgcgcccgccccttcccctgcacgcggccccgcgtcggggaggtttccggcccggggcccgactgcgggtggcatttctggctaagccgttaggcgcgaattgtatgtctggtttattcgtagtggccagcaggggagggagggaggatgcttggggtttctggcttccagggtgggtggggacgaggtggtggagtccagctcaggtccgggctcctgataagggcagaagcgggttctgcgctgcccccaaccctgtaaccgccaggaaagcgcttggtgagcgtcgggactgcgcaggttcctcgggaggtggctaaactggccaccgcctctggggccgcctaaagcaagtccgttaaccactagtcagggaggaatactgtgtttgagtaaatatatgtagagttgggttagaatcattgattgggtctttttgaaatcttacagttctgtgtccagaaaacacagggcacgttacccggtatcgtggtctacacctcgcccacaaatccatcccaggctgtatcctcatggaagctttttccagatgtgcttgagggttaagatcgcaatgtgcaagaagaaaaagtgcacattggaaaaccttctcttcggagatatctatatctatatttatatatatttacagatatggagatatatacacacacgtatctgaaaacattctgacgttttaaaaacggtaagacagacttttattcagaaccatttccttagatgtaagggactgcactgaggttttgcagcaggggagagagattggggtccgaaaataataaggaaaagtggggatttatagccaaggagcagtgtgggggacggtggatggaaagtcattgagaaggggacatcaagtgggggttctggcttccctgacctaacaggattcctgctgagggtgggccaagttgatccacatcggggatgggggtggggtggagcaggtgttggaatttggtcagatatggagggtattcagacacctgaggtggggaattgggattaaactgacttagcaggattcttgctaaaactagactctgcaggaacagaggaaggaatgcccaggttgggcccagtcgtgcagagagctcggaggaggctgtccagagtctgatcagggagacattctttgtcattcatgtatatacccatatattgtaataggctgttcttgtatgactataaagaaatacctgagactgggtaatttatcagaaaagaagtttgattggctcacagttcttcaggatttacaggaagcacggtgctggcatctgctcagtttctaggaaggccttgggagcttatgctcataacggaaggtgaaaggggagcaggcacatcccatggcgaaagcatgttcaaattaacataagaagaaagagaacttggccaggcacgatgtctcatgcctgtaatcccagcattttgagaggccaaggcaggcggatcacctgaggtcaggagtttgagaccagcctggccaacatggcgaaacgctgtctctactaaaaatacaaagattagctgggtgtggtggtggacacctgtaatcccagctacttgggaggctgagacaggagaaccgcttgaacctgggaggtggaggttgcagttagccgagatcgtaccattgtactccagcctgggtgacagagggagacttcatctcaaaaaaaaaaaaaaaaaaaaaaaagagagagagagagagagaatttgaatagtccagtgagtgttagagaaattaaactggtagtcaaagactattcaggtctaggtacttttacagattaattctgccaaagtttcaatgaacagttaactgctacctaatataatttgctccaggaaacaaagaccgaactttacccagcttattttaaaagactgctgtagttttgattgtaaacaaagatatacatagaaagaaaattattttaatgacaagcacagatgcaaaaatcctaggtaaaatgataaattcaaaatatattaaaatagtattatatgataaggtgggttttactatgaattttcacaacccagaaatcctttgatgtcactccattatcattttgaacaagaaaaatcctttttttttct

SEQ ID NO: 588037 - DNA, 4001 bp, Homo sapiens
aaaccattaaaaagacagcagactttatttcagctaacctgggtatatctgttacctgaactactaaatgcctaaaatctcctactaagcttggagtcagggcagcctaggcaaaatgtcttctcacagaagccatgcacttgaagagcttgtccctgtgtaatttatcttcagtaagatttttttctcttgcaaatgctctcacctacaactcactgtttccagaatacacacaagctaatttaagtaagagggcacagatgtacccaggtgtgaatgggttcatttcctcagtttagccagtgaggcagtcagtgaaggccacggcagaaagaacacctgcaagtggtttgtgagggactgaactgggacacgggaaatttacaaaacgagaaagggccgcaaagccaagcttgcgtcttgtgtaaatataaatcacttacacactggcctggctaccaaaaacatcgtttccccagaataggtatccaggtggctttaactgattttctggaggtgagagttaacaccaaacgctcgcgcccatcacattttatcccatttttacctgtcgctaagaaaaggacacgtctaatccagcaaaccaaaaaaaaaaaaagtcttttttccttctgggaaagcagtggtttggagtcattcacaggggctgggagtgcaggagggggaaggggcgtggaatccaggagtgctcggaggcggcagcaagggtttttccacagggccccacgcaggccactgcagagggagaacgggggaagaggggaggatgtctcacctgggaacaaacccgaatgcagcggctggaggagggaaggctccccggggccgcgagctggggtgcagcccagggcgcccgcagctggttacctcgggaggcagggaaaagggacgcttgggaacggagctctgcagaggggacggggagggcaggttggggcaagagccccgccgagtgcgaagcggggacgaggacgggccaacggcaggtctcggcctccccgggccaaaggcgtggccagggatccagatcaaacgccggtcttttggagacgccaggggcggcgcgcggccggtccctccttcgagccccccgcgctgggccctttcgaggggccgccccgcgaagcaccgggagggcggaggggggctcctcagggccggcccgcccccaccccgcagtgctcttacctccacacctgccccatctgcagcaggtggatgaccgactgccagatccacacggagaggcgacacaggcgctgcgcccccggcgtgggggagaccctcacgcctgggccaccgcgggccgcgccgtggacgtagccggcccccatcatgggggggccccggctggtgagcccctccacggcgcccagcccgccgcccgtgtagtcctgcacgaaccagcggaagctcaggctctgcaccagcagcgacggcaccagcacgaagaagagggtcagcccgaagtagacgtagtcccccttgcggtagtagtcgagggccagccacaggtcggtgcccacgtccccgaagaacaccagcagcgccagcacgatccacaggcagtcgagccacggccgctccacctgcggcggcggcggctccggccgcgcggccgagggcgtcgggggttggcggccggcgccgggggccgcgggaggctgcagcggctggtcccccccgtcggcggcggcgctgcggcgcggcttcctgcccaggagggagcgcaggcaggcggagcggcagccccagtagcacgaggaggtgttgcagcagtggcagatgtgcatcgagctgctctcgccgggctcgctgccgtcgccgccgccgccgcagccgcctcccccgggctccccgtcctcctcgccgccgctgcccaccgcctcgtccaggttgtgcagctgagcgaagcccacccccacgccaccgccatcggatttcgccgccatcttgactctcttcccagctccggaggttgggggggagggacggcggggggggggggaagaaggcagggaacggggagggggggaaacgaatggagaggaaggggggcggggaggaagcgggggagcaaacgaacgaggggggagtgggccagggaaccccctccgcttccgggtagttggcgtcacttccgggcgagccccccaatcgcacggcgcccgcagctccccagccctaccctcccggccaagatggccgccctcctgtgcctcagctgctgggcgggggaccggggggttctccccgccagggctccccttcccctcttccgttgaccccgaaacccatcaggttgacccctcggcgtttcagaatccggctggcccgagtgaggcggtccaaagtgatccctggagggggcagtgccagacgttttggggtccccttcctcagcgtcgcagctcacagctttcctcctggagaaacgccccctaacaccctcccggctgctggtggaggggcgggacctctgagggaaggggcggagctagtgcaaagcaggtgattacgtgtcacttccgggagatgggatgacctcattgtgtagttagacaacacccccccccaatcaaaatgtctatgtctcacctctttggctgtttctattttcttttaaatttctcttattcttctcttattttgagggtctttaaaaattacataagtcagattttcacaatcaagttactgattctcacttccatttagacacctctcctcttacctctgttgacctcctgattttcctgtcactgacaacttaaccaccttttgtaataaagtttccatcattaccttaaaaaagcttcaggcaaaattcaattggaaatcagcctggttgggtcttacatgttggagcaaggaatgaatgggcatattgtgaccttgaatatattttctgccctatggaaatatattctaccaactttttttttaatatgcaatttttaaattctgtgatcttaatttggaaaatgcagaactagccagggcttaacctgtatcaattatttgttcaggttatttaaatgtgtaaggagtgccttttagaatttttttggtgctaaggcgctgtgggtaaacattgctttaaataaggaaaaaaatgttatcaatgtgctatatcattaaagtaggtgcaggatacactacttaaacttagctaacaaattacaaaagtgaaacagcactgaatggatttgaattacaatgatcttccagtgaaagtatttttgaagccagatagccaaaatagggcaagctacatggttacagttgttcctgatcagatgaaatgaacattttacagttaaaaaaaagaatgagggggaaaaaaatccctgaattttctcattgacttccctagatttttgaactcatttttgtgattctgtctacttctccattcactaaagtcttctaataatgccaataactgtctttagaatgttaagagtacaaattaggtaatatttatatggctggaggttctatggcagaaaggtgcgtttgacaacttcaatagttactttgatactattgaatactatggcacctatgagttttgggagtggcagggtagatggggatactacattttaggacacagcttttcatgagtatatatgccagtgtgaaatctctgaagactttagaaaaattactaatagtgaatttttactcccatacattgggaagaggggagtgattccaaaatcaacttttagaaaccagccatataactgtatccatgtatttcatgctatgatttaagcctcatactccctatggtatgtaaaactcatactcatatgtaagcctcatactccctatggtagtaaaacttaaggccagcaggtaaagattatttctgcatatagatgggattctgtttctttgctgaatttgaatgaataacaccttacatggcataaatatagagtaggattgcccaggtatgaaccccaatt

SEQ ID NO: 588038 - DNA, 4001 bp, Homo sapiens
cctaaaacttagagtataataaaaaaaaaaaaaaaatgagatcatgtcattttcagcaacatggatggaactagagattatgataagtgaaataatccatgcatagaaagacaaatatcacatattctcattcatacgtgggagctaaaaagtttatctcagccaggcatggtggctcaagcctgcaatcctagcactttgggagaccaaagcaggaggatcacctgaatcgcttgagttcaagagttcaaggttacagtgagctatgatagtgccactgcactgcagcccgggtgaaagccagaccctgtaagtaaataagtaagttaagtaaggaaattaattaagccaaagaataaaagaaggggagtgcccagattctcaggaatctggtccagaaattactgttccatcctcttctccagggttcactgactttccagcagagttcttaaaaagggaagatgtgcaaagcctcctgcctgaatagccattaattgatggctatcataaatacatattgacagattgaaatgcctgatgtaggagatttggttactttaagtattttttgaagggtatactgtttaacttcccattgcaacaggggataacttatatgattatttcagcgatgattttttgaatatttttccattaaaagtacaactgtgtgaaacaaggcaaagacatttctcacacacaaagcagatgtcattagccactctgatacactatgctgctgattcataaaataggtaagagcagatcgttttcttcatcagaaatatctggaaaaaaaaaagccaccaagcactgtatgtgtcaatttctcacctttttttaaaaaaaaaaagagtgggctgctacagtggatatgttctacatctctttggggcagtgattacatacaattgtcataactcgatggaactgtctacaggatctgtgtattttcttttaagtaatttataactcaactttttttatgggaagctgtagttaacactggatagttaatacttggctgataagaaaccgacttgttacagagaaaatgagtcccttccatcttgggcacaaaacggctccacaagaccagcctagctctctgggcaggcaggtaacactggcaggcagaggcatgctccttgaatctcactgagggggacaagtgttagtgcgaggcaggtaggagcaaggccgcacacgcagactctgtcatctgggcagctgcccaatccccgtttttcatttgtaacaaaaatagtgtccacctcttaataatgttctgaggattaagggcgttaagtcggatgtttgttgaaagcacttaggcatagtaggaagtactaagtaaatatgtcttaccactatttattataaaagatgaacaggctggcccggcgtggtagctcacgcctgtaatcccagcactttgggaggccgaggcgggcggatcacgaggtcaggagatcaagaccttcctggctaacacaatgaaacccggtctctactaaaaatacaaaaaattagccgggcgtggtggcggacgcctatagtcccagctactcgggaggccgaggcaggaggatggcgtgaacccgggaggcggggcttgcagtgagccgagatcgcgccactgcactccagcctgggcgacagaccgagacttcgtctcaaaaaaaaaaaaaaaaaaaatgaacaggctactactactactactacacacacacacacacacacacacacacacacagagccactgcctaaaaatctggcaatccttcctgacatttattactgaataacgaacggttaccaaacctgtctcccaaatcacaagactcttccagattaaaatgtctctcgcccacttggatccactcgcctgtctaggacacaaacccgtgaggcaccagcccccgtgacagaggcagattccagcttcgcctcacgccacctcacgcctcgcgccagccttcccaccactgcccgcgcagcccgcgcggcgtcacgtgacctctagttccgcaccgccccccccaccccccggcctagctgccggatccccgccccggctcgtccgcggtgtcacatgacacctggaccagccgctggccaatcccctccctcccgggttgcgaggcatcacgtggacgctactcgctatccccggcctgttggcttcttccgcgctggagtatccagataggcgacacgccggcgggcggctgaggcgggaatggctgctgtactgcagcgcgtcgagcggctgtccaatcgagtcgtgcgtgtgttgggctgtaacccgggtcccatgaccctccaaggcaccaacacctacctagtggggaccggccccaggtaaacgtccctctccaacctccccaacgttcgcagccggccccggagcccgggctttgactgatcgcggctgcgcgggcagtggagagcgccgcgtcctgtccctagctgggcagccccgcgcctagcagccccgtcgggactgcacgcagacactcggatctcgaagctagctaaaatacgaccaccccaggtgatagctctctaatttagggagaaatggaaaaaaaaaaaaaaaaaaaaaaaaaaacttctgttttgaaacccgatttactgttcttgatgtttgaatgccagggtgtgcgtgtttaaactgttgagaaaattcggatgtcaagagtccaagaaagcgtttactttgctcacttgactttcactggtgttttgcccagagtgtaacttcccttctcaaaagcgattaattatgttgaggcgatttcctcaactcagcagcagagggcaggattctcctggcttccaaattggttctctgcagcctgtgggctcataagaggagctgacataagtaatttggggaagttttttgttacaattgtgtgtgaccttgtttgagtttaatttgcagacacagtaacacacctgtatttctaagaagatacttttgctcttgtttagctgcattctgttttagtggaattatgcaggaatgggagatttggtttactgcatagtaagtcttaggcatttagcaacttttgtagtctttactggatgaacccagataatgtagtttctcttgagcatagaatttaattgtgcagtcaagacataaattatttttaaaatataattgattactaaaaacgatttagtaagtacagttaattgagttttccttggaagtgtctactgtttggcgtttttccagtaaataagaattttagaagcagcagacctgcaaagtgggcaggtaaaagattaagttcagagtaaataaggcagggtcaggtagttaccaaaggtttaggctgccaccagaatctaggaggatagagaattaagcaggaaaaatgccagatctctagggtacagtctgtcttggctggaagtccctcaaccaagtaaatccataggcggtctctctacagtgtgtcatcttgaactagtcaatacctcagacaaaagatgcatattatcagaattaccctggaaagtctcttagaagaacaccatgttggagatcagtgtattgtctcagtaagttcagcacaacctgccttttttccagcgttgaaacagatggctgattctgtttgaaaaccaggtgaagaaattggcttgtgttgaggggctatattgtatgaaaaatacatactgtatctttaaacactataatcacactcaacatagcaaagtgctagtgctaagagagacttaaagactaactgagggaaaagcagatttatagtctctcgtcttaaattacttaacactgttgctcacataaattaatggagtggaatggccagtggaattacttgcactatgtaaattatttctccatatagttgaactagagagtccgtatagttgagctagaaataagtgtagataatgctactgtataaagtaaaaggtgtaaagtaaaaggtggctagaagttaatattaatt

SEQ ID NO: 588039 - DNA, 4001 bp, Homo sapiens
tagatgacacattagtgggtgcagcgcaccagcatggcacatgtatacatatgtaactaacctgcacaatgtgcacatgtaccctaaaacttagagtataataaaaaaaaaaaaaaaatgagatcatgtcattttcagcaacatggatggaactagagattatgataagtgaaataatccatgcatagaaagacaaatatcacatattctcattcatacgtgggagctaaaaagtttatctcagccaggcatggtggctcaagcctgcaatcctagcactttgggagaccaaagcaggaggatcacctgaatcgcttgagttcaagagttcaaggttacagtgagctatgatagtgccactgcactgcagcccgggtgaaagccagaccctgtaagtaaataagtaagttaagtaaggaaattaattaagccaaagaataaaagaaggggagtgcccagattctcaggaatctggtccagaaattactgttccatcctcttctccagggttcactgactttccagcagagttcttaaaaagggaagatgtgcaaagcctcctgcctgaatagccattaattgatggctatcataaatacatattgacagattgaaatgcctgatgtaggagatttggttactttaagtattttttgaagggtatactgtttaacttcccattgcaacaggggataacttatatgattatttcagcgatgattttttgaatatttttccattaaaagtacaactgtgtgaaacaaggcaaagacatttctcacacacaaagcagatgtcattagccactctgatacactatgctgctgattcataaaataggtaagagcagatcgttttcttcatcagaaatatctggaaaaaaaaaagccaccaagcactgtatgtgtcaatttctcacctttttttaaaaaaaaaaagagtgggctgctacagtggatatgttctacatctctttggggcagtgattacatacaattgtcataactcgatggaactgtctacaggatctgtgtattttcttttaagtaatttataactcaactttttttatgggaagctgtagttaacactggatagttaatacttggctgataagaaaccgacttgttacagagaaaatgagtcccttccatcttgggcacaaaacggctccacaagaccagcctagctctctgggcaggcaggtaacactggcaggcagaggcatgctccttgaatctcactgagggggacaagtgttagtgcgaggcaggtaggagcaaggccgcacacgcagactctgtcatctgggcagctgcccaatccccgtttttcatttgtaacaaaaatagtgtccacctcttaataatgttctgaggattaagggcgttaagtcggatgtttgttgaaagcacttaggcatagtaggaagtactaagtaaatatgtcttaccactatttattataaaagatgaacaggctggcccggcgtggtagctcacgcctgtaatcccagcactttgggaggccgaggcgggcggatcacgaggtcaggagatcaagaccttcctggctaacacaatgaaacccggtctctactaaaaatacaaaaaattagccgggcgtggtggcggacgcctatagtcccagctactcgggaggccgaggcaggaggatggcgtgaacccgggaggcggggcttgcagtgagccgagatcgcgccactgcactccagcctgggcgacagaccgagacttcgtctcaaaaaaaaaaaaaaaaaaaatgaacaggctactactactactactacacacacacacacacacacacacacacacacagagccactgcctaaaaatctggcaatccttcctgacatttattactgaataacgaacggttaccaaacctgtctcccaaatcacaagactcttccagattaaaatgtctctcgcccacttggatccactcgcctgtctaggacacaaacccgtgaggcaccagcccccgtgacagaggcagattccagcttcgcctcacgccacctcacgcctcgcgccagccttcccaccactgcccgcgcagcccgcgcggcgtcacgtgacctctagttccgcaccgccccccccaccccccggcctagctgccggatccccgccccggctcgtccgcggtgtcacatgacacctggaccagccgctggccaatcccctccctcccgggttgcgaggcatcacgtggacgctactcgctatccccggcctgttggcttcttccgcgctggagtatccagataggcgacacgccggcgggcggctgaggcgggaatggctgctgtactgcagcgcgtcgagcggctgtccaatcgagtcgtgcgtgtgttgggctgtaacccgggtcccatgaccctccaaggcaccaacacctacctagtggggaccggccccaggtaaacgtccctctccaacctccccaacgttcgcagccggccccggagcccgggctttgactgatcgcggctgcgcgggcagtggagagcgccgcgtcctgtccctagctgggcagccccgcgcctagcagccccgtcgggactgcacgcagacactcggatctcgaagctagctaaaatacgaccaccccaggtgatagctctctaatttagggagaaatggaaaaaaaaaaaaaaaaaaaaaaaaaaacttctgttttgaaacccgatttactgttcttgatgtttgaatgccagggtgtgcgtgtttaaactgttgagaaaattcggatgtcaagagtccaagaaagcgtttactttgctcacttgactttcactggtgttttgcccagagtgtaacttcccttctcaaaagcgattaattatgttgaggcgatttcctcaactcagcagcagagggcaggattctcctggcttccaaattggttctctgcagcctgtgggctcataagaggagctgacataagtaatttggggaagttttttgttacaattgtgtgtgaccttgtttgagtttaatttgcagacacagtaacacacctgtatttctaagaagatacttttgctcttgtttagctgcattctgttttagtggaattatgcaggaatgggagatttggtttactgcatagtaagtcttaggcatttagcaacttttgtagtctttactggatgaacccagataatgtagtttctcttgagcatagaatttaattgtgcagtcaagacataaattatttttaaaatataattgattactaaaaacgatttagtaagtacagttaattgagttttccttggaagtgtctactgtttggcgtttttccagtaaataagaattttagaagcagcagacctgcaaagtgggcaggtaaaagattaagttcagagtaaataaggcagggtcaggtagttaccaaaggtttaggctgccaccagaatctaggaggatagagaattaagcaggaaaaatgccagatctctagggtacagtctgtcttggctggaagtccctcaaccaagtaaatccataggcggtctctctacagtgtgtcatcttgaactagtcaatacctcagacaaaagatgcatattatcagaattaccctggaaagtctcttagaagaacaccatgttggagatcagtgtattgtctcagtaagttcagcacaacctgccttttttccagcgttgaaacagatggctgattctgtttgaaaaccaggtgaagaaattggcttgtgttgaggggctatattgtatgaaaaatacatactgtatctttaaacactataatcacactcaacatagcaaagtgctagtgctaagagagacttaaagactaactgagggaaaagcagatttatagtctctcgtcttaaattacttaacactgttgctcacataaattaatggagtggaatggccagtggaattacttgcactatgtaaattatttctccatatagttgaactagagagtccgtatagt

SEQ ID NO: 588040 - DNA, 4001 bp, Homo sapiens
gtggtgagtgggagaacaacatcttactaaaaataagacagaccttcgttggagcgacaaatgctgtgaagattgctttgatgcatcctgactttcacaggaatgacaacctttatgcttcgaaaatgtgggagatcacattaagagatatttctttacgggaaacagcaaatagcacgatgtatattcataaaagtactgactccctctgcattccgaagcatggttcacaaaggctatctattcaaagcctgttctagaatgctcatagacatccccccaacccccagtaaggaagcgcactggacccaaactccaaagactttgggacacttagacttaccttaaccaaatctcattatcattcttgtgctttggtttttgttcctttaaatgacagaagtaattcctgcctgagtcttgtaagatccaagaatttttaaaaatcacataaaatatttcatgcttcttagaaatgactgctataaaacgcaaggtgctatactattattattatcattattatcatctccttgtatcaacttttactgtcacttctgaattaagccaaggtactggctttgaaacacaaatcccgtggttttccacctgtgattacgtttcttgctataattctgtcctgacaacttgtcccgcacactccgaagatctactttactgatctctggcctgaaaattaagtcttttatttagtcccttctctccaaagaaaggggcagaagtcacaccactccagattcttgtagacgtattaagaatgagatcattcttcttacttgaggaatgatgccacagaatataaaggcgacacttcttgccctctaatctttccttgccacaacacaaaacctgtgcacttggttacctagaaaattggaaggttccccacaatggatgtgcatcaataactgtcataaaaatatcagatctctggcacagacaggaaaaactttatctagtttgcaagaaattaaaccctgcagtcctccatctgctactgggtttggtatgggctgtccctttctagggcctgtgcctgtctttgaggagagtggcctggccccacagcacgctaggagcagctcttgagccggatcaagaccctcccgagcaacgtctgcacccaaccctgcatctctcatttcagacacacccccctccaccccgtgtttcataggaggtgtgggcgctcaactccttcactgtggctagggggacgcgaggggaggcgggccgaggcctgagcacccattttggaagaccggggagctcggccctccgggctgtacgatttggagtgtcggagggaagggcgcatccgtgggagggggaaggaggccggggttgctggggggtctctcgtattccggggcgtgagaggaaggcggcgggaaagactccggagagcgaggtttatcagcgcgaggtttcctttttgttatctgctgagggatggcgggcgtcatgggggcgtccccctcagtaaagtcagcaagggggtccccctcgcttcaccggggggcgggcgggggggcccgaggacttgacggaggcctcccccggggacgaagacagtgactgacgaacgttgtgggctgcgcgcgccgggatgcccgttcctgtccctgcagccccgcgcgcgaggtgtgggaccgggtgggaggggacggagaaggcccccggcccgggaggcgggaaaggccccggggctccgggacgggcggcggctccagagccccgagtggcggcggcgcgggcctgccgagtcccgagccggctggcgccctgtgggccgtgtgcacccccgactccactcgccgctcttcgtggtcgccccctcccccccgcggctcctctcacctgcacatgatccgccattttgctccattcatgctcctctccggccccccctcccccccagcgcgcacctcggccggagccgctgccgccgccgccgccgacgccgtcgccgctgcgcctgcgcgctggggactcgtcgcgctgcgctcgtggcgtagcgccgctcagctgcgcaggccccggcggcccgggccgtggttggagaatgcgcagcaccgctgggacggcgtaaaggcgcgggcaacgtcagcggcccggagacgccgggtgggaggaaggagcgggccgggggagcgcgaaggaggggcagctgggggaacaaagctttgtttacatggtttttaaaggggccgcgctcgctccggcaggcgggcgctggagtgggagttggcgctgccttctgctcgtttgcgtggtgagggctcctggatgggggccgaggtctgtcgccgccccgggacccctgcacccagtggcttcctctcttcccaaccgtcttcccccttgactcgcccctggacgtctcccacccccacccccaccccaccctgcagctacggggaccccccacaccccacctaggctgcctgcgagattccttactttccaatgccctctactcaacgggggccgattctgtgcttgtgtctgtctagctttctggaccagggccatcgctctctggtctggatttcaccagcaaccccagtggttgatctcgtgtttttcatttctgtcctttcgtccttgataaacattcatggaaataaccaccgaatggtggtgatgatcaaaacatacgaaggcacagttctggcttcccaaagacattgtcctcgttgccaatactctagactgcctcccgagagggtcagatgctggaagaggcagcggggctggtggttaggacccctaggctcggtcttgtggaggtatgagtgggaaagccatctctctgggtcagataaggtcagcccctgcatgctgaggccaattccagtcttcctcactaggaattatctgttagataatgccggttcctgttttccattggattccactgtggcttccttttaaggcccccaggttagatcatagctggattctgagagcactgattgtttgaagtttgtatttacaggggactaccatcatatgcaaatgatggtggtagtgaattacacacccttggtggatgtagtggaccggtgctcagcattcatttcgacttccgtcctcctagtaggtcttcctggtttgcagaggtagggcacctggaaactacattacccaaacttccttgcagctagggttctgtatgcaaattaggctctgccaattaggctgactcagagaagatttaagaggcagaagatttaagtggcagagcttttgactgttaacttctagcgagcatagaccttttcagatgttgggtttttgtttttccccaaaacctcccagcgtccaatcattagctccgagcgtataaagaggcggggtgatggggtcagtggctttctgaacctggcatcgggcaatgaaatattctcagagtcacaattgcaatggaaattctttggattccctactggactgaatagaggtaacagtttcacagtgggccaggcccaaatttctgtccaccctcccttcccccacccccgcaccccaacctccccgtgtttctccctgtgtcttcccttcctcagtaaatggtaccaccattcatccagttgctcctaataaacactcaggagttggttcttcaagtcttatcagtccccaacatgcaagtcacctgcaagtcctgttcaatctatatctaatatatacccaatatgaccacttctccatccatctccactgttaacaccttggtccaagccaccattacctttctcctgtgctctggtaatagattcctaattagtttccctgcttcctgtcttgccccttgataacccattttccatatagctggacgctgcagaacattattttatttatttgttattttttgagacagagtcttgctctgttgccgaggctggagtgcaatggcgccatctctgctcactgcaacctccgcctccctggttcaagcgattctcttgcct

SEQ ID NO: 588041 - DNA, 4001 bp, Homo sapiens
caaaaaaaattctagaaatgaaattttaaaaattaaaatgtctaaatatttacatactgcaagaaaacatctttaatgaaaacaaacaaaatgttacctaatatggtgccatgtaactggtatgtacaaattccataattcagaggaaactaatctacatatccaaaacctattaaattcaccaaatttgcaatagcaaataaataccctaacaagaatttaaagggcaccaaagacaatctatatctaaaaggctattatagatcttaatttctaacactgtgttactgaaatcaacagaaagcataattttagtgtaatttcaagcactacaaaatgttatatataatttgctctgatgttatttaattggcactatcccaagaaagcagttattgttctatacttaactaaatgtcacatgactaatgtcataatgtttcagtcagctgactgcactgttccatattaatacaaaacacactttttaaaaaaacactttactttcaatggtacttttactaaagagaaaattataaaatcctggaaaaaatgtcacaaactattttcttctcagccctttataaaataccagatagagtcacaccttgcaatcagaacaatagagcaagatggcatgcctactcagttctaacctctctcatgttgttgcctcattacaactgacttcaatagaatcagtgattaacagtacaattttcattaatgtgatggaatactatgtagacttccattttccagtgtaatccagacatgtcaaacaaaatgtccactttaagaatatacttgtctatatacacatgtagaaattttttgtggcataagttacataacacagaaaaactggaaaaccaaagaaataccaccaggttcacaccaatacctgcttaactgacaaggaaactgtttctcgtactactttggtttctataaagtggcttcaaagcaacgaactaccgaagttctggatagaacttggctaccttagccatgatgaatattttccctaatcctacattttttcccaagagggagcaaaaacaaacaaaataccctcacagagtttaaaagtaacattaaggcaacattgagcaataagaaaaaaaaaaatccaaactcacctttatttccttgccctttaggtctctgtgttgcaagacgaaagatgcggtaaagaggagaaaaaggaagaaaagaaaaagtgtgttaatcaaaggcattatcaaagacaagttattttagactatccgcgtaggagtaaaaacccaccatatcctccacagccaccaatttcccaaccacccccagcctttaaacctcccacccgccactcggaatccgtctcccagagctcgcccggtctccgccccatgtctgccgccctcaggatctgtcctaaggcccctaagaccggtccttgcccccacccgccgcggcaccgcgcccgcccgcccgcaagctacggggccagggcgcacgccccggcccgggtagctacaccgcagcaacttgcgcccggggcaccgttatggggccggcagcggcggcgacggggaggagccgaagccccgcgcgagggtggagctccggggctcgggccttcgccaagcctggggcctctgctccctcacctgatccacgctagtggctgacattcttcaccgcaacccgagagccgccgccgccgccgctgcctgggcctctccccgtgcactcacagcagttggctgtcgcccttggccgagtgattgttccagccgccgccgctgccgccgttcgctgagaacccaaaatgagggcctcgcgctcgggagtcggaggaagaggcccgtcttttccgcttgcacgctcctcttccccctctcgctctctgcttctcgggtccacaatggcggacagactccctagtctcacttccgctccgagcctccctgaccttccgctctccactctgacgtccgcgctcacctcgctcttcctcccccaccctcccgccgctgatcttggctccgcctcctcaccgccacgtcaccggagaccggacccgcgctcacggccggtgggcgcatgcgtcatggagggagcgcgtcggggcgtcagcgagcgccaactttcagcgtcttttctgcggcttccttctatcccgctccgaggctgcagggccctggcagagtggcgtcagctggaaggctggccagagccggattttgttgcactccgggcaggaagatggccgaggcggcggctgacggagatagtagtgccttgctgaagtcacggcggccggcggcgccctcctggaggctgacgggacggaggcagggaacttcccggtgagccagccgggcctagcaggagccttcggcggctgcccaaagccgtggggacggctggctgactcagccgctctctggacggagttgctgggtccccacaagcctgcccgtgcagctgaagtggcaggttagagttgtggtactcaaacttaagtccaagcaaacaggaggagcaccggcgcgggttcagtctttccaaacccagttcagccgtaatctctggagtcagacttcgccgcccaattcatggatttgtgcttttgactccgctctgatgtttttgaatgaataaagttgcctaggatacttaagtatagttgcagagcgtcttttcggccctgaaaagagggaaagtttccattgaaaaagttctttatcacatattggcaaacccaaagtatgccaatttgcaacgtgttgacattttcattgaaatatctacaataaaggcaaagattccttgtctcagtgatacagagtccatggaaggaaataatttaaatgaccaaatactttctgtacttcaaaaaccatcaaataagtgatcatttagaaagtaaaattgtagaatcataagattaattttgtggtttacagtgcaacagtatcttagaagcactgaataatagaaaaacttgagaggccacttttcatgtaaatcaccaagaggcatttttaagttctggttagacagtttcccttgcccttccattcattgccacgggtcccaacctaagcacccttgcatttcccaagactcccccaaccctttctgctgttgctctcaatgtctcccatccttcactcccaaacagaccgttttagttttaatgagtttgctggtacatgctatgagccaggaacttgagagagaatatacaagaggaggcttaaatcttgcaagccttgtctttgatccttagtatcatggctttggaacccaatcaattcgaatttaaattctagtggagcaagaattagtgttataatcttggtaaaggcactgaaactttctaagctttagcttcctcatgagtaaaattaggtccttcgtgtacagttcctgacacaaaagtaagctttcagcaaattgtggctatatacaggtaatgaattgttccttcgctaaaagattcccggaaatagtaatcgcttacatttattgagaacacattatatgtcatgttaattcccacagcatccttgcagaagtgccattataaaaactgacacagtgaggttaggaaacacgccacaaacaacacagctagtcactatgagagccaggatttgaactcaagcagtgtgactcccaagttcccactctaataactaccatataatactgcctaatgacataatattatgagcttctattctctttcatttttgctcaacaaacttctttctttatggcttttcttcctagcaataatacctaccctcagatataaacctacttaatttaatattaacagacttttgaagtacatctggggactacctgaaaccatctccaatgcctccaggagtgtattagtccgttttcatgctgctgataaagacatacccgagactgagaagagaaagaggggttaaattgtgtttaaagttccacatggctggggaggcctcagaatcacg

SEQ ID NO: 588042 - DNA, 4001 bp, Homo sapiens
acttatttgcaaacagtggatgtattatgcagtttatagataactcaactcatatctaatatcaaagatgccaccagtgcctacctaagtgaaatgaccactcataaatcaaacttattttactgacttacagtgctgtagaggctctattttgttttaacaaacaagtacctcatagaacttgtgtacttaccttaaagcgggtaacataaaacacttagcatttcaaatagctttgcaaagtgccacctccccacagatctaggataaaataatttatgctaggcaataatgaccacaatttcacaatctccaagtctacatagttcctaatgggtagactagcaaaagaagaaattaatggatcattctttttaaaattcacaaatttttaaaaactcatttaaaataaatcaatatccaatttttatttcaggtttatgcttacaacaaaaaaaattctagaaatgaaattttaaaaattaaaatgtctaaatatttacatactgcaagaaaacatctttaatgaaaacaaacaaaatgttacctaatatggtgccatgtaactggtatgtacaaattccataattcagaggaaactaatctacatatccaaaacctattaaattcaccaaatttgcaatagcaaataaataccctaacaagaatttaaagggcaccaaagacaatctatatctaaaaggctattatagatcttaatttctaacactgtgttactgaaatcaacagaaagcataattttagtgtaatttcaagcactacaaaatgttatatataatttgctctgatgttatttaattggcactatcccaagaaagcagttattgttctatacttaactaaatgtcacatgactaatgtcataatgtttcagtcagctgactgcactgttccatattaatacaaaacacactttttaaaaaaacactttactttcaatggtacttttactaaagagaaaattataaaatcctggaaaaaatgtcacaaactattttcttctcagccctttataaaataccagatagagtcacaccttgcaatcagaacaatagagcaagatggcatgcctactcagttctaacctctctcatgttgttgcctcattacaactgacttcaatagaatcagtgattaacagtacaattttcattaatgtgatggaatactatgtagacttccattttccagtgtaatccagacatgtcaaacaaaatgtccactttaagaatatacttgtctatatacacatgtagaaattttttgtggcataagttacataacacagaaaaactggaaaaccaaagaaataccaccaggttcacaccaatacctgcttaactgacaaggaaactgtttctcgtactactttggtttctataaagtggcttcaaagcaacgaactaccgaagttctggatagaacttggctaccttagccatgatgaatattttccctaatcctacattttttcccaagagggagcaaaaacaaacaaaataccctcacagagtttaaaagtaacattaaggcaacattgagcaataagaaaaaaaaaaatccaaactcacctttatttccttgccctttaggtctctgtgttgcaagacgaaagatgcggtaaagaggagaaaaaggaagaaaagaaaaagtgtgttaatcaaaggcattatcaaagacaagttattttagactatccgcgtaggagtaaaaacccaccatatcctccacagccaccaatttcccaaccacccccagcctttaaacctcccacccgccactcggaatccgtctcccagagctcgcccggtctccgccccatgtctgccgccctcaggatctgtcctaaggcccctaagaccggtccttgcccccacccgccgcggcaccgcgcccgcccgcccgcaagctacggggccagggcgcacgccccggcccgggtagctacaccgcagcaacttgcgcccggggcaccgttatggggccggcagcggcggcgacggggaggagccgaagccccgcgcgagggtggagctccggggctcgggccttcgccaagcctggggcctctgctccctcacctgatccacgctagtggctgacattcttcaccgcaacccgagagccgccgccgccgccgctgcctgggcctctccccgtgcactcacagcagttggctgtcgcccttggccgagtgattgttccagccgccgccgctgccgccgttcgctgagaacccaaaatgagggcctcgcgctcgggagtcggaggaagaggcccgtcttttccgcttgcacgctcctcttccccctctcgctctctgcttctcgggtccacaatggcggacagactccctagtctcacttccgctccgagcctccctgaccttccgctctccactctgacgtccgcgctcacctcgctcttcctcccccaccctcccgccgctgatcttggctccgcctcctcaccgccacgtcaccggagaccggacccgcgctcacggccggtgggcgcatgcgtcatggagggagcgcgtcggggcgtcagcgagcgccaactttcagcgtcttttctgcggcttccttctatcccgctccgaggctgcagggccctggcagagtggcgtcagctggaaggctggccagagccggattttgttgcactccgggcaggaagatggccgaggcggcggctgacggagatagtagtgccttgctgaagtcacggcggccggcggcgccctcctggaggctgacgggacggaggcagggaacttcccggtgagccagccgggcctagcaggagccttcggcggctgcccaaagccgtggggacggctggctgactcagccgctctctggacggagttgctgggtccccacaagcctgcccgtgcagctgaagtggcaggttagagttgtggtactcaaacttaagtccaagcaaacaggaggagcaccggcgcgggttcagtctttccaaacccagttcagccgtaatctctggagtcagacttcgccgcccaattcatggatttgtgcttttgactccgctctgatgtttttgaatgaataaagttgcctaggatacttaagtatagttgcagagcgtcttttcggccctgaaaagagggaaagtttccattgaaaaagttctttatcacatattggcaaacccaaagtatgccaatttgcaacgtgttgacattttcattgaaatatctacaataaaggcaaagattccttgtctcagtgatacagagtccatggaaggaaataatttaaatgaccaaatactttctgtacttcaaaaaccatcaaataagtgatcatttagaaagtaaaattgtagaatcataagattaattttgtggtttacagtgcaacagtatcttagaagcactgaataatagaaaaacttgagaggccacttttcatgtaaatcaccaagaggcatttttaagttctggttagacagtttcccttgcccttccattcattgccacgggtcccaacctaagcacccttgcatttcccaagactcccccaaccctttctgctgttgctctcaatgtctcccatccttcactcccaaacagaccgttttagttttaatgagtttgctggtacatgctatgagccaggaacttgagagagaatatacaagaggaggcttaaatcttgcaagccttgtctttgatccttagtatcatggctttggaacccaatcaattcgaatttaaattctagtggagcaagaattagtgttataatcttggtaaaggcactgaaactttctaagctttagcttcctcatgagtaaaattaggtccttcgtgtacagttcctgacacaaaagtaagctttcagcaaattgtggctatatacaggtaatgaattgttccttcgctaaaagattcccggaaatagtaatcgcttacatttattgagaacacattatatgtcatgttaattccc

SEQ ID NO: 588043 - DNA, 4001 bp, Homo sapiens
aaaattcacaaatttttaaaaactcatttaaaataaatcaatatccaatttttatttcaggtttatgcttacaacaaaaaaaattctagaaatgaaattttaaaaattaaaatgtctaaatatttacatactgcaagaaaacatctttaatgaaaacaaacaaaatgttacctaatatggtgccatgtaactggtatgtacaaattccataattcagaggaaactaatctacatatccaaaacctattaaattcaccaaatttgcaatagcaaataaataccctaacaagaatttaaagggcaccaaagacaatctatatctaaaaggctattatagatcttaatttctaacactgtgttactgaaatcaacagaaagcataattttagtgtaatttcaagcactacaaaatgttatatataatttgctctgatgttatttaattggcactatcccaagaaagcagttattgttctatacttaactaaatgtcacatgactaatgtcataatgtttcagtcagctgactgcactgttccatattaatacaaaacacactttttaaaaaaacactttactttcaatggtacttttactaaagagaaaattataaaatcctggaaaaaatgtcacaaactattttcttctcagccctttataaaataccagatagagtcacaccttgcaatcagaacaatagagcaagatggcatgcctactcagttctaacctctctcatgttgttgcctcattacaactgacttcaatagaatcagtgattaacagtacaattttcattaatgtgatggaatactatgtagacttccattttccagtgtaatccagacatgtcaaacaaaatgtccactttaagaatatacttgtctatatacacatgtagaaattttttgtggcataagttacataacacagaaaaactggaaaaccaaagaaataccaccaggttcacaccaatacctgcttaactgacaaggaaactgtttctcgtactactttggtttctataaagtggcttcaaagcaacgaactaccgaagttctggatagaacttggctaccttagccatgatgaatattttccctaatcctacattttttcccaagagggagcaaaaacaaacaaaataccctcacagagtttaaaagtaacattaaggcaacattgagcaataagaaaaaaaaaaatccaaactcacctttatttccttgccctttaggtctctgtgttgcaagacgaaagatgcggtaaagaggagaaaaaggaagaaaagaaaaagtgtgttaatcaaaggcattatcaaagacaagttattttagactatccgcgtaggagtaaaaacccaccatatcctccacagccaccaatttcccaaccacccccagcctttaaacctcccacccgccactcggaatccgtctcccagagctcgcccggtctccgccccatgtctgccgccctcaggatctgtcctaaggcccctaagaccggtccttgcccccacccgccgcggcaccgcgcccgcccgcccgcaagctacggggccagggcgcacgccccggcccgggtagctacaccgcagcaacttgcgcccggggcaccgttatggggccggcagcggcggcgacggggaggagccgaagccccgcgcgagggtggagctccggggctcgggccttcgccaagcctggggcctctgctccctcacctgatccacgctagtggctgacattcttcaccgcaacccgagagccgccgccgccgccgctgcctgggcctctccccgtgcactcacagcagttggctgtcgcccttggccgagtgattgttccagccgccgccgctgccgccgttcgctgagaacccaaaatgagggcctcgcgctcgggagtcggaggaagaggcccgtcttttccgcttgcacgctcctcttccccctctcgctctctgcttctcgggtccacaatggcggacagactccctagtctcacttccgctccgagcctccctgaccttccgctctccactctgacgtccgcgctcacctcgctcttcctcccccaccctcccgccgctgatcttggctccgcctcctcaccgccacgtcaccggagaccggacccgcgctcacggccggtgggcgcatgcgtcatggagggagcgcgtcggggcgtcagcgagcgccaactttcagcgtcttttctgcggcttccttctatcccgctccgaggctgcagggccctggcagagtggcgtcagctggaaggctggccagagccggattttgttgcactccgggcaggaagatggccgaggcggcggctgacggagatagtagtgccttgctgaagtcacggcggccggcggcgccctcctggaggctgacgggacggaggcagggaacttcccggtgagccagccgggcctagcaggagccttcggcggctgcccaaagccgtggggacggctggctgactcagccgctctctggacggagttgctgggtccccacaagcctgcccgtgcagctgaagtggcaggttagagttgtggtactcaaacttaagtccaagcaaacaggaggagcaccggcgcgggttcagtctttccaaacccagttcagccgtaatctctggagtcagacttcgccgcccaattcatggatttgtgcttttgactccgctctgatgtttttgaatgaataaagttgcctaggatacttaagtatagttgcagagcgtcttttcggccctgaaaagagggaaagtttccattgaaaaagttctttatcacatattggcaaacccaaagtatgccaatttgcaacgtgttgacattttcattgaaatatctacaataaaggcaaagattccttgtctcagtgatacagagtccatggaaggaaataatttaaatgaccaaatactttctgtacttcaaaaaccatcaaataagtgatcatttagaaagtaaaattgtagaatcataagattaattttgtggtttacagtgcaacagtatcttagaagcactgaataatagaaaaacttgagaggccacttttcatgtaaatcaccaagaggcatttttaagttctggttagacagtttcccttgcccttccattcattgccacgggtcccaacctaagcacccttgcatttcccaagactcccccaaccctttctgctgttgctctcaatgtctcccatccttcactcccaaacagaccgttttagttttaatgagtttgctggtacatgctatgagccaggaacttgagagagaatatacaagaggaggcttaaatcttgcaagccttgtctttgatccttagtatcatggctttggaacccaatcaattcgaatttaaattctagtggagcaagaattagtgttataatcttggtaaaggcactgaaactttctaagctttagcttcctcatgagtaaaattaggtccttcgtgtacagttcctgacacaaaagtaagctttcagcaaattgtggctatatacaggtaatgaattgttccttcgctaaaagattcccggaaatagtaatcgcttacatttattgagaacacattatatgtcatgttaattcccacagcatccttgcagaagtgccattataaaaactgacacagtgaggttaggaaacacgccacaaacaacacagctagtcactatgagagccaggatttgaactcaagcagtgtgactcccaagttcccactctaataactaccatataatactgcctaatgacataatattatgagcttctattctctttcatttttgctcaacaaacttctttctttatggcttttcttcctagcaataatacctaccctcagatataaacctacttaatttaatattaacagacttttgaagtacatctggggactacctgaaaccatctccaatgcctccaggagtgtattagtccgttttcatgctgctgataaagacatac

SEQ ID NO: 588044 - DNA, 4001 bp, Homo sapiens
gctcaccaccctgttctctaccccgacctggacttgcagcccccgtccacacctcccccgcccgttcacaaggagcaaaaaaagtcagacccatcccccacccccaccaggaaaattcaagtccttcctcccaccgcggagcccaggaaattcagctctaggtcccaggcgagccccaccccaaaacctcaccccgcagtggactcccctcccgccggcgcgcagcctcgccccggtctacctggcgggcgccgccgcgccaggcctgggctccggcccgctctcggccaggcctttccctcgcgcttgggtccccgaggcccccggcccctccccgccgcgccaccgcctcccggggtgggggagggccgggtcccgccgccgcagcgcccagcgcggaggctgcgcgagggggagggaaaggagggggcggccgagggagaggggagggggcggcctcacctgcgccactgcgatgcccgccgccgccgccgccgagtcattatctcgggcggaagcgagaagggcggcgagggagggggtggaagcccgcagagacaagggtggggatggatcgcggccggcggcgccccggccatgcctcgtccaccttcgggagccggcgacagggagatccccagggatctcgcgtgtgggcgccctacccacccccgggggcaggacgggggagcgagcaccgatcggcgccggggcgtcgatgcggaagcaaggagccggaggcggccgctagccgccctcccgagcccagcggaagaggagccgccgcccgtgtccgctgaggagactccgcctcagcccggcgccgccaccgcggggcgagtggggatgaggggacggagcgaggacggctcccacgcgttcggaaggctggcctgggacaggaagcgaggcgcggcggcggccgggttcctcacctgtgtccggagtgggtggtggcggcggacggacgggctcagcagtctctgggcggcggcggcggcagcagcggcgaggctgagactctgtccctggatctcgctgctcacaggctacagccgctccgcagacacggggtttcctccaatcaccagccccggcagcaggggcaccacacgcacgatgacgtcaaacgctgctatggcaaccgttgattggtgcccacagcgatcggggccccgcgtaaccgccgctccccggcgctcgtcctgcccgcccgcgctggagggcgagcggaggcgcgcgcgtcctcgcccgcagccgccactcctcccaccccgctcggcttccagctcctctacgcttgtcccgagtgcacctagggcaggaggctgcttttttccttttcctccccaacgcaaatcccccactcctcgccttccctttgggtccccaacgccctctctctccctctcccctgcagcctctgccggcccactcttcctctcagccggcgggaaggcgttctctccctacccccaccttagctttcgctcagcccgtctgcgcttgccccagtcactccctctggaaggggctcccgttcagcaacatccgggacctttcacatccccccacccctccccgaggcccggcccgccccaccctccgtgcttcgcggtagtaactgccccagggccgtccccgggcaggatgacaagggtggctcggcggctccggcattgtgatcaggacttgcggggcgggggccccggggcgggggcagggcgcggtcgcacggcaagggagggttgtgtgtggtgcgctgccccccgccccgcccgccgctccccttccccggctgggccgaccggggcgcgcggcccctcccggcctccctcccgccgccgcggctttacctgctggctcgggggaagcggtcctagaccttttatggctcggaaacgggagtgaggcgtccagcccctgagtgtggctgagtgatggggaggcgttccaatcgagagcgcgggatctgcgctcggtgactgcgcgaggggacaatgggtgggcgccgaggtgggggcgaggtgggccgggccgggcggagccggcaggaggtgaggcctggaaggaggcgcggccgctttagggaagccagagttccgaggggaaaggacagccttctcgggcggagggctggagctggtcctggcagccttgacccggagacaggcagtcaggcgtgaccgcacggacccgtttctcgtaggctaggttttcctacccaaataaagctttcacgtgaagacctcatactgcacatgacgatcattacctttttatctcctagaagcaaggtttgagggacgtcgtagtccccagggttccagctggcggtgggagtgggccacaggccgggtgatgagccgggacgggagcccggaagaaggggaaggagaaaggcggaaattgcaggtgcctgaaccggtagggcctccgcccagttgacttcaggaagttcagagagaaacattcacagtgtgaatgatctctgccccttccctctttaaatgtgttcgggctaagaaaagattagtgcttggatgacctgcaaaaccacttgcaacagccatggagagtgtacggttagcaatgagagagcttggaactcttcattttactcttgtgtaaactccccattgattcttccaacgtatctttattgagctgaccagagcctccgtttagcctcatgttctctacagaatttagtttctcagtagtagacacgaaatgattgagtcctcgctcttccagtacattgtctttcctacataatacagtggaccacaaggctgctctacaaattactttttgcctgacatgacagctggcatttagatagtacagaccagaaagagggtttccagtgaccagttatattttagtgggtttttttgttgttgcttttcacaagttgccaaatcacagactcatggtaggttaaatggataaacaaattggagttttatttctgagatgttagggtcaactagctttgactcccaagtaaattcttttagggcgtgactcacttaaaatgagtaatatttcaaaagctattttttttacagttttttcgtaggcaccagaaatttgacagaggatactaagttaaacgtttttttaaaatggaaattgatgtttctttaatgtctcaaatatatgtctatgtagagtatatgccttttgttttagaggaagttaaggggtttttctgtataaatatggatttacttcaggaaacagctaagttaggcttttgcctcatgctttaatagcaaggcattttttagtgcaacaataggcactgttaggttttacatactcaagtcaatgtgtctgcacaataaagatataatgaagctgcaagaaaggaacgggatgttatgaaagccctgaggaaaagatcttttaagaaataaggaataacctgtggcatacagagcagaataaatagaacctatgaaccctgggaactttgctggagactttcactaataccctgacctgtattttcttcaatgcgcaactcttacctcactcaagttggttaacctctatgtgctttgatagccacggcaataaaatactggcaacaaaaacacttaactcatcaggtgatgctgaggattaaacgaatatacacatacatatatttcttagagtaacctagctattattcatttgtaaatggatatatctgattgatatctctagtgttcaaaagattgtaaagataaaatgaaactattttctttttgatttttaggaaacttcagtagcagaaagaaaccatatttttaaagtatcttttagaaatagaaatgcctatttgtgtttcttagtgctgagacatgagtgatgagggtgaatattgattcattcctctataggggactgcaatgatctcttcaaagctatacatcaatatataatgctatacattaaaatgagaaaaagcccaggcacagtggttcactctcattatctcagcactt

SEQ ID NO: 588045 - DNA, 4001 bp, Homo sapiens
cagaatcataattcatatcagtttaatgtaactcacgtctttttactttcataatactcttgtcaagagtgattacattttagctttagtgttacccctaccccaaacctactagatctctgcaacaactgccagccaataatagcataacaatttgggggggaatgaccaactgtttgttttcagatattttgagtataaatccaccacaaaggatcaatatctgaccctaatgtctcaactctttatcttgttatatgtccacatgctttaaaaatatccgcaagtcatgacacttcaactcttactgtgagtactagaatatatcacattggaagtacttaatttataagtgtttccaatgtcatcgctccagttgaaatgcagaagtgctgcattttgcttctagccatcataatgtaattggatgttaccactcaagctgtcctttaccatgactacccatctaattctctttccctcgcattttagtttcctggaccttttcgatttacctcagctacatttttctggaaagatacccttttgcaagttgccgaacagcacaaagatactaatccacacagtgacaccacagaataaatgacttcagaggaaaatacacaccctgaatgaagtgcacttttaagttagaaggtgaacagaagagtccaccttggcagctggctcccgaatattaatcatcttttaccttcccagggaaatcccacaatatttttttaaccaaatgagagaacaggtcgccacattttaaacaaataattaaccactttggatgcaaggtactggctcaatacgtaaactatttaacctttatgacggcattattttcgtcaggtctctaaattactgatttttcccttaggatctcagaaacgctctctggttatttctgcttctaacaaaaaatgatttaagccagtacaaaggattctctccccaatcacttcggtacaagaggaagtggataaggtttctcacacagtaacgagtgctccaaggcctcgcctctacactgcgggcaggactcaccgcacccatttaacccttacctgacttgagacgtcggttactgtgaaacgaaaacgggcagacccggactttaaagtgcaaattctccggtccgcgtatcgcaaccacccccctccaggctccgcccaagtcggagccacggctcaagtccccgactctcctcctttgtcatggcggatctgtgtcagggagcccaacctactgcagagtgttaattcctccccccgaccggagccagagggaggagcagcccgcgcccccgcccaagccgtgggggggggggagagatggggagcgaagccgcccgaccccggggcagagacgccacagcagcccgcagaagcggaaccactaccagccccgccgcggacacaccccgctctcccacccagcgccttccccgccaccgatcagcgccggtgaccgtgtacagcgtctctaagggaccgacagctgcaggtgggggaggggacgagagccacacccagccgagcgggccaccagcggctatgctcaggctcacccgcccccaaagcaggatatgcgtccccaaaccgagcgcagggaccctccagttctagtccatcaagcacgggagccgactgcgggctcaccaccctgttctctaccccgacctggacttgcagcccccgtccacacctcccccgcccgttcacaaggagcaaaaaaagtcagacccatcccccacccccaccaggaaaattcaagtccttcctcccaccgcggagcccaggaaattcagctctaggtcccaggcgagccccaccccaaaacctcaccccgcagtggactcccctcccgccggcgcgcagcctcgccccggtctacctggcgggcgccgccgcgccaggcctgggctccggcccgctctcggccaggcctttccctcgcgcttgggtccccgaggcccccggcccctccccgccgcgccaccgcctcccggggtgggggagggccgggtcccgccgccgcagcgcccagcgcggaggctgcgcgagggggagggaaaggagggggcggccgagggagaggggagggggcggcctcacctgcgccactgcgatgcccgccgccgccgccgccgagtcattatctcgggcggaagcgagaagggcggcgagggagggggtggaagcccgcagagacaagggtggggatggatcgcggccggcggcgccccggccatgcctcgtccaccttcgggagccggcgacagggagatccccagggatctcgcgtgtgggcgccctacccacccccgggggcaggacgggggagcgagcaccgatcggcgccggggcgtcgatgcggaagcaaggagccggaggcggccgctagccgccctcccgagcccagcggaagaggagccgccgcccgtgtccgctgaggagactccgcctcagcccggcgccgccaccgcggggcgagtggggatgaggggacggagcgaggacggctcccacgcgttcggaaggctggcctgggacaggaagcgaggcgcggcggcggccgggttcctcacctgtgtccggagtgggtggtggcggcggacggacgggctcagcagtctctgggcggcggcggcggcagcagcggcgaggctgagactctgtccctggatctcgctgctcacaggctacagccgctccgcagacacggggtttcctccaatcaccagccccggcagcaggggcaccacacgcacgatgacgtcaaacgctgctatggcaaccgttgattggtgcccacagcgatcggggccccgcgtaaccgccgctccccggcgctcgtcctgcccgcccgcgctggagggcgagcggaggcgcgcgcgtcctcgcccgcagccgccactcctcccaccccgctcggcttccagctcctctacgcttgtcccgagtgcacctagggcaggaggctgcttttttccttttcctccccaacgcaaatcccccactcctcgccttccctttgggtccccaacgccctctctctccctctcccctgcagcctctgccggcccactcttcctctcagccggcgggaaggcgttctctccctacccccaccttagctttcgctcagcccgtctgcgcttgccccagtcactccctctggaaggggctcccgttcagcaacatccgggacctttcacatccccccacccctccccgaggcccggcccgccccaccctccgtgcttcgcggtagtaactgccccagggccgtccccgggcaggatgacaagggtggctcggcggctccggcattgtgatcaggacttgcggggcgggggccccggggcgggggcagggcgcggtcgcacggcaagggagggttgtgtgtggtgcgctgccccccgccccgcccgccgctccccttccccggctgggccgaccggggcgcgcggcccctcccggcctccctcccgccgccgcggctttacctgctggctcgggggaagcggtcctagaccttttatggctcggaaacgggagtgaggcgtccagcccctgagtgtggctgagtgatggggaggcgttccaatcgagagcgcgggatctgcgctcggtgactgcgcgaggggacaatgggtgggcgccgaggtgggggcgaggtgggccgggccgggcggagccggcaggaggtgaggcctggaaggaggcgcggccgctttagggaagccagagttccgaggggaaaggacagccttctcgggcggagggctggagctggtcctggcagccttgacccggagacaggcagtcaggcgtgaccgcacggacccgtttctcgtaggctaggttttcctacccaaataaagctttcacgtgaagacctcatactgcacatgacgatcattacctttttatctcctagaagcaaggtttgagggacgtcgtagtccccagggttccagctggcggtgg

SEQ ID NO: 588046 - DNA, 4001 bp, Homo sapiens
aagccagactgaattgattctcaccagtacatcattgcagatatctcttagctccgtctcaattttctctctgtattctcgagccatctgctgttttttctcagcaccttccgtcttttgttcaatacttgagacgaccctccaagatgacctacgggctcctacaacatttttataagcaactgagagaagattcctctcctcattggataattcagctccttgctcagttacagacttcatgcaggctgccatgtcatcatatcgctcagcctgctcggccagtttggccttctgaaccagctcatttttatccatgactggatgttctgcaggggggaaaaaaggagtatttaaaatttttcccatcaaaataaacagactcaaaattatacctgtggtaaatgagttttttaaacctgaaacctaactgcctgtgaaagactgttcacatgaggaattaaaatgcagcctcacaaaaggatagtcaaaaaagggaaaaaaatttagcatactcagcatcagaggtaaacttacagccattaacacatcagtgtagcaaaacttaaaatttgttcagaagacccaaatttcacatgtcaaaattacttccaaaagctgcctcaaaaactacccctaatcttacctgatcaaaatctcaactcatttccaataccactaagtgatccaaaattaagcagcttttcttcctttagtaaaagcattgtttacagagaacatctggatttctatcatatttccagaatcataattcatatcagtttaatgtaactcacgtctttttactttcataatactcttgtcaagagtgattacattttagctttagtgttacccctaccccaaacctactagatctctgcaacaactgccagccaataatagcataacaatttgggggggaatgaccaactgtttgttttcagatattttgagtataaatccaccacaaaggatcaatatctgaccctaatgtctcaactctttatcttgttatatgtccacatgctttaaaaatatccgcaagtcatgacacttcaactcttactgtgagtactagaatatatcacattggaagtacttaatttataagtgtttccaatgtcatcgctccagttgaaatgcagaagtgctgcattttgcttctagccatcataatgtaattggatgttaccactcaagctgtcctttaccatgactacccatctaattctctttccctcgcattttagtttcctggaccttttcgatttacctcagctacatttttctggaaagatacccttttgcaagttgccgaacagcacaaagatactaatccacacagtgacaccacagaataaatgacttcagaggaaaatacacaccctgaatgaagtgcacttttaagttagaaggtgaacagaagagtccaccttggcagctggctcccgaatattaatcatcttttaccttcccagggaaatcccacaatatttttttaaccaaatgagagaacaggtcgccacattttaaacaaataattaaccactttggatgcaaggtactggctcaatacgtaaactatttaacctttatgacggcattattttcgtcaggtctctaaattactgatttttcccttaggatctcagaaacgctctctggttatttctgcttctaacaaaaaatgatttaagccagtacaaaggattctctccccaatcacttcggtacaagaggaagtggataaggtttctcacacagtaacgagtgctccaaggcctcgcctctacactgcgggcaggactcaccgcacccatttaacccttacctgacttgagacgtcggttactgtgaaacgaaaacgggcagacccggactttaaagtgcaaattctccggtccgcgtatcgcaaccacccccctccaggctccgcccaagtcggagccacggctcaagtccccgactctcctcctttgtcatggcggatctgtgtcagggagcccaacctactgcagagtgttaattcctccccccgaccggagccagagggaggagcagcccgcgcccccgcccaagccgtgggggggggggagagatggggagcgaagccgcccgaccccggggcagagacgccacagcagcccgcagaagcggaaccactaccagccccgccgcggacacaccccgctctcccacccagcgccttccccgccaccgatcagcgccggtgaccgtgtacagcgtctctaagggaccgacagctgcaggtgggggaggggacgagagccacacccagccgagcgggccaccagcggctatgctcaggctcacccgcccccaaagcaggatatgcgtccccaaaccgagcgcagggaccctccagttctagtccatcaagcacgggagccgactgcgggctcaccaccctgttctctaccccgacctggacttgcagcccccgtccacacctcccccgcccgttcacaaggagcaaaaaaagtcagacccatcccccacccccaccaggaaaattcaagtccttcctcccaccgcggagcccaggaaattcagctctaggtcccaggcgagccccaccccaaaacctcaccccgcagtggactcccctcccgccggcgcgcagcctcgccccggtctacctggcgggcgccgccgcgccaggcctgggctccggcccgctctcggccaggcctttccctcgcgcttgggtccccgaggcccccggcccctccccgccgcgccaccgcctcccggggtgggggagggccgggtcccgccgccgcagcgcccagcgcggaggctgcgcgagggggagggaaaggagggggcggccgagggagaggggagggggcggcctcacctgcgccactgcgatgcccgccgccgccgccgccgagtcattatctcgggcggaagcgagaagggcggcgagggagggggtggaagcccgcagagacaagggtggggatggatcgcggccggcggcgccccggccatgcctcgtccaccttcgggagccggcgacagggagatccccagggatctcgcgtgtgggcgccctacccacccccgggggcaggacgggggagcgagcaccgatcggcgccggggcgtcgatgcggaagcaaggagccggaggcggccgctagccgccctcccgagcccagcggaagaggagccgccgcccgtgtccgctgaggagactccgcctcagcccggcgccgccaccgcggggcgagtggggatgaggggacggagcgaggacggctcccacgcgttcggaaggctggcctgggacaggaagcgaggcgcggcggcggccgggttcctcacctgtgtccggagtgggtggtggcggcggacggacgggctcagcagtctctgggcggcggcggcggcagcagcggcgaggctgagactctgtccctggatctcgctgctcacaggctacagccgctccgcagacacggggtttcctccaatcaccagccccggcagcaggggcaccacacgcacgatgacgtcaaacgctgctatggcaaccgttgattggtgcccacagcgatcggggccccgcgtaaccgccgctccccggcgctcgtcctgcccgcccgcgctggagggcgagcggaggcgcgcgcgtcctcgcccgcagccgccactcctcccaccccgctcggcttccagctcctctacgcttgtcccgagtgcacctagggcaggaggctgcttttttccttttcctccccaacgcaaatcccccactcctcgccttccctttgggtccccaacgccctctctctccctctcccctgcagcctctgccggcccactcttcctctcagccggcgggaaggcgttctctccctacccccaccttagctttcgctcagcccgtctgcgcttgccccagtcactccctctggaaggggctcccgttcagcaacatccgggacctttcacatccccccacccct

SEQ ID NO: 588047 - DNA, 4001 bp, Homo sapiens
ctgcgcgagggggagggaaaggagggggcggccgagggagaggggagggggcggcctcacctgcgccactgcgatgcccgccgccgccgccgccgagtcattatctcgggcggaagcgagaagggcggcgagggagggggtggaagcccgcagagacaagggtggggatggatcgcggccggcggcgccccggccatgcctcgtccaccttcgggagccggcgacagggagatccccagggatctcgcgtgtgggcgccctacccacccccgggggcaggacgggggagcgagcaccgatcggcgccggggcgtcgatgcggaagcaaggagccggaggcggccgctagccgccctcccgagcccagcggaagaggagccgccgcccgtgtccgctgaggagactccgcctcagcccggcgccgccaccgcggggcgagtggggatgaggggacggagcgaggacggctcccacgcgttcggaaggctggcctgggacaggaagcgaggcgcggcggcggccgggttcctcacctgtgtccggagtgggtggtggcggcggacggacgggctcagcagtctctgggcggcggcggcggcagcagcggcgaggctgagactctgtccctggatctcgctgctcacaggctacagccgctccgcagacacggggtttcctccaatcaccagccccggcagcaggggcaccacacgcacgatgacgtcaaacgctgctatggcaaccgttgattggtgcccacagcgatcggggccccgcgtaaccgccgctccccggcgctcgtcctgcccgcccgcgctggagggcgagcggaggcgcgcgcgtcctcgcccgcagccgccactcctcccaccccgctcggcttccagctcctctacgcttgtcccgagtgcacctagggcaggaggctgcttttttccttttcctccccaacgcaaatcccccactcctcgccttccctttgggtccccaacgccctctctctccctctcccctgcagcctctgccggcccactcttcctctcagccggcgggaaggcgttctctccctacccccaccttagctttcgctcagcccgtctgcgcttgccccagtcactccctctggaaggggctcccgttcagcaacatccgggacctttcacatccccccacccctccccgaggcccggcccgccccaccctccgtgcttcgcggtagtaactgccccagggccgtccccgggcaggatgacaagggtggctcggcggctccggcattgtgatcaggacttgcggggcgggggccccggggcgggggcagggcgcggtcgcacggcaagggagggttgtgtgtggtgcgctgccccccgccccgcccgccgctccccttccccggctgggccgaccggggcgcgcggcccctcccggcctccctcccgccgccgcggctttacctgctggctcgggggaagcggtcctagaccttttatggctcggaaacgggagtgaggcgtccagcccctgagtgtggctgagtgatggggaggcgttccaatcgagagcgcgggatctgcgctcggtgactgcgcgaggggacaatgggtgggcgccgaggtgggggcgaggtgggccgggccgggcggagccggcaggaggtgaggcctggaaggaggcgcggccgctttagggaagccagagttccgaggggaaaggacagccttctcgggcggagggctggagctggtcctggcagccttgacccggagacaggcagtcaggcgtgaccgcacggacccgtttctcgtaggctaggttttcctacccaaataaagctttcacgtgaagacctcatactgcacatgacgatcattacctttttatctcctagaagcaaggtttgagggacgtcgtagtccccagggttccagctggcggtgggagtgggccacaggccgggtgatgagccgggacgggagcccggaagaaggggaaggagaaaggcggaaattgcaggtgcctgaaccggtagggcctccgcccagttgacttcaggaagttcagagagaaacattcacagtgtgaatgatctctgccccttccctctttaaatgtgttcgggctaagaaaagattagtgcttggatgacctgcaaaaccacttgcaacagccatggagagtgtacggttagcaatgagagagcttggaactcttcattttactcttgtgtaaactccccattgattcttccaacgtatctttattgagctgaccagagcctccgtttagcctcatgttctctacagaatttagtttctcagtagtagacacgaaatgattgagtcctcgctcttccagtacattgtctttcctacataatacagtggaccacaaggctgctctacaaattactttttgcctgacatgacagctggcatttagatagtacagaccagaaagagggtttccagtgaccagttatattttagtgggtttttttgttgttgcttttcacaagttgccaaatcacagactcatggtaggttaaatggataaacaaattggagttttatttctgagatgttagggtcaactagctttgactcccaagtaaattcttttagggcgtgactcacttaaaatgagtaatatttcaaaagctattttttttacagttttttcgtaggcaccagaaatttgacagaggatactaagttaaacgtttttttaaaatggaaattgatgtttctttaatgtctcaaatatatgtctatgtagagtatatgccttttgttttagaggaagttaaggggtttttctgtataaatatggatttacttcaggaaacagctaagttaggcttttgcctcatgctttaatagcaaggcattttttagtgcaacaataggcactgttaggttttacatactcaagtcaatgtgtctgcacaataaagatataatgaagctgcaagaaaggaacgggatgttatgaaagccctgaggaaaagatcttttaagaaataaggaataacctgtggcatacagagcagaataaatagaacctatgaaccctgggaactttgctggagactttcactaataccctgacctgtattttcttcaatgcgcaactcttacctcactcaagttggttaacctctatgtgctttgatagccacggcaataaaatactggcaacaaaaacacttaactcatcaggtgatgctgaggattaaacgaatatacacatacatatatttcttagagtaacctagctattattcatttgtaaatggatatatctgattgatatctctagtgttcaaaagattgtaaagataaaatgaaactattttctttttgatttttaggaaacttcagtagcagaaagaaaccatatttttaaagtatcttttagaaatagaaatgcctatttgtgtttcttagtgctgagacatgagtgatgagggtgaatattgattcattcctctataggggactgcaatgatctcttcaaagctatacatcaatatataatgctatacattaaaatgagaaaaagcccaggcacagtggttcactctcattatctcagcactttgggaggcaggcagatagcttgagtccacgggttcaagaccagcctgggcaacatggcaagaccccttctctacaaaaaatacaaaaagtagctggacatggtggcatgtgcctgcggtcccagctactggggaggctgaggtgggaggatcatttgagcccggaaggtagaggctgcagttagctgtgattgtgtcactacactacagcctgggcaacaaagcgagaccctgtctcaaaaatgaaacactaaaatgggaaagagtttaagtgaattagcacaagtccatccctccaattgggaaaacatctccaaggatggactctgttgatgatgtggcagttatatgatattttaagtgtaatcacaattctgtcaggctataatttcacttcactgtg

SEQ ID NO: 588048 - DNA, 4001 bp, Homo sapiens
tgcaaggtactggctcaatacgtaaactatttaacctttatgacggcattattttcgtcaggtctctaaattactgatttttcccttaggatctcagaaacgctctctggttatttctgcttctaacaaaaaatgatttaagccagtacaaaggattctctccccaatcacttcggtacaagaggaagtggataaggtttctcacacagtaacgagtgctccaaggcctcgcctctacactgcgggcaggactcaccgcacccatttaacccttacctgacttgagacgtcggttactgtgaaacgaaaacgggcagacccggactttaaagtgcaaattctccggtccgcgtatcgcaaccacccccctccaggctccgcccaagtcggagccacggctcaagtccccgactctcctcctttgtcatggcggatctgtgtcagggagcccaacctactgcagagtgttaattcctccccccgaccggagccagagggaggagcagcccgcgcccccgcccaagccgtgggggggggggagagatggggagcgaagccgcccgaccccggggcagagacgccacagcagcccgcagaagcggaaccactaccagccccgccgcggacacaccccgctctcccacccagcgccttccccgccaccgatcagcgccggtgaccgtgtacagcgtctctaagggaccgacagctgcaggtgggggaggggacgagagccacacccagccgagcgggccaccagcggctatgctcaggctcacccgcccccaaagcaggatatgcgtccccaaaccgagcgcagggaccctccagttctagtccatcaagcacgggagccgactgcgggctcaccaccctgttctctaccccgacctggacttgcagcccccgtccacacctcccccgcccgttcacaaggagcaaaaaaagtcagacccatcccccacccccaccaggaaaattcaagtccttcctcccaccgcggagcccaggaaattcagctctaggtcccaggcgagccccaccccaaaacctcaccccgcagtggactcccctcccgccggcgcgcagcctcgccccggtctacctggcgggcgccgccgcgccaggcctgggctccggcccgctctcggccaggcctttccctcgcgcttgggtccccgaggcccccggcccctccccgccgcgccaccgcctcccggggtgggggagggccgggtcccgccgccgcagcgcccagcgcggaggctgcgcgagggggagggaaaggagggggcggccgagggagaggggagggggcggcctcacctgcgccactgcgatgcccgccgccgccgccgccgagtcattatctcgggcggaagcgagaagggcggcgagggagggggtggaagcccgcagagacaagggtggggatggatcgcggccggcggcgccccggccatgcctcgtccaccttcgggagccggcgacagggagatccccagggatctcgcgtgtgggcgccctacccacccccgggggcaggacgggggagcgagcaccgatcggcgccggggcgtcgatgcggaagcaaggagccggaggcggccgctagccgccctcccgagcccagcggaagaggagccgccgcccgtgtccgctgaggagactccgcctcagcccggcgccgccaccgcggggcgagtggggatgaggggacggagcgaggacggctcccacgcgttcggaaggctggcctgggacaggaagcgaggcgcggcggcggccgggttcctcacctgtgtccggagtgggtggtggcggcggacggacgggctcagcagtctctgggcggcggcggcggcagcagcggcgaggctgagactctgtccctggatctcgctgctcacaggctacagccgctccgcagacacggggtttcctccaatcaccagccccggcagcaggggcaccacacgcacgatgacgtcaaacgctgctatggcaaccgttgattggtgcccacagcgatcggggccccgcgtaaccgccgctccccggcgctcgtcctgcccgcccgcgctggagggcgagcggaggcgcgcgcgtcctcgcccgcagccgccactcctcccaccccgctcggcttccagctcctctacgcttgtcccgagtgcacctagggcaggaggctgcttttttccttttcctccccaacgcaaatcccccactcctcgccttccctttgggtccccaacgccctctctctccctctcccctgcagcctctgccggcccactcttcctctcagccggcgggaaggcgttctctccctacccccaccttagctttcgctcagcccgtctgcgcttgccccagtcactccctctggaaggggctcccgttcagcaacatccgggacctttcacatccccccacccctccccgaggcccggcccgccccaccctccgtgcttcgcggtagtaactgccccagggccgtccccgggcaggatgacaagggtggctcggcggctccggcattgtgatcaggacttgcggggcgggggccccggggcgggggcagggcgcggtcgcacggcaagggagggttgtgtgtggtgcgctgccccccgccccgcccgccgctccccttccccggctgggccgaccggggcgcgcggcccctcccggcctccctcccgccgccgcggctttacctgctggctcgggggaagcggtcctagaccttttatggctcggaaacgggagtgaggcgtccagcccctgagtgtggctgagtgatggggaggcgttccaatcgagagcgcgggatctgcgctcggtgactgcgcgaggggacaatgggtgggcgccgaggtgggggcgaggtgggccgggccgggcggagccggcaggaggtgaggcctggaaggaggcgcggccgctttagggaagccagagttccgaggggaaaggacagccttctcgggcggagggctggagctggtcctggcagccttgacccggagacaggcagtcaggcgtgaccgcacggacccgtttctcgtaggctaggttttcctacccaaataaagctttcacgtgaagacctcatactgcacatgacgatcattacctttttatctcctagaagcaaggtttgagggacgtcgtagtccccagggttccagctggcggtgggagtgggccacaggccgggtgatgagccgggacgggagcccggaagaaggggaaggagaaaggcggaaattgcaggtgcctgaaccggtagggcctccgcccagttgacttcaggaagttcagagagaaacattcacagtgtgaatgatctctgccccttccctctttaaatgtgttcgggctaagaaaagattagtgcttggatgacctgcaaaaccacttgcaacagccatggagagtgtacggttagcaatgagagagcttggaactcttcattttactcttgtgtaaactccccattgattcttccaacgtatctttattgagctgaccagagcctccgtttagcctcatgttctctacagaatttagtttctcagtagtagacacgaaatgattgagtcctcgctcttccagtacattgtctttcctacataatacagtggaccacaaggctgctctacaaattactttttgcctgacatgacagctggcatttagatagtacagaccagaaagagggtttccagtgaccagttatattttagtgggtttttttgttgttgcttttcacaagttgccaaatcacagactcatggtaggttaaatggataaacaaattggagttttatttctgagatgttagggtcaactagctttgactcccaagtaaattcttttagggcgtgactcacttaaaatgagtaatatttcaaaagctattttttttacagttttttcgtaggcaccagaaatttgacagaggatactaagttaaacgtttttttaaaatggaa

SEQ ID NO: 588049 - DNA, 4001 bp, Homo sapiens
ttcttcaaagagttgcccgatttgacttcgaccagcacactaaacgtctgtgagcatagaccagcttctctaaaatcacagctaataaaatttttttaccgcaaagtcagccttttaggttaaaaccttcaacctcactttctttttgattcaatctgataagaaatgagtcataaaaaagaaaatccagcgccacgacaattgtcattccatccccttccccccacaacacatacagaacttttataaaacttgttcccaggctttctaaacccccacgcctaagcttcccgcacctctcaactggaacgatgtcttcacccaggaaaatggttttgaggttttttttcgggggtgggtgggggtgaagggagtgctgataaacctttccctaaaagatctcaaaaaagtaggagcaggatatactgtacctgggcgttggcttcgtggagtttgtgctcggtagagacgtggtgcctcaggaggagggttttcttgtagttgcgggtccctcgcgaaagctcatcatgccccactgggggaaggtccacgcttcccccatctgcaggggtcttttggcaccagccgcaagacataagaccagtatccttggaatagcgcagccagggaaagtccttgagccaggaggtctggaaggagcattggagcttctgcattagagacttgggccgcgcgagcgggaagtgctggacagtctctccttcgccagctcccacaccgctgccctccacttcgtccccgccatcgccgcccgaccgcctgctgctgctgcagctgccgccttccgccccgctgccgtcgcccaggctcgccccctcctcctcgtcctcggtgctgtcgctcagggacgcgccgtcctgcatcaactccttcccctccagcgcgtccagctccagatccacagtcgccggccctcgcccattgaaatgcctcaagggccacaccgaggtctcggggcggccgcggctactgccattgttgccgagacccccgccgccgccgcctcggaaggccagagtccgacggttcctttccgctagcagggggccccccgcgccaccgccaagcgaggtggggccgcccgcgtcttgggggagcagcaactccttggcttcctcggcggcgccggcggccggcccggcggaggcctccaggtcttggggctccaggccctccaattccacttcctcgtcggccccccgcccattaggcggctgaagcgcgggcggcgctggcggcgggggctgtctcggctggggctgcggaggccaagctgaggcctccccgccagcgttattgttcgtggagccgccgccgctagcggtgaccaacccgcctcctcggaacgccagcgtcctgcggttcatttcactgaacgacatggcgcgcgccgccgccgccgccgcccggtgccccggctcgcgcacggcctcgggccgcgtcccgcgcgctccccgcggctccccctctgtctcgcccccgcccccggcgttccggtctcgcggggctcggcctcgccctctcgcccggcagcccggctcgcgctcgctcccgggtctgctgcacgcgtccgctgccgctgccgctgccgggccgacgcctccgaccgctctctcgtcctccacccccgccccgccgcgctccgggcagcgtcccgcgcggagaagggggcgggcggcggagaggtgaggagcgagcctgcagcgagcgaggccttcgaagttgagcagcggagtgcggggagaccctccgctgccccctctttaaagccgcgcgcgcacacaccgatcctccacacagatatccttcctccgcgcgccgaggagtcccgacgccgccgccggcttcgcaggcgctgagggtgagaggcacgctaaactgctcggctccgccacataacgaagcgacaataaagccggcggagcgtttccgtccgaccaggccctggcggaggtcgaatggcaaatgaacaacggaccgtgcgcccacaatgcaccggggtagcagtaaccgctggagggggaaagggtgggggccgggctgggggaggggggctgggcttggggctgggctggggtggggtgggggcgccaggggaccgggaaaggggctgggctgcgcctccggcctgggggcgggggtgcggccgcggggaaggaagtcggccgaggggttggggacaaaaggccgggcggcgggctgggggtctcagggagggggcgggcgtgtgcggccggggccgggctacgcggaggacaaacagctggcgagtgtcagggtctggccgcctccccgctgcccacacgcacctacccgcgcccgggacgcgcattttccttctctcgccacgagttcacctgggactttgcaaataactgtgcggtgggagctgcgctccagccttgtcatttgctgagggtgggtggcggtgcccaaggaagtgaacttattttgttccttcacaaagactggaccaggcggtgcctttcacgcgaagaggttacgaccacggacacaacctcctttgatgcattgtgcgaggcagcacctcgggccccggacagtagtcatttcacagaaaatgcaccgccccgagtgtcttattgctgtgatgaaatggaaatttaaataaaaggtcgaacacgtgcgttcactgggaagtattgacatgggtgttacatcaccagcagccaatcagataactccagtcgtgtttatacttctacaaccaccttgtgagtattacagtatgtcataacgttataaatattaggcagggttttccccaggagcggggaggagtctgcttctacggacgttgtgagcggctccgaagattgtgtgtttaaagtcaacaattcatttttaagacttttttcgaactgtttacattacatggactttagattgattctgacagaatgaactggaaatgaaatcccacagttatgatcgtagtagagtttttttttccaatttagggcccttatactccttttaaaaatttttaatatgctaaatttagcaaatactaaagtgttaagactcatctgacaatgtgagaatttaagcctatttcaggttaagaaaaaaaagatgttttcaagttatggaggggctttttactcttaagcgacatatgtattagaagttgaatcacgaactgataaaatgctccagataattgttgactaaaaaaaatacggcaggacaaattttttacattaatacatatgtgcagaaaatgagaaatatacatgaactctttacagttatagattaatgggaagggttatgttaaaggcttgaacctcctaaataatgtattaatgtaaataaagttatatatgttttatgaagaacaggtgttacaatttttagacctagttttatgattcttattctcttcaaaagttctttttctatttcaaaactaagagcaatatgtaaagctttgtataatatggaatatggtatgtatttcaaggttactttaaaaagcaagctttggctggtcccaaggtagtgaattgtctcaattggttattcacagttggttgcccgttgtaccactctttccccacttccacttgactagtcttttaaaaataaataaatatttaaataaacaagtcttctcaaacattataaaagaccgtttttcttaatattttttaaatggactaacatgaatccacatccagactcatattaattgtatacatttattcaaagcaacattcacttcattcattgtaatttttagtacctgttgatgagcagtgttgtatatcaaacaaaaaacattggttttatcttgtagattacatgtaattttaatgtaaagaatgacagtactaccctgccacaaaaggattttggctttgagttatttttccggtaataaacatattgtcacctggccaccagtgaccaagagcttgaaattctgatatagttcttcaggtgggtacagttgt

SEQ ID NO: 588050 - DNA, 4001 bp, Homo sapiens
ataagaccagtatccttggaatagcgcagccagggaaagtccttgagccaggaggtctggaaggagcattggagcttctgcattagagacttgggccgcgcgagcgggaagtgctggacagtctctccttcgccagctcccacaccgctgccctccacttcgtccccgccatcgccgcccgaccgcctgctgctgctgcagctgccgccttccgccccgctgccgtcgcccaggctcgccccctcctcctcgtcctcggtgctgtcgctcagggacgcgccgtcctgcatcaactccttcccctccagcgcgtccagctccagatccacagtcgccggccctcgcccattgaaatgcctcaagggccacaccgaggtctcggggcggccgcggctactgccattgttgccgagacccccgccgccgccgcctcggaaggccagagtccgacggttcctttccgctagcagggggccccccgcgccaccgccaagcgaggtggggccgcccgcgtcttgggggagcagcaactccttggcttcctcggcggcgccggcggccggcccggcggaggcctccaggtcttggggctccaggccctccaattccacttcctcgtcggccccccgcccattaggcggctgaagcgcgggcggcgctggcggcgggggctgtctcggctggggctgcggaggccaagctgaggcctccccgccagcgttattgttcgtggagccgccgccgctagcggtgaccaacccgcctcctcggaacgccagcgtcctgcggttcatttcactgaacgacatggcgcgcgccgccgccgccgccgcccggtgccccggctcgcgcacggcctcgggccgcgtcccgcgcgctccccgcggctccccctctgtctcgcccccgcccccggcgttccggtctcgcggggctcggcctcgccctctcgcccggcagcccggctcgcgctcgctcccgggtctgctgcacgcgtccgctgccgctgccgctgccgggccgacgcctccgaccgctctctcgtcctccacccccgccccgccgcgctccgggcagcgtcccgcgcggagaagggggcgggcggcggagaggtgaggagcgagcctgcagcgagcgaggccttcgaagttgagcagcggagtgcggggagaccctccgctgccccctctttaaagccgcgcgcgcacacaccgatcctccacacagatatccttcctccgcgcgccgaggagtcccgacgccgccgccggcttcgcaggcgctgagggtgagaggcacgctaaactgctcggctccgccacataacgaagcgacaataaagccggcggagcgtttccgtccgaccaggccctggcggaggtcgaatggcaaatgaacaacggaccgtgcgcccacaatgcaccggggtagcagtaaccgctggagggggaaagggtgggggccgggctgggggaggggggctgggcttggggctgggctggggtggggtgggggcgccaggggaccgggaaaggggctgggctgcgcctccggcctgggggcgggggtgcggccgcggggaaggaagtcggccgaggggttggggacaaaaggccgggcggcgggctgggggtctcagggagggggcgggcgtgtgcggccggggccgggctacgcggaggacaaacagctggcgagtgtcagggtctggccgcctccccgctgcccacacgcacctacccgcgcccgggacgcgcattttccttctctcgccacgagttcacctgggactttgcaaataactgtgcggtgggagctgcgctccagccttgtcatttgctgagggtgggtggcggtgcccaaggaagtgaacttattttgttccttcacaaagactggaccaggcggtgcctttcacgcgaagaggttacgaccacggacacaacctcctttgatgcattgtgcgaggcagcacctcgggccccggacagtagtcatttcacagaaaatgcaccgccccgagtgtcttattgctgtgatgaaatggaaatttaaataaaaggtcgaacacgtgcgttcactgggaagtattgacatgggtgttacatcaccagcagccaatcagataactccagtcgtgtttatacttctacaaccaccttgtgagtattacagtatgtcataacgttataaatattaggcagggttttccccaggagcggggaggagtctgcttctacggacgttgtgagcggctccgaagattgtgtgtttaaagtcaacaattcatttttaagacttttttcgaactgtttacattacatggactttagattgattctgacagaatgaactggaaatgaaatcccacagttatgatcgtagtagagtttttttttccaatttagggcccttatactccttttaaaaatttttaatatgctaaatttagcaaatactaaagtgttaagactcatctgacaatgtgagaatttaagcctatttcaggttaagaaaaaaaagatgttttcaagttatggaggggctttttactcttaagcgacatatgtattagaagttgaatcacgaactgataaaatgctccagataattgttgactaaaaaaaatacggcaggacaaattttttacattaatacatatgtgcagaaaatgagaaatatacatgaactctttacagttatagattaatgggaagggttatgttaaaggcttgaacctcctaaataatgtattaatgtaaataaagttatatatgttttatgaagaacaggtgttacaatttttagacctagttttatgattcttattctcttcaaaagttctttttctatttcaaaactaagagcaatatgtaaagctttgtataatatggaatatggtatgtatttcaaggttactttaaaaagcaagctttggctggtcccaaggtagtgaattgtctcaattggttattcacagttggttgcccgttgtaccactctttccccacttccacttgactagtcttttaaaaataaataaatatttaaataaacaagtcttctcaaacattataaaagaccgtttttcttaatattttttaaatggactaacatgaatccacatccagactcatattaattgtatacatttattcaaagcaacattcacttcattcattgtaatttttagtacctgttgatgagcagtgttgtatatcaaacaaaaaacattggttttatcttgtagattacatgtaattttaatgtaaagaatgacagtactaccctgccacaaaaggattttggctttgagttatttttccggtaataaacatattgtcacctggccaccagtgaccaagagcttgaaattctgatatagttcttcaggtgggtacagttgtagggtgtttttgtttgtttgtttgtttgttttgtcctgctttgttttagttgctgggaagcttaagacagtggagtctgatcttgacctaattcgtacccttaagaaataagagaactctgccaagtgaggctgtataatatgtgccacatatggaagaatgccataataatacttgtgctctgtttttaatgcgtgtttttttttcattctaggcattttgaaaataaatacatttattatatgttaatcaccacagcctccacccccataaaaagagggaagagttactgaagttaattacttatctaggatcaaggtgatgggaaatgaaaatggacttaaaaatttttattttgctgggcacggtggctcacgcctgtaatcccagcactttgggggccgagacgggcggatcatgaggtctggagttcaagaccagcctgaccaacatggtgaaaccccgtctctactaaaaattcaaaaaattagccaggtgtggtggcgctcgcctataatcccagctactcaggaggctgaggtagaagaatcacttgaaccagagaggcggaggttgcagtgagctgagatcatg

SEQ ID NO: 588051 - DNA, 4001 bp, Homo sapiens
tagggcaacttcacatatttcaactcagtttatcacaattaaacacattatagttaatgatagcatcttattttgtaaaaaaaaaaaatctaaaagtaaagggcaagcactattaacatcataagctgggccctataacatcataagctggacccataaaatatgcctataaatacagaatcctacctttgtccacctatgcaactgagtgtcataataggtttccattatattttaaaaacattcgtagtaaggtttcaatagtaatatcttagcactgttaaaatgtaaggtccactaaaatgtaggttcgatgagagtaaagctttatcatttttattctttgctgcaacctagaacctaaaaagatgcccataatagacatttatttaacaacaaatatttattgagtacctactttgtgtcagacattgttttaggtgcctaggatacataagtgaaaaatcagatgatgatctttgtcttaataacaaatgttgaataaaataataaaaatctgcaaactgttcaaaacactttatagataatatgtaataaaaccttatcatattatatatgataatctcatgagaattccataacccatgctttaatcccaccaagatacaaaagtatcttgaaagtaaaatatactgtactatcattacaattccttatttcatggaaacttgaattatcttccaaaaacacataagcaaaaaacaagaccttcattaggccatagcatactgcagctgtccacaaacggaaaattatcagaatcatttatcagagcaaaagcacgaaataaacttctactcatgttattacatctgctttttggtgaataggtgactgaaaaagttaccggctaccactttgcacttcatcacacaatgtagaatattttactccctggcatgcaacaatacacaagactcaaaagcttctgctcattcttaattccaactgaatccgtgtaaactaggagacgggggaaaggagctaaatcaagacaataggatctttcaattctgaaggtttgttcttcatcataacaaattaaaaaatcttgaaactgttgttgccaatgctagttattgtggtttttgtccttcctttgtttttaggtgaatgctttcattacacaggataaaatgggtaaacagaatagagaaaaagtgaaagaactgggaacaaagcaaaatctggagtcatggttacagtacaaagataaacccaaagataaggaaccaatacaggctcttcctcacacagcggccgtgaataagtcatcaaatcctccgggtaatctattgtaccggctctaaagctggccagtgacacttccttaggagatgctctgacatccctccgacagaagatgctgtcgaaatgtaaaaagccggttacctagggaaatcggccaaggaatgtcaggagctcgaggctggagacacaccccggggctgcagcacaaagtggcctgttggtgttaaggccgtggacaataatggagagagtccagtacaaggaaaacaaaatctggccagagactgggatcactaaaagggcactcaggagtcaagcaagatcagaaaatggtaggaagagacgtgcaggcgtcttgccaggggcaggatctggctccgggcgggaaagcccagttgaagaccgtctgaggcggggcagcctggtagcgttagctccaccgcatcggggactgtccggttcccttcggccccagcctccggaggcgcggcgggacgcggcgaggtccgccgcaccgaaccagccctcgccttcctgctactggtgtccagggtccccagctgtttcgggcccgctctagccgtcctgccctcatcccttcatcgcctcaccttccagtccctccatcgcgccacctcctcgagctcagcgagactccttcagcagcgcccgccaccgcccagctctggctgtagcaacccagccgcacctcccacccgctaacattccgagctcccattggttccgcaactgcgggggcggggatccgtgggggcggggccgcggcggaggcgaggttcctgcggtctcctcctggctgccacccctgtccgtctctccgggttactctccagggagccgggagccgcttcaggttgcaatctgcgatgcaacggcgcctttgtttgactccagccttgttttgcctcataccttatcctcctatttagagtacctcagcacctcatgggctccgcttcaccagttcctcaatcagtcaatgcctctgacttctagccgccatccctcccagtggatactttaagcaggcaagcaaaccaaacaaacgcccagcacgcttgcatgcagcaatctccgttttccggtctttggtcgcatgacttgacctcagcgtatcccctacacttgatcttcacacacagcttcataggttaagacactttttttccagagaaatcatactttctatctgcgattgtggaactgcgattgctctaagcccttgaaaacagtttcctcaccatgaaagcttgggccaaaaattagaagtgaaacccagccctccctctgtcttctactcttggcctaccttggccctatactttatcatccataaaccaaaacagtcgcctggcctgacaatgtttgatcggggaagtttgagttggggaattaacctacaacctgacagaatgaggcccgcccgtctctaacagagttcaaaacctcctgaagatgaaagtaacttcaaaactaactcagaccattttaacggttttgcttacaattaccagaactacatttctttgaaaatttgatttagcaatcgtaaacaagctgtactgtttgctgactatagcgtatctactggcaagttaccagtattaatgtgttgtccataacaaacctcggattaatgttattgttaatctgtttaattgaagagtttaacttcatatctaacttcatctactatgaaatcagttaccttcaggaagcaggattcctcctactctccactcacatgaaggtatgtttaaacaagcaaacacttgagggggcatcatctcttactgagaaggtgctccaagtgcatttgaatgtggtagagtccatctgttgtgtggagccatgtaaagaccacttcaaccatgcctcaatgactccctccgcccttccctggttcccctggctcttctgcttctctgagatcctgggcctccttggccaacccatagccttgcaggcaataagctactctagactgggtgctgcggaaaggtcctttttcttccttagtgctactaaggcaaaggtagaatttttggttgggagggaaggccttttaaaagagcattaaggagaaaaaaaagcacacagaagaaaatacaaaaataaggaagccattattttacaaattacaagttctttcactgaaggcaagacgaatattgagttggctgataccttattcgacataaaatctacagtaacattaaaaataataaaaatagcattaaagaataaatcatgtgaggcatgttttaggccattttcatatattcacaaatcttcaaaagaaatctacaaagtagatactacaatcttcatttatcagaattaaaatgttcattttctagatgtctcagagcaattaatattttgtcaatatttgtattattagtggatggtagagcttggctacactcttgtctgttaaattctaaagcctatggtgatttgattgggctcctcactccctttccttgccttgccttttattatagctgcctcaagtgtaaacccaagcgttcagacatgttgtttaacatatatttgagtaggcatttctattgtgaatcttaattctctaaaacatgattgctagtcttccctacaggtatcttcataacttttatgcttttggtctcttcataacttttacgctacagctaccctggctcctgcagcttttccctgattctgac

SEQ ID NO: 588052 - DNA, 4001 bp, Homo sapiens
aggggcagcccccagagcctgggactcactgacaactcagcccgcgtcacctgggcctgtcgcttctatgagccttttctccatcagctccacttcagtcctacttctgcctgcttcacacagaaatgaaccgtgtggtgtaacaagccttatttgctggtctactgagtccacagtcatttgctgagacgtgtcactcagtctgaagagaatcgcaatgatcccctctgcactgtttgaatcagaggggacaagtggccgcacaggccctctggcttgcctacagatggaaaggagtcactccactgagtgtaacagaactgacactctcgaggaccccatgcctgacaacaggaaaaaagaatactaggagcagaggccattgctctgccagattcatagtcttccctgcagaagaggaaacatcaatgggctagagtcctactgcagtgaactgacacaaccacaggactttccaaataagtccctggatagctaccccggtgcaggagggccaggaacacaggcaagggcggcagcagccagcctcccagttatcagcattcccccaccacaggccctgcccccgggggcacagaaagccacgtccagacgtgttgacgccccagagcaggtgtgatgggagctcaagaagtgtccccaagtgggaggcagcccacctggcctcttatccatacacactttcccaatccttaagtcttccctttgtgagagtaaaagcaaaaaggatttttaatttttaaagcttttttttgtttggttggttttggctttttatttgagatgtggtttttctctgttgcccaggctggagtgcagtggcccaatcacggctcactgcagccgggacctccagggcacaagcaaaccttccacctctgagtagctgggactacaggcgcaagccaccacgcccatctcactttttaaaatttttctgtagagacgggctctcgtcatgttgcccaggatggtctcaaactcccgggctcaagccatcctcctgccatagcctcccaaagtgctgggattacaggtgtgggccactgcgtccgaacatggattttctttttaagtttagaaagaccaatttgggttttttaatgtttaagtgtggaagctgaagcctgttcagtctgcgcctggaatggcaaggggagtgtgactgttcggagaaaaggggcatcaaaaccgggcgtcgaggctgggagcggtggctcatgcctgtaatcccagcactttgggaggccgaggcgggtgaatcacctgaggtcgggagttagagaccatcctggccaacatggtgaaaccccgtctctactcaaaatacaaaaattagccaggcgttctggcgcctacctgtaatcccacgtactccggaggctgaggcaggagaatcactcgaacccaggatgaggagattgcagtgagccgtgatcgcgtcaccgcaccccagcctgggtgacagagcaagactctgtctcaaaaaaaaccgggcgtcaaggaaggaacccgcgtgcgcccttagcctgctctgccgaaatgagccatgaactagtcccagccccgcagtggggcgcggggagagagtgggcgccgggggacgcgacagcccgcggtggtggggagggccgccgccccccgcgggttactaagcgacggccctgcctccaccctctgcagccccagcagggccggcaccactccctcgacaaagctggagccggggactgacccgggccctgagccggcccacaagtcctggcggaccctaccgtcccccaccccagccgccacccagaacacgcgggcggtgagcgaccccttcgacaagggggcaggggacccgccgcgaggtgagggggaaagaaggggactcgcgtcccggccccggccggacctaccctgcagtaggcggatctgccgccgtaatatctccttttcctccatctcccgagtccgcgacggccggccaggcccccacgacgtcatcgctacgcgacctttttcccgcgggcggggcggagcgggccagggcggagctgccaggagcaggcccggatgtctgccgaccgccgaggacccgccgtcgcgctgacaacggcagcggagaggcagagccgcgcacgcgcagaacgaggcggggacgtcactagtgagcgccgggaagtggcctggtaacggctgggaagggactgcttgggctctgggaggccgcgcgggcccagcttgtgcagtccgggatcgcgtccccttgggagacttggcgaggggcgagacctggggcccacccagcccataccgcagttccttcccacagtccctgcgtttcatttcgccccagttgagtgttgggggggggggggtctacgcggggacccatgggagaagggccagttaacaattactcttgacccaggagggtctgtgaaacctcttactgtggccagaggagaagacatcggagagcaaggttccctggatagacatgttgaacctctgaaaacatgaaagtttttagttcgtcattggaaacatgtacaagtgtaaacctctgtgcgctgttggtgggaatgtaaatggcgcagcaccgcagaaaactatggagattccacaaaaggttaaaagtagaactaccggatatgagggcgatctggctgcgacacctgtcatcccattgatcgccagggttgattcggctgatctggctggctaggcgggtgtccccttccttcctcactgcttcatgtgcgtccctcccgaagctgcagctcagtcgaagagaacgaccatacccaatagaagagctgggcttccctggtagaacctccaaacaagctctcaaggtccatttgtaggagaaggtagggtagtcaagattccagacacatccaaatgaggcgctgcatgtggcaatctgcctttctaggagaaaacaaaaatggaactacggtatgatccagcaaccctacttctggctatattcccaaaagaatggaaaccagagactcaaacatatttgtgcccccatgttcactgcagcatttttcccaatagccaaaagacggaaacaacccaagtgtccacgggtggatggaaggataaacaaaatgtgatccatacaaacaatgaaatatttttcagccttaaaatggaaggaaattcggccgggcgcagtggctcacgcctgtaatcctagcactttgggaggctgaggcgggcggatcacgaggtcaggagttttgagacaagcgtggtcaacatggtgaaaccccgtctctgctaaaaatataaaaaattagccaggcgtggtggcgcacacctgtggtcccagctactcaggaggctgaggcagaagaatcgcttgaacccaggaggcggaggttgcaatgagccaagatcaagccactgcactccagcctgggcgacagagctagactttgcctcaaaaaaaaaataaaaggaaaaaaagaaggaaattctaacacaggatacaccatggataaaccttgaaaacactgtgctttgtaaaataagccagtcactaaaagacaaatcttgtgtgattccacttccatgaagtatctagaatacagattcctagagacagaaggtagattagagtttcagtggctgggataaggaggaatggagaaatgttgcttaatgggtgtaggctttctgtttggagtgatgaaaaagttttggaagtagtggtgatggttacacaaaattatgacggtaataatgccactgaattgtacacgttaaaatggctaggctgggctgggcgcagtggcttatgcctgtaatcccagcactttgggaggacgaggcgggcggatcacaaggtcgggagatcgagaccatcctggctaacacggtgaaaccccgccgctactaaaaatacaaaaattagctgggcattgtggtgggtgcctgtagtcccagttactcgggaggctgagacaggagactgg

SEQ ID NO: 588053 - DNA, 4001 bp, Homo sapiens
tttttaagaggacgaaggaatgaaacacaacaaaggttcccaacagttacgtaacatatacagtctatctcaataaggcaagctattttaagattaacagttaatacaaaatttactacacgtcctttcctatatattttagatgacttgacgactgcatacctaaatgcatcctcatgataatgcctgtacagcctcatcttttcccaacaacagactcaaggttttttttttggactattaagcttgtttctaaatcccttcaagtaataacagcaaattttaaaactatatgaaataaaagtctcggttctcttacaacttacatcagtgattattttgatgtattattatgacactttctcacaaggcgcaacattttgaggtaagatggcttcagacaagattttatgtctgaatcttgaggctttgaaaatgctgagcttgtgaaggctcaatataataggccactatttcatcttttccctcgtcccacccaaagctagcacttggtagggcaaaaacagacactttgttaggtggagcaccaaacacagaaagcattcacaagtcactggcagaaaggtcattttctgttttaacatctttttctgataacccagatcagttttcataaaacccctgaaggtagaaaccagcttacattaagcgacatcattgtactccctacttgtgcataataatcaactttttaaaaaattttaatcttcagcattaaaagtatcctacccaccaattcaggaacctcgaactcggactggagccacttcgctctctggatgtaaaaacctcagacgatcacctctttttttctctccctactgttcaaacacctaaattatggtttagtgtgttgcacatgtcctcaaaaatactttctagtagctcacctcctccacatccttttaaactagaaaagtgtccaactggcaatcctcaaatcataaaggcagcaaaaacgcccctgagcgctgtcacaaatttttaacaagtgcattgacgccaaccagcaagggatccagctccgccgccaaggccagcacccccgcgcgggtctggcgcagctcggggccgggcccagctcagcccttcagcccccggcgcgcctcgccggcctcggcctcccctctccacagcggtcccggggaccttccgcccctctagggggtgtggccgaggcggcggcggtgagcggaaggcggcgggaggctcggcggcgagtgcggggcggaggcgccaccttaacccgagagttgggaggggagggcgaggggcgtgcgcgtggaagaagctgccccgaggctgcttttagcggcggagccggcgggacgcggcaggttggcagcgcccggggcgcatccggggggcgagagcggaggagcggctgagcgtcccgggacagtcggggtgggctgcgctgcgctgggggcgccgcggcggggggcgcactcacctatgcacagctggatggcgtaggcgtagtaggaccagccgagcaggagggtgatgaacaccaccgggatccagtacagcacccgccggcaccgccgcctggcgctgctgcccgggcccgagggcgccatcttccagccgcatccacctgcccagctccgccgccgcccgcgggcctggctccggggcgggctgggcgggcccggcacccctggctggacgggctcctgggcggcggcggggtgcgctgcggccactgccgccgccgtggcgctaactccccatcccgcagccccgagccggcgcggcggactcccggctcctcagcccggcggaggcggaggcggcggctgcgagcggaggccgaggaggcggaggggggcggtgaggcggcggcgtcgggaggctgcgctccgcccccgccgttccccgccgcccggccgcctcccctggcgtggcaggctgcgccctcgggcgggctctgcggggatgcggggccctcgctcgggccacctcgcgggctcccaccgtggccccgccgcctccggctcggcctctggattccggggaggcgggggctgctgggcgcaggcccccggggcggagcgggcggtggcggcccctccctaggcgcccggcacccggggcagttaggtcgcgagcgcttccgcgcttggcgcagggcgggggtcggaggcgaggccggcggagcagctgctgcgctcgggactccgcgcctgccgcgacccaggcgccctgagaaagtctgcagcaccgaggcccgcgtccccgcagcccgcgtggaaccctcgcgcttcaacttgcgggtccctgggagcccgcgggggccgcaaggagcctccctttactactcgggctttcgggggaagcagaaatgcacagcgaagagggggtgccgagccggcgtctggcatgggaggggctgtggagagcgaggaagaagcatttttggctgtgaatccaggcacctctggagttagaaacacaagttctttgctctgagaatgttgatgctttggataaatgattgtgacaggggccgttcccactgtcccctccctcaagtacggtggttccttccaccaactatttattcttttcctcaacccgctcctcactacggtgtttactttcgtggtggcaattccaaacttagcagatagctgactccaaagcggttcccaaaaaacaccgtaagggaacctaaaggtagtcagcccaaacctctgattttatgattcacgaaatggaaaataaacaaatgcctcctttgcttttccttcatctgattatgaacgcacctgatccacagggaaacatttcaatcaatgagtgtgtgtaaattatgtgcatcactactatacataataggcacaatttttcttaacattagtgaatatgtgtatttacaccacacagcaaccacagtgaatgaaattacttcttattcatgtgtagaagtaaaaaaaaaatactgatttacatgaattcagtcaaagaaatttagctctggtgtctgcgattatctttctgtgactggattacacaacaagctaatctctcccgaaatagctactatgttacagccccccaccccacatctctttccatttctcttcaaaaatgcatagaaaatgtcagtcaagtttctgtgggactttaaataattgaaaagagagacatattatgtcccagtgaatcacttgattttgctgtagccttttatattctctgtggatattctgtatattaatgtaaaaataaaacttctctggattccttaatgttttccatgaatattaatcctgtgttcccccccaatcagaagagagtaaaaaacaggaattaaaacttcctcctgggactgaaataccctcacaaagagaagcaaatcagtgactgaaggtcaatagagaccatcaaggtatgaaaaggaaggaatcggattttccatactggaaacggtggagaaagtgcaaatagtgcctctgtagatcctggatgcgacgatgccctgtgctcttcctcctctcacagtcctacagggtcttgaaatcggaaatggaatagcattctgcccagttttcacatcatctacccttttggaaaagtatgcaggtgtcatatctttgaaggagctacatttttattactcatctaagatgttgtttaattgttcctatttataataaatatttgtgaaatattttcaacttttttttgttattgccattttaaggatactactattactgggtttttcaagttctcttatcttaaatacagaaaaagtctggattaggaagaagcatctccacagccacaagataacaggattgatctctgcgtagtctctaattaggcataagcagcacgcacaaatgtaagctctttggtgagtagccaatctctagatactagtctttgatgagagtggaaggagagcttttattttgaggtatagagagcctttgatttattttctttttctttaggactacataaac

SEQ ID NO: 588054 - DNA, 4001 bp, Homo sapiens
ctgaaaacacacacacacacacacacacacacacacacacacacacacacaaattagctgggcgtggtggttcatgcctgtaattccagctactcaagaggctgaggcaggagaatcgcttgaattcaggaggcagaggttgcagagggccgagatcgcgccactgcactccatcctgggtgacagagccagactccatctcaaaacaaaacaaacaaacaaacaaaaaaggacaatactgcagtgactgggtggagatgcttaatattttgcgacttttaataatcaagtattagatgcaaaccagaaggacccaggggaaagagttaagtcaagacaacttcccagcacctgataccatccttcaatccctccagaaggtagataaaatttaggatatacacttgacgtagtctaaatcttaactgctttccactagtcccaaacagataggcctggcctcatctcagttattgacactaaagacatatatagctggaaaggaaaatgaactatgtcatgaatggcatataatgtgtattggactcactagcgaaggatcaggcatagacacacataattcacagtcaaaacccaaatggctaagcttccacatgaaaaaagtcacactggcttgttattacagccagtggtgaaagatagatagatagatggctataagtaacaagaacctagaagggattgtgtcacctgtcctatcacgcattcccacagtagaaatcactaatcaattatggaactccactgaaactgggctaaatctcaagagtctttgacacggtaattcaggcacttgataccaatgactgaagttccaaggggagattaaacctgtttgctaccttatgtagtgtgtgaaacctagtaacaacgactgagcagtctgtgtggttctaatgcttcaaaaacttgccttttcaaggtgtatggcatcctgaagccaatgccacatcaccttggactaggtatatcccaaggtctctcagtgcaatggggagagcccattgccatattattaactaattctctctaaaatgcagcttactagttggaaaggtcttccgtgtaaaagactgtagtttacacccttatgtggtccaagcaccaaaatcaataatctgtaaatgtttgttcaaacaataataatgagaatcagggaatgacagagctgggagagcatgatgaccatttggtggaataatctgaggatcaggatgcctttgagaatttgataaaagctaaggaagggccttcttccggacacacatccacgtgaacactagttgggcgagttgacctcccccaactcctcctgacagctacgtaacagataagtaaaaaaaagtatgggaaagtagctggccgtaggtcgcagtggcaaagccaaaagacaacagtcccagaccaaacctacgcgtccccatacccgcgctcagcagagtaagtgtgagccacgcgatccagcagtgggcttcgtgcactgctcggacacggcacactcgaacaccaaaatgaacactgcaaggtacgttttcaggaattgcatggcttccttccaaggagaccacacgtcatttcaaaagctcacggccaaaaaaaacccgcaccaaccgatctcactgcagccccagaagaaacgctcccaccccgctcctcaggccctgcctcaggaattgcatggcttccttccaaggagaccacacgtcatttcaaaagctcacggccaaaaaaaacccgcaccaaccgatctcactgcagccccagaagaaacgctcccaccccgctcctcaggccctgcccagccttgtggcctcccttcacccgccgccaccatccgcggagccaaagcggagccctggtctcccgcggccggggatgggggctggaagctcccggatcacctcgctgccggcaatgctccacctggcagtgctgcccgatgtccaactccgccatctctccggcgccgtaaggggcggggcaaagcctgaggggcggggcaatgagcgcgcgcggcgcctgacgggagagtggcggacccagaggcggagtctacaggtgggggcggggcctggaaaccagctgtgcgatttgtcctaggtgcattcgccgtgaccaggaaaggccactgttctgtgagtgttcttctcggagcggaaggcctctcgcctagtccttaaagaaatacccacctgcagccgggcgcggtggctcacgcctgtaatcccagcaccctgtgaggccgaggcgggcggatcacctgaggtcaggagttcgagaccagcctgaccagtgtggcgaaacccccgtctctactaaaaatgcaaaattagccgggcgtggtggcacatgcctgtaatcccagctactcgggagactgaggcaggagaaacgcttgaacctgggaggcggaggtcgcagtgagccaaaattggaccattgcactccagcctgggcaagaagagcgaaactccgtctcaaaacataaaaaaagaaaatgaaaaagaaatgcccacctgcctttctggacgactgcttaccgcggttccctgcatacggccacgaaaatcagcaacggcttcacatttatttttttaaaagttagtagaactccaggaaccagaacagtgccgggcacacagtgttgcaataatcaagcaaaagagacagacatgggttattcaattcctgagccatccctcaaccagtgttacttgattatgtagtgtaacatacatgccccttgcaaaacagtcatcaggctttttaaaaagttaatatttctttatctttgtcctttttttttttttttttaaattctggtagggggaaaaaaaaagtcttaactcctgagcccctgaatgtgtactgaaccttacagagttcctcagagaacccagactcatttagcacaactacctgaagaaagcttatgggattccactgggatgtaggggagtatcaggtgcctggtgagccactgcaaaggtactgaaggagaggtacttctgggtggggtacatatgaatgccattccaccaacgtgatgccaggcaccattcagcgtggatgggtgacaatcacctgcactcctgacaggaactagaaaagtattcgatgcctcctatatacctttggagattcccaatcaataatcactgaggaagggcgaagggtgacactaggaaaggggaatcatttcttctgcatttgctcttgagccaatctatttaagatttccgtctcagaattgcttgagtctctggagaaactttataagatgtcatctggctatcccagcctccatagcttttcttttattaagatgagaaaaccagttcatagacattaaatgattggctcacattagtggatgaaccaggacaaaaaatgcaagtactaaagacttttggtattcttggatctagggatcagtggcttacctagattttatgtttaagttgatcagatcaatcaataacaggtttcctggaattttactaggtgtttggaatgttctagataggtggcaaatatatgttttatcagtccaattattatggatatgtttttattttttcagttattggacacctcatagaacatcagatgattagcgtagccaagattgcagttgctacctctgctttctctatttagtctcctttgctgatttcttctctaggtgctgcttaaacacatctatttcactatgtttatgtctttggtccatttatcaatttacatcctcatgcaagtgaaattcccatggcttccatattaaagactctcatacccatattctcagccctgagaacactttaccaaacatgaagtaactatttccaactgtctgatagatctatctatgtgcattcatttgtcatggtgtcttaagcccaaaatgggataatttcctaccatatcatcccctttctaacaaaggcagcctgccacatacttgtttcattcaaccaatc

SEQ ID NO: 588055 - DNA, 4001 bp, Homo sapiens
ccttcggtatttgagcatctcaaggagaggtcaacacacaacaggctccatttagccatcctcctagttcatttgcctctcctccccatcgctggatcttccctgcctctctaaaggctccagaagctccagatccatggtcttttacttgcagaaacttcagctctcgtgtgttcctgtgccccctccccattggaatcctcaaatcaagttggctcaaagaataaaaggtgtccatgtaaccaaagcctttctccctagaagacattcggagtattaaatagaaaaagcaatcaaatccattaccgtagttatcactataactacaactccctaaatgttgcctcattatatatctaaggtcttcattttttaaagttggaaaattagttctcaaaagacatctccacattggaaaaaaaacacgaaaatgaagtcacctgggaaagggaggattctcatgcccacagcaggatggtcgcaccgcaaactgatgggcctcagggcttcaggggagggagccaggcagggagaacccagaagaaggcagcggccagaggaggacgaactaaccatggcccaggctgcagtggaggagctcactccagacccagggcaagggggttgcgtccacatcctccccgggaggcaccccggccaggaaggccctcgcagacgctctgagaagtgagaagcctcggctctgctcccagtagggcccctggccatgctcttgagcaaatcccacaccccttgctctctccatctttgtctctgaaaggcaagagccactccccggctgccaggcccaggccctccgtccgtaactaaggatgcgccgcccccaggcccggccatctccaaccaaggaggcgacaccctccaggcccggccatcttaaccaagatggcgccagcccccaggcctgggccatctctaacaaaggcggcaccgcccccacccccaggccctgcctgcatctctaaccaaggaagcaccaccacccccaggcccaggcggcatctctaaccaggaaggcgctgccctcaggccctgcccgcatctctaaccaaggtggcgccactccccaagcctgggtcatctctaacaaaggtggcaccgcccccccaggcccaggcagcatctctaaccaaggaggcgctgcccccaggccttgcccgcatctctaaccaaggtggcaccaccccctaggcctcggccatctctaacaaaggcagcaccgccccccaggccctgactgcgtctctaatcaaggaggcgccacccccaggccctgcctgcctctctaaacaaggaggtaccaccacccccaggcccaggcggcatctctaaccaaggaggcgctgcccccaggccctacccgcatctctaaccaaggaggagcccatccgcaggcccaagtcccatctctaacgaataaggtgccaccctctagacacccaggtctttaaccaaggaggcaccatccccaggccctgcctgcgtctctaactaaggaggagctgcccccaagccctgcccgcatttctaaccaaacaggcaccaccctaaggccctggccccatctctaaccaaggaggtgccacccccaggccctggccccatctctaaccaaggaggtgccaccgccaggcgcggaccatctctaagcaaggaggctccccagacccaggccgcatctctagccaaccaaggcagcccctgagtcccaggccaccctgcaaagcagtacagcgttcctgccaggagttgctataggcgaccaggagtggagaacagccgagacacctctgaaaccacccaggaatcaacaggaaagttcagagtggaaactcgcatcgggagaattacctcgtaaacctccaccaagggcagagtaggagggatgctgggcgcctccgccgcttcccacggagcatgcagaggtgaggccaccgcctctccatctacaccctttcttctcagactcctgcactctcccaggaagccctaccatcctagttatccctggctggcaccacccacccgcgcttctctccaatacagccacagccctgcccaggtgggacagggcatcctgccgccacagaggctctgattggcccagaatgagcacatgacaccatccacagaccaaccagcactccgagggggtgtggcctgaggctggtagccgcccccacccagcaggggtccctcctaggtctctgggagcccgctccagtcccaggaggctgcaggcgagaagcgcccagcgtctagaaaaacttggactctacgtatctctctcaggcatattaaaggttctgagctgccatcagtcaggaaactaatccaacaatttttttttttttttggagacgagtctcgctgtgtcgcccaggctggagtgcagtggcgccatttcggctcactgcaacctccgcccaccaggttcaagcgatcctcccaccttagcctccagagtagctgggattacaggtgcccaccgccacatctggctaattgttttggtttgtttttggtttggtttggttttgagatggagtctcactccgttggtctcgctctgtcacccaggctggagtgcagtggcacgatctcggcttactgcaacctccgcctccctggttcaagcaattatccgcctcagcctcctgagtacctgggattacgggcacccgccaccatgcccagctaatttttgtatttttagtagagacagggtttcactatcttggccaggctggtattgaactcctgaccttgtgatccgcccgcctcagcctcccaaagtgctgggattacaggtgtgagccaccgcgcccacctttttttgtatttttagtagagaaggggtttcaccagcctggcgcggtggctcacgcctataatcccagcactttgggaggccgaggtgggcggatcacgaaatcaggagatccagaccatcctggctaacacggcgaaaccccgtctctactaaaaatacaaaaaattagccgggcgtggtagcgggcgcctgtagtcccagctactcaggaggctgaggcaggagaatggcgtgaacccggaaggcggagcttgcagtgagccgagatcgcgccactgcactccagcctgggcgacagagcgagactccatctcaaaaaactaaaaactaaaaactaaaaaaaaaaaagaaaaagaaggggtttcaccatgttggccaggctgatcttaaatccctgggctcaagtgatccgcctgcctcggcctcccaaagcgctgggattacaggcgtgagccaccgcacccagccagtacaacaatatttaacatgctcagtgctgagcaacagacccctatgtcacatagtccctcctacctgctcagactgcacacacagcaaactccaaaagccctgggataagggagccaccagggccggtcaggaacacgcagaaggaggacccaactggggccaggtgcggtggctcacgcctgtaatcccagcactttgggaggccgaggtgggtggattacctgaggtcaggagttcgagaccagcctggccaacatggcaaaaccccgtctctattaaacatacaaaaaaaattagctgtgcgtggtggcagatgcctgtagtcccagctactctggaggctgaggcagaagaattgcttgaacccaggaggtggagctgagtgagctgagatcacgccacttcactccagcctgggtgaaggagcgagactccatctcaaaaaaaaaaaaaaagaatgacctaaataatagcagaaggagaaggaggcaagggaaggcagaagagatagagagcatgcccagaagaggcagcgggggaacctgacagcgccggacagccaactattcagacactccagtagtcttgctaaagaattctgaactaaaataatatgaccaataataaagaatgccctgatcaaatctatgttccttgcatccaagaattccaaaca

SEQ ID NO: 588056 - DNA, 4001 bp, Homo sapiens
tggctttaagtctgctgttcagcctgcatttctttctgagtgttaacagcatcgtctttacagttgtgcaactgttgttttgttttgttttttgagaaaaatagagatggggtttcactacactgcccaggctggtcttgaactcctggactcaagggaccctcccgcctcagactcccagagtgctgggattacaggcgtgagctactgcgcccggctatggaactgcatttctgctgagaaccttcacgaggtcagatagaaaattttccactgtggcctcatgtcagtgctcaaagtttcagactttggagcatttccgatttcggatttttggattagggatgctcaacctgtatttggagagcaagtctctccggtgctcattttaggctaacctaagacagcacacctgaatcagctgggcaccacagctaatcagcgcacctgtggtcacagctacttggcaggctgaggcgggaggtttacctgagggcgggaggcagaggttgcagtgacccgagattgcaccattgcaccccggcctgagtgatagtgcgggactctgtcccaaaaaattaaaaaaattaaattaaaaaaaagcacgcctgatatagttcgggtctcctgacccaatattcggctctgggcccactctgtcactccaggacacattctcccacatctagcaccgcagcaggtggaggcaggactacgactgggactgctctttacccctgcctggcgtgcagaggggatccttgcaaagctgttatttgaactaaagtcaggaaaggtgtccctgggggttagaggtaggacacgctacttccttcagcatggggacacacactacagatgtttcagtagatgaactggtaggctcggaagataaagctggtgagaggcagctgtgcggggcatctccaaaaggtcacttggactccagcaaaaaaagccagactgatgggcaggcgtgatcagttagcgcgttcgttctttcattcactaagtatatagtgaacacttacatgagccaagccctattctaagaagatggaggtacaagtcaggcgagcacgcaggagtttggattttagcccaagttggaggaagttaatttttaaagccccagctctgtcgtttttaaactgtgtaaagttgacctctctgaacttctgttcctcataataaatgacctacaaattagagttctcaagagagctgagcagcaaaacgtgttaagtcagtgcccaaatgtggaagcttgtggtaattacaggtgaaggaccccaagctcaaggttaaatgacttgcaccgggtgtcaagtggaagatctgtcactctattaggtccagccggcggccgggaagcctgcaggaggtactcatttcgccaaggaggaatccgaggccaggcaagaaggaagccccgccaaggtccagtcaaagagctggcatcgccgggattcgaacctcgcgcccactgcgttccgtcgctggcccgcgccccaacgccacccattgccgtggaaacggccgggcgcatgctctcccactcgctcccgccttgctttttttttttttttgcggcgggataccccagcgactgaacgtgagccgcagaacgcaactacgttcgctctcctccccagacccggatccctccgcggccggcggccggcggccggcggccggcgcactgcttcccgactcgacgctcgaaacggctttccgcgcgccgcgccgcgccccacccccaccccgtctcaccccaacccccagcccggctcacctgccgcccgcgtctccatggcaacgccccaccgcggaggaaaaaaaagcctcgggctcttccgggccccctcccgtgccgaccgagggggcggggcgccctgctgacgcttcgctttttatttttatttttttaagaaaagagccggcgaggttatggcgaatctgcggcatccaacatggcggatggagtcttcgccctcctccccacggggcgcagacgcctgcgtagcggacgtccgcttcgggtgaccctcccccggcgccgagcgcggcccggcagggccgagctaacgcgcatgctcgcagtcggaggccgtgctttttatcccacttcacggattccgctgcgccgcgttttgagccacgcccagggaggggccctcgggaggtccggagcgcggatctcggggtcaggagtctggcggttgtgccaggcctctgctagcgcgaccctagacccgcggcatgtggggccgccgagctgggcgtgcaaggagagttctgggtgcgcttcgtgtcccagctctacctctcactacctaacttggggcagcgaattaacttttcttgctctcagtttactgatgtgtccatcggggtgctcccaacctgcatcccgctcaaagctgcggcgtttcccgaagcgtggggtgctttcctttgggccacccggctgggttttaggggctacagagcactgagcggcctacgatcacacgtgacaaggcgacttcctcctctctcgtctctttttgtcccacaacaagtctgcactggatgtgcgcgcctccaacacccgctcattcatttctctgcttgtggcacagccttcggcaggcagctgagtctggtggaaatttaatgactttgtttttggttttgatgttaaggtgtttagctccaacactgtagtcctcggctcaaatgatatcttccagcccctaaccctcaccccccgaaacccatctaaagtaaccctccaagacacttcatattttctacgtagcatccattcctatctgtcattatctccctcccttacctctgtcaatggtcaccccgttagcctcagaaacaaactgagcctgacagttatttatttcatgagtaatgagttgatgtggtccatgttctaaggtcattttctgttcatgacaaataacgtttttcacttacagtagtcatataaagtttttaaattgttcgtttacattttcaaaaatcagtcaacttaaaatggtgtacatgctgcaaagacatgcccccccccccccaaaaaaaaaaagtgtaaaagcagacttcaggagactgaagtttgggaaactgatttgtgttcatggttcccctgaaatgctagtctttgcctgttcttcttttcctggaataaccctctttggttgctgctcaacatgaaattctcggacagccctgaagttcacacttcatgttcccacagctctggtctcactggcctagctccatcccccacttctctgtttgcacagcgttcatcctcactagactgagcttcctgagcagcccttataggtccttttcatcttgttttctcagcgcctgttgcatagtcatattactgaatgaacacttcgttctggggtcacttattttttaggaggaaaactcccttgggcattgagcttcaggatgactcatctgatttctcaggagactgcccgcctgctccttaaccctgttcttgggaaatacggaaccatgaaaagaccctaaagttgtccagtctgttaaatatatgctcacagatatagcctcccccttcttcatttcatcctcgcaatctggaaggttaagttgggcaatatgattattgtccttttccagatgagaaaatggaatgttcagagtggtcaaatggctttctgagattacacagcaaaatagtgaagagccaggtgtggatctcgcctctccatgcccagtgttcctctccccaccacatctaaaatgtacccaaactgccccccaggcctccaggagagcctccaagagagccagttccaagacagccacagagtcgcttcacagccaccacgtcctccaccacaagatacatggctaggtggggcccatcagaatctttatttggaaatgaactgctcaaaaagctgcattgatgagcgtttccttttagaactataaatatttacaataatcattattttgct

SEQ ID NO: 588057 - DNA, 4001 bp, Homo sapiens
ttgagtgtgagtgtgtctctgtgtgtgtaggggtcgaggtggggggggtccgtgtttgcgatctgaacctttggtacctacaaggagggtgtctcaccgaacggtagctaaaacctcaccagaaccgcgcggaagtgagaagtcgcggccaaaggcgcccgcagaagcctcctctctgggccggaccccagcccgagcggccgaaaggagccccccgcccggatcacaggtaacaaaagaaatagaaaccagtgcaccgtcttctaggggaaggggattagaatagggaaccttctgtaacttggacatcggcagagaaactttatacaattccatgagagattttattatttttttctgatagaaaagaggagcgagaagggggttgggggtggatagaagtagaaggaaggagagacccggcgcattccagtcccttttcccttagctgctcccagccagaaggcgcacttgatgcttggagaaacgaaggaggtgaagttcatttgtaggcatggaacccttttaggggggccgaagaatgaatcggttctcacagccgaacacagccactcaatacacacacacacacgcacacgcacacgcacacaccccttgccctttgctaaaaaggaaaagattcttgaccccaagccgcgggcgtctatccgctggtctaacgcacacccggcggcgttccgttcggagcaagcagccgccgcctcgcgggtccctggcccagaggccgggcgatcccgcctcctaacggacctgcctttcctccgcggcgcccgcgcccgcgccgccgagagcagccctcggtagtgcctgccgcgcccgctccggtgggcgggtgtctacctgcagccccagccccagcgttcaccccagcctcttggaatcccctccccagagctcacgaacccccgggcctccgccagccccgcacactaagcgaccttcggggaacttgagaaggggaagaggggcgggtggtaaaaggaggaagaaaaacgaggctgaataaggtggggtggggggtggagggtaaagcagggaaagagcagggagagaggggctcccagccccaccgaccaacgtccaaactttcagaggatgagtgcggaggaccagtcatcccgatcggggtgcaggggcgcggggcgagcggagacccctggcagtgcccgcgccgttgcggagctgacagcttcccccagccactagaatgcccggggctcgcggggaaggcaaaacccgaaaagacagggaaaaggagagaaaactgcccaagcaaacgtagatgatcctccgccacttaatccaaaagttaaatccggaaaaacgcagcccccctaaagaaagtggaaaatcaggtccctcagtgccccctccctccctcagcggagcaaaaccttgagccaaaaaaaaggggaaagagatagaaaaggggggcagagcggaagagatggtcgggatgaggggatgtgtgcgacagcgagcaggagcgagcgaggtaggggtagagaggaagagaggcggagagggagagagagggagcgaaatatcaaagattgtgcaagatcaggctggaaagataatcgatactcgacctaaatttaacagaaactactcaataaaagttaaagaaaaaacttactttccatttcccctgcagttcctactcgatcttcgcctcttttttgttttgcttttattttacttacagctgatcacatccaagtaaaacgagagggttcattaaaaaaacaaaaaaaataaaaaataatcctcgaactttattgggtgaaaataaaaacgctggagcagaaagtggggggcatggagcggtcctcgggggtccgggaggagttaaagcatgtgccgaccgcggtctcgctgtttggttgtgaaggggttgggaaaaggaggaaaggaaatgaaaatccgatatgtctttattctgctaattattatcgttttagccctgtttaaaaaaatggctgattaagttgagtgcgcatgtctttgtgtgtctattcccgatatgcactctgggaatgagagaggagagcgagggagagggagagggagaggggggagagagaggtgtaattagtgaggtgatcaacattccccagactgcaaatgacgcgcagcccggactcagagcagctccggagcctcacggcttccaaagctcccagcgctgcggctggagccccggatgcggcgaccgcggagaggacaggggatggggacctccgggtctcgcaccctacgcgcccctgcgcgcgactcccaaacttcattagacacacacgcgctcttacacacaaacacagacacacacagagcaagaaggggaaagaaataaaacatagataccgccaaagcatggccctttaaccattcgagattttttttttattttaatgaggcaaagtaattattatcggaccagagatttgtttactagggagctttaagcagaaatatgagttagggtaatgaagagcttttctctgcctagtttattctgctgtgcacatgaatgcactttaatggcgaaatgcgggggcctgagcaaatatgcagatatatgtaaataaagggtgcctggctgtgtgcaaacaccgctcagcccagcctatttcaaaggaggaattgcactctggatccttaggcactctatttaaacacgtatccttcacttgtatacgcaggagagaaaacccagggtatgggagatggaagcggttagtcaaagaaaacttccaaatgagaataagtgacggttgcaagaatgatgggggggtggggtacagttctagcctttatgtaatattcttgaatattttatcagaattgcataagttcaatgtaataactttaagaagacttagaaaagaaaaacctttcatcttttgagtctgttgagttatctttcttgaagcacattatgatgaattttaaaaccccactacagatctcattagaatgaaatatacttggtattttctggtgcaaaatttaaggtggctgattctcatttgaaaatctaattatctctttccaatattacagatgtgaatatgagtgacactttcattaaaagataattaactaaaactaggaatagacatacttttaaataccccctactgaatttggaatatatatatggaaaaaaaaaaaaaatatatatatatatatatatatatatatatatatatatatatatgcattgctactcagcatcttgatgcacttcgcactactatactacaggtcacaggtagacaccatctatgtaatatttcaaaaataggaattctaaagagaaagtaagaataacaaatcaaatgaactaaaaacaggaaatacttgcaatgtccagtttcctggacaggtgatgtgtcagctgcctttgagttgacaggcctttgaagttctggatcgccaggatctgcttcaaaaccttgtcttaggccttaagcaccaaatctaccaaataccaacagaaagatttatcgcacaagtatttggaacaacagagactgcaaaaatgcatctttccaggccaaaaaccttgcattatcagggaacgtttggaaaatcctaggactgatgcaaatggattaaaaaccaaacaaaacacctgggaggataaaagcacagtcctcaaaaaagcagacctaggcccagatcaggaaagctggttgccttcagcagctggctaaagttacaatgaaagtccagaggcatggagtggagaaaaaaacccctagatatggtctttattaagagaaaaaagcaaatcaccaccttagggatccagagtcagggcaggtactagtgttttagaaaccaaggctactaaatgttaacagaaagaaaatcatctgtctctccaaagactttattcgattttaaacttctttgggaagaaatttgttgaaagtggaaagctttctaacattttaaagttactttgttta

SEQ ID NO: 588058 - DNA, 4001 bp, Homo sapiens
ctagggctctatctagaggtggcgtgtgggaggaggcagatcaggtgggcgccagaactgaagatgaaggccacgtgtgctgagggaggatgcaggcataaagcagcatctctgctggggtgggcagggggtgggccctggtgcccaggatagaggatcacagcccaagctggctggagtttgaggccggggtccagctctggtaggaaacaaaggtgagaaccaagaaccagcacagaagaccagtcgaccagctgtttgcctcatgggcagggcggagctggagaaacggcagctctccagggcatggcgggaacctatctggctctctgcagactccactccacggcggggcggggggtggtttgtgaacccactgagcctaacggctgctgcccgaggcctgtgtgggggtcctccatgctgtacagcactgttccttcttccagacacttgtcactgcacgtgtggctggtcactgacatggcagtctccttatgcgacagggtctcctgaaggcgaggatcgtatcttttttatctccaaatcctagtcacatactgtggtcagggaacattctccataacggctctgtcgactcaacttaggctggcaggtgctaaccggcagagactggaatgactcacttctctacacgctgcccaccctgagaaataaaatatttcttaaaagcagagtggactggccgggcgcggtggctcatgcctgtaatcccagcactttgggaggccgaggtgggcggatcacgaggtcaggagatcgagaccatcctggccaacatggtgaaaccctgtccctaccaaaacacaaaaaattagctgggcgtggtggcacgtgcctgtagtcctagctactcaggaggctgagggaggggaattgcctgaacccaggagatagaagttgcagtgagcaaaggtcgcgccagtgcactcctgcctggcgacagaacaagactccgtctcaaacaaaaaaaccaaaccaaaccaaaacaaaaaaccccacacgcaaaaaacaaaaacggattggaccatagcgattttcttggcctcacctcacaggcctgtagacaggagtgattagctagttacaaacagcgcaacccacgcttgccacacccctaaagactggggttctggttctgtcgtgcaactccagcgtagctccgtcgcctctctgggcggaggacccttcacttgtaatatgaagctctgggtatccgtgggcggtaagggctgcctagaaaacctcactcaccctggcgcctccctccactactttcagggatctgggtctcatggagagactggaacattagtgggcttgagattcaggggcaatctgcactaaaacagcctgctgggtccacggcctgccaggggcctgctagctgtgccaaggcctgagatgccaggcatctgagccaggcggaggggcccgccagggtcccgtgcgtgctcctagttagaggctctcctttcaacggcagagccccgcggcccacgtgcagagctaggtcggcctcggggccggcgcccgggaggtgctcaaagccgggtcttgccacatccctggagcgccggggtgcggggaggcggcggggcccataccgacgctgcgcgtcctgggccggaggcggcaggcaggagcccagtgagtacctggctggagacgagaggcgacgaggacctcccgctgcagagcgcggacgcgcccgggccctaccaggactgctggagggcggggagaggcgcgcgcccctcgcgggggccggaggcaggaaaggagagccctagatgcgggaccccccaacagctccccaccagtgccagcgtccccgtcggccctaggcaccggcaggaaatgcccgcccgctgacccgccccttccggcggccgcgctaggagcctgggccggactcggtgatggtgggcggtggagggctcggcccgagcggctccatccccagccgactccgcccccgaagaccccgccccgatcaggccccgccccctcaggcttcacccataactgccgccacgcccgcagggtcctccccgagctgaccccgcccctttacagtcgtctatggcaggcgccctcccgaaggctcccccgaaatcaggtccctccccgagcgggccccgcctccgaaagctccttcccgagccggcttcccctcatgccccgccccctcaggctccgccctcgtgtcccgcccccgaaagttcctccccagccacctccccacatgctccgcccccaggctccgccccatgtcccgcccccaaaaagccccgccccgaaccggcaccctcatgccccgcccccagcggccccgccccgcaaggcccagtccccagcagctcggtcccgagccgaccctgtcacgtaggctgcgcccaccagactctccggatccgacgcgcgtgggctcctggctccagacccccaacggggaggtcgcggccgcgtgctgggagacttgtccctgaggacgctccccgccaacccccagcccccgccgacccccagctcccgcctccgccgacccccagcccccgcctccgcggcgcccacggcttgcctccacgggaagtcgctgtctccgccttcagcgcggaaggagaaccgacgcctctccaggccgcgggcccctagctaggcgggcaacgcctccaccgccgccgccaccgcgtgcgcgccctggcgagccgtcccccaccacgtggcccctgccgctcctcccgccgcaggcagcccctccgggatgtgctcccagccgctggctgtgctcactccacttcctgcctgcccagatcgcactgagccgccaggcccgccagagccccgcgtgttagttccctacgtaccgcaaattgggtgtcctaaaacgacatccgcctattatctcaaggcttctgtgggccagaaggccaggcttagctgggtcctcagctctggtcagccgctgtgttctcatctgggggctggactggggaaggatcacttcccacctcatgcgattgctggcagaagtcatgtcctggtgcctgtaggactgagggccggcaggagctgctctcagctcccgggggctgcctgccagtccctactgtgggagggtgggcggttcacagggtggccgcttccccagggtccgtgggagagccccacccccagatggagtcctgtggaacagaacctaattgtgggtgacatgccaccccctcggcccagttctactcagattcaagtcacaagtgccgcctgtagccaagggaaggatgggcattgggctggctctggcacatctccttaggatatctgcagcattctgcccccccaacacttcccatttccactttctatatgatttccttattatatttattattaattatcccccgctcccacactcccatgcaaatcagctcttggagggcagccacctgttcttgttctgggtgcctgatgtgtgctgggccctcgtgtcgtgtggactgagtgagcatgagtggagatcttaggtgctgctggtgtcgtggcaccctaggaactgcctgcccccacccagccctctctccaactgcctcctggacttagcaaggtgttgaaaaccaggcagttctgctccctcctcgtcccacccccctctcccatcctgttgcttttacctcccaatgttttaaaccacccactcttgtccagcctgcttcctctgtcccggctgcaaccccatctcctctcaccagcattacttctgtgccctgccctggggtctccctgccttcatttgggctcccctgtccacccctcctacagcagctggagggactgacttaccgggcaaacccacagtggccctcccagcttcacgcctgtcctgcaggatgaggtctgggcccccttagcagctgcaaaggggcctgcacagacttgcaggccgcccctctcaccaccctttccccttccaggagact

SEQ ID NO: 588059 - DNA, 4001 bp, Homo sapiens
aacacataaactcactacagatttcctatctcaacaaggagggtctggtcttttctacaggaaaatgtttagatgaatgtgactcagtttcaggccaacatcactttctagggctctatctagaggtggcgtgtgggaggaggcagatcaggtgggcgccagaactgaagatgaaggccacgtgtgctgagggaggatgcaggcataaagcagcatctctgctggggtgggcagggggtgggccctggtgcccaggatagaggatcacagcccaagctggctggagtttgaggccggggtccagctctggtaggaaacaaaggtgagaaccaagaaccagcacagaagaccagtcgaccagctgtttgcctcatgggcagggcggagctggagaaacggcagctctccagggcatggcgggaacctatctggctctctgcagactccactccacggcggggcggggggtggtttgtgaacccactgagcctaacggctgctgcccgaggcctgtgtgggggtcctccatgctgtacagcactgttccttcttccagacacttgtcactgcacgtgtggctggtcactgacatggcagtctccttatgcgacagggtctcctgaaggcgaggatcgtatcttttttatctccaaatcctagtcacatactgtggtcagggaacattctccataacggctctgtcgactcaacttaggctggcaggtgctaaccggcagagactggaatgactcacttctctacacgctgcccaccctgagaaataaaatatttcttaaaagcagagtggactggccgggcgcggtggctcatgcctgtaatcccagcactttgggaggccgaggtgggcggatcacgaggtcaggagatcgagaccatcctggccaacatggtgaaaccctgtccctaccaaaacacaaaaaattagctgggcgtggtggcacgtgcctgtagtcctagctactcaggaggctgagggaggggaattgcctgaacccaggagatagaagttgcagtgagcaaaggtcgcgccagtgcactcctgcctggcgacagaacaagactccgtctcaaacaaaaaaaccaaaccaaaccaaaacaaaaaaccccacacgcaaaaaacaaaaacggattggaccatagcgattttcttggcctcacctcacaggcctgtagacaggagtgattagctagttacaaacagcgcaacccacgcttgccacacccctaaagactggggttctggttctgtcgtgcaactccagcgtagctccgtcgcctctctgggcggaggacccttcacttgtaatatgaagctctgggtatccgtgggcggtaagggctgcctagaaaacctcactcaccctggcgcctccctccactactttcagggatctgggtctcatggagagactggaacattagtgggcttgagattcaggggcaatctgcactaaaacagcctgctgggtccacggcctgccaggggcctgctagctgtgccaaggcctgagatgccaggcatctgagccaggcggaggggcccgccagggtcccgtgcgtgctcctagttagaggctctcctttcaacggcagagccccgcggcccacgtgcagagctaggtcggcctcggggccggcgcccgggaggtgctcaaagccgggtcttgccacatccctggagcgccggggtgcggggaggcggcggggcccataccgacgctgcgcgtcctgggccggaggcggcaggcaggagcccagtgagtacctggctggagacgagaggcgacgaggacctcccgctgcagagcgcggacgcgcccgggccctaccaggactgctggagggcggggagaggcgcgcgcccctcgcgggggccggaggcaggaaaggagagccctagatgcgggaccccccaacagctccccaccagtgccagcgtccccgtcggccctaggcaccggcaggaaatgcccgcccgctgacccgccccttccggcggccgcgctaggagcctgggccggactcggtgatggtgggcggtggagggctcggcccgagcggctccatccccagccgactccgcccccgaagaccccgccccgatcaggccccgccccctcaggcttcacccataactgccgccacgcccgcagggtcctccccgagctgaccccgcccctttacagtcgtctatggcaggcgccctcccgaaggctcccccgaaatcaggtccctccccgagcgggccccgcctccgaaagctccttcccgagccggcttcccctcatgccccgccccctcaggctccgccctcgtgtcccgcccccgaaagttcctccccagccacctccccacatgctccgcccccaggctccgccccatgtcccgcccccaaaaagccccgccccgaaccggcaccctcatgccccgcccccagcggccccgccccgcaaggcccagtccccagcagctcggtcccgagccgaccctgtcacgtaggctgcgcccaccagactctccggatccgacgcgcgtgggctcctggctccagacccccaacggggaggtcgcggccgcgtgctgggagacttgtccctgaggacgctccccgccaacccccagcccccgccgacccccagctcccgcctccgccgacccccagcccccgcctccgcggcgcccacggcttgcctccacgggaagtcgctgtctccgccttcagcgcggaaggagaaccgacgcctctccaggccgcgggcccctagctaggcgggcaacgcctccaccgccgccgccaccgcgtgcgcgccctggcgagccgtcccccaccacgtggcccctgccgctcctcccgccgcaggcagcccctccgggatgtgctcccagccgctggctgtgctcactccacttcctgcctgcccagatcgcactgagccgccaggcccgccagagccccgcgtgttagttccctacgtaccgcaaattgggtgtcctaaaacgacatccgcctattatctcaaggcttctgtgggccagaaggccaggcttagctgggtcctcagctctggtcagccgctgtgttctcatctgggggctggactggggaaggatcacttcccacctcatgcgattgctggcagaagtcatgtcctggtgcctgtaggactgagggccggcaggagctgctctcagctcccgggggctgcctgccagtccctactgtgggagggtgggcggttcacagggtggccgcttccccagggtccgtgggagagccccacccccagatggagtcctgtggaacagaacctaattgtgggtgacatgccaccccctcggcccagttctactcagattcaagtcacaagtgccgcctgtagccaagggaaggatgggcattgggctggctctggcacatctccttaggatatctgcagcattctgcccccccaacacttcccatttccactttctatatgatttccttattatatttattattaattatcccccgctcccacactcccatgcaaatcagctcttggagggcagccacctgttcttgttctgggtgcctgatgtgtgctgggccctcgtgtcgtgtggactgagtgagcatgagtggagatcttaggtgctgctggtgtcgtggcaccctaggaactgcctgcccccacccagccctctctccaactgcctcctggacttagcaaggtgttgaaaaccaggcagttctgctccctcctcgtcccacccccctctcccatcctgttgcttttacctcccaatgttttaaaccacccactcttgtccagcctgcttcctctgtcccggctgcaaccccatctcctctcaccagcattacttctgtgccctgccctggggtctccctgccttcatttgggctcccctgtccacccctcctacagcagctggagggactgacttaccgggcaaacccacagtggccctcccagctt

SEQ ID NO: 588060 - DNA, 4001 bp, Homo sapiens
atatataaatatatttgttcactttcaaatgaaataactttcaagcatttttgatacttaataaatcacagcattcaaataaaccactaaaatgttttatgacttgtaacacaagagtagcatcagcaattagtttcaatgctttaatcttcaattatatgaggtggacatagaaggaaataaaaaaattaatgtagctaattgagaagataacaaagtattcccaagtaaaatcagatggtcttgtgccatacaatcaattaatattaattatttattaacaaacccaggtgacagccatgaactaaaaagcatttgtatctaataatgtttataatcatatcttataataagcacggttttgtattctaagatgcaacatttaaacagaggaatctgatcaattgagtcctaaaaactacaaggcaattggtggaaaccatgaataatcattctgaaaaagtgagtcttcaaaaacgatatcgctacttgattaaaactgctttgagccaaaagtgaagtccagtacttgctttaacccaagttgcatagagtgagaactgaagtataagagaaggaatcgaagaaataaaagctagaaagtcatgtttaagtagcagacacacacacacacacacacacacacacacacacacacacacaaagatctgaatacttaactgttgataactgtttataacctggcccccatttcaaggacaagttgattgataagatttatttttaaactacaccaaatagaattttcaacatttgggggtggggcgagtatggttaataatcaggggggaaagggatactactaaagtcttatccttaaattacatcataatttgtttaaaactaattgcagactctgagcaacacggtgaaacagacacatcataaagctagcaaaaaataaactaataaggttttttcttcttttcggccaaagcgttgaagatatgtcgcaggcctataaaacgctattggaggaattctccccaagccaagaaaagttgaccgacttgatctctgcgagcgtgcctgtttcggaaggtgtctcttgacccgccgtgtcctctaagcaccatcgggacccccgggcacccgggggctcagggccatgcactcccctgcgcgcccaccgccttgaactcacagcttccgcgctgggaagtgactggcggcccctcccagggaggactccgcgcgccaccagggccagacaccacccgaatccccgctcggctgagcgtcctggcggcgtgagccggacccgcccgaagtcccaggacacgacctgccagccaccagcccgcgcccgcagggcagagacgcacggccgcccgccgcagaggcgcgaacttttacacctactttttgtttcgcttcgggtttggtgtggctctggcaccgcccaggatcgggaccctgacgctctgattttccaccgcgtggggaagttacctccctcgccccgaggtctcgaccgcccagcttttctgagaagtttctaccctggttactaaaagtggttcccaagagtagtcccacgtcaatcgcacaaagcaatgacaacaacaataataagcgtctaaaggagcgggactgcccctccggctggacgacagcgccggggactcgcagcgtgcgcgggtcggaattaaaaaagcagcccgggagcgcgagggctgagcggggcaagcatgggctgctcctcgcagcctctctcctgcccgaggctcgggctggccgtctgtctgtctatgactgtctagttgtcccttcgactgctcaggcaaagtttgagacatctaggggaccgggagcggatctcccctagccccgccacccacccaccgctttcccgtcccgcgcaccccgctcctgggcaataatcccaccaactcccggccccgcgcgcaaacttacgtttgatctgccggggtttgctttgctttcgccgggacatctcggcggcggctgctgccgctggggctcccgcggtgcccgcggtcgcggctgccgctccctcggctcccgccgccgccgccgccgccgccgccgctggccaggctcggcccgccgccggccggactccaggtgctccgggcgctgggctcctccgggagccgcggattcacgttcggagatgagcaagcaaatgagagaagagagacgggggcacagagagtgtgacagtgaggaggggagggggagaggagagcgacggggggagaatgggaatgtacaagcgaacggtcagggagagagaaaaggggaaagagaagagaaaaataacacggaaagaaggaagagaaggagggagggacgggagagcgagcagcgaggagagggggagcgcgggggcgcagggcgcgggaggaggagcgcgctcgctcgcccctcgccccggcgtgcgggacggatactccggcgccgccgccgccgctccgggccgcgcagctcctgttctgcggcgggaggcggcgaggcgcgcgagggaggggcgcgccggggctgtggggaggggagactattccatcagccaaaggaggattggctgcatccaaatccagtccggatgcaaactacggccccggccttggtcgggcgaagtgcgggggatccaggcggtggtgggggatgggggcaggggtgggtgggagttggaggggaggcgtggggacggcttggaggagggccaccttctgcagttgtcaccgcgtcaacgctgggcagctgccagggcaccccgccccacctccttccaggcaacttcttccaacggccctctctgagggaccccaactctcctctctcacgcctcgccagtccagcggggcacaaagaaatctcagtctctccctaaactttgtgctttcagttatgccgccccctcccctcacccccaacccccgccctcccagcttcttggcaggaaggttaggccactggcaaagtcctcggcgagagccagatgatcacaaatgccaactgtgtgtcttggggccagttaagtccgctcatctgcccaggctctcagaagaccatttctttgctctcaaggctcccaggagaccgctgcggacacggaccgtcccgctctgggcccacgtggatgaggtgctgagtcggatcctcaacgtgttctgtcacccacagtttccattttaaattgtaaaatattcaaatttggagacaagcagatatttttctcatcttgaaaaggaggagcgagcgttagctagctgattagccgtaagtggaaaacgaaccatctctaataaaaatactaactttttgggaaagtctggggaagttctgtagtcccaccctgccccgtgacctttctattctcttagtcttctgccacagggaagcaccgatcgactaataaaagatttgatcttgctgtaatttcccaagcgggtaagacccagtaactatttaatggttctttagcttctaaaattttgttttattcttattcaattactgtatgtgtagtatatcggcaactgcaagccaaaaggagaacaaattttgaggtgatttgcatagttattattttggccaagttaaactgtatgaggttagcttattttcttacagtttcatatacggtaagtattaaatatattctcccatgtgggttggaaggagcttctatccaagtgcagtgggactagctgctttatgtaatcagtatttactaataaactccactgcagttcacatgagtcccccagatactgctgacttttcccccaggaggttgtgaagtggaccattctgatctcaaattgtgtccccgtttgcttggttgactattatttgtgtgaaccacaccaaactggatactctaaaagggtctggggtcagcacagagcctgggctgattgagcataatgcaagatgctcagtgtgtaagaggcactgtaatcagtgtcatttataaccccaacaggacatcttctggaaggtgtaaagag

SEQ ID NO: 588061 - DNA, 4001 bp, Homo sapiens
cttaaaatcaggagtcagaattgctactttagaaattaaaataatcgatgggtatactagggccaatttccctgttaaaaccaactcctgctcaccttcgctcccgacataaaaacaaatgactttttcagaataatttttcagaaacgaagataattaatgtagcaccatataacacaaattaaagctttcagacaaagactgagaaacaatgaccaacaccagcaaatctaaagtgctcttatatatgtatacacacaacacacacacacaccccaaaccaaatattcactgttcctggggggagactgcttcttcctccctaaccgtgaaccgctgtatattttccaattttgtgattttcctttttctgctatcacattaacctccaagagaactgcttaagttacatggaatcccaacctaatcacatcacgacttctctctcagcctttacatttttctctcaaatattagctcttcgcatttttttttttttctaatagctgggctgagttgacagaaaagggctgtggaattcctgctctgtccgatatcttccctgtattcctcttttctcatccctagtctctgttctaattcccccgcctgctgtctctcattgacgccttcccagctgctggatccttcactaacctaagctaaggatatcaaatggaatcttttccttctcaggggctatgctctttccttacagttacccacggaggagagaggacaggaaaggtactaaaacaaagaattgccaagtccctttacctccaactttggtgtaaatatataaggaaaggggatctgccagggctcttctttcctgcccttagaccttgttcctctcacacctctccttcccagccttttataccccttgaggtattagtagattgttcactgtgggccctaaggcttggaggattcccatgggtcagcccccacacccccacgcccctaccatcctctttaattaacttctccctaaatcccagggcttcgtcacaatcgtaatatggttcttaaggactcaactcccagtctttcccaaagttgggacatggcctggccccgaaacgggtgcgcatagccttccttgaactggaggtaaagacttctcctgaagggtttgctggggctccaacctcagtcagtgcgctcagctccagcaagagaatctctccttactctcagggagactgggtcccccacgaggcagccacacgcccccggaggacagcgctcctgacctcctctaggactcccaacattactggggtgctccctccggcggcgccctccgctgggaatacgcagtcttcactcctctcaacaatcctaagttgctgggtcctcaccaaggcagggggctgagatgttccctccagagagccccccgcccccaagctctttcggtggcggagacacccaaaaagagcgagggaggctgtgggtctgtctgtccctctgcggcgactacccagccgcgaggcaggccccgtccctccccctcggacgccccacgccgggtccaccccgccacccgccgccgcgagcgggctcagccccaggggtctctgctgtgaggctgccctcctcccgccaggccccgcgctactcgcctttcccgtgccggccgcggactctgcgctccagttcccacccgcagcccagagtctccgggcccgctggtcgcggagccggctcgcgccactacctgcaggggccgccgcgcctctcagcgccacgccgccgccatcttgcatttcaaaccggctgcacttttcagggagtcaactctgacctgtgaaccctaaacccggaaccgctcggcgggcccgcaaaggggcctcagcagctcggtggccccgcggagtgtggggactcagggtgggggtgcgaggagaggcgcgcgccccagcggccgtccgggggcggagggggaagggagagagccggccaaggcggggccctcccgcgcgcgcgtcctccgcgcgcccccaccccgtgcggcgccgagctctccacgcccagaccctgctactccactggggtccgaccccggcccctagtccggggattggcgcaccgcgggaggtagggaggcgccccgcccccctgtcaacagaagccccgccccagactgcggaagctccgccccctgtcaggagacgccccgccttcccagggctcgaaatggccccgccctttgcctgcgaccgctccgcccgctgtggactgaagcctggtcttctctcgggtcagcacagaaggcagccccgccttccttgcgctccgccttcctaatgtcactgctggatcgtgagaggtaagcatgctggcttctactgaaacgccccttgtcatcacacgcccatcccctggggcgacacgacccaggccccgcccctcggggggctgctgcgagtccggccgggagcccagcgccctgacagaagtcgccgcgccccttgtcagcggcagctccacctctcctcgcttcggaccccgctcctccgcgggccgcagctccacccgctgacaccgaaagttcagttcagctgcactcagaaccgccgggcaaggcggagccgccctctgcccctcagccgccctcctccctgcgaaccgccactcgctcttccagaggcttctgtccgagtcgagggcttcacatcccgtcggctttcagggaaccagccccgcagcggggccagcgagggccaggggtttcgggaacactgcccggcgtctccgcccctccctactcactttccctttcccccgcaccgcggtcagaacgtggaggaacagaaccaaagcggagagcggcgactcaccctccagctgctccacacgccgggccttggacgctcgagcgctcctgggccccttgacgttcactccccacccccatcccagtcgcggaccctttgtgcagagctccgctgagccacagtaatcctaaaagcacagcagagctccgctgagccacattaatcctaaaagatgcaattgcttcaagtggaagtctgattttttttttttttttgagacggagtctcgcgttgtcgcttaggctgaagtgaaatggcgcgatctctgctcactgcaacctctgcctcccgggttcaagcgattctcctgcctcagcctcccgagtagttgggattacaggggcccgtcacctaacgccggggtaatttttgtatttttggtagagacagggtttcgccatgttggccaggctggtcttgaacccctgaactcaagtgatccgccagcctcggcctcccaaagtattgggattacaggagtgagccaccgcgcctggccgtggaatctgatcgttgaaatcagtgttctacaatattctttttatttgtaggtttcatcctggaatcctaaaacttgtgtaggataaggcttaattttataagcaaaggtattcaaccctgccacattcaatgccctgtatttacaacaaaaaatataacactgctttactcttctggagttaaattcctaatgcaaactatctctacaaataatttcaagaaaccaatgtaatgttctaataaaggtgaaaaaggagaaagtagttcataataaaatactgtatgtactaatatcaagaaaaattttaaaataacagagttttcacaatgtaaatactctgccaccaatagaatgcaaaacaaaaactgtcccggcaaaatttcagtatgcccctgaggggcagtactgccctcgctgggaacctctttagaccgaggaagaggtctggaaatgcttcaaatagagaaattcattcttttgtctacacagttaatgacaagttttcttttgttgttgttgttgttgttgtttttgagacggagtctcgctctgttgcccaggctggagtgaaatggtgcgatttcggctcactgcaacctctgcctcctgggttcaagtcattcttctgcctcagcctcttgagtaggtgg

SEQ ID NO: 588062 - DNA, 4001 bp, Homo sapiens; identical to SEQ ID NO: 588061

SEQ ID NO: 588063 - DNA, 4001 bp, Homo sapiens
ttttgacattactgccctgggagtgaactgcttaaactcgctgccctcataaacagaaaatcaccttttgactcaaatcttgaagagctctcagaacctcacccccttcacttctacaggcattaatttctgccatatataaaggagagagtgagtaagtgtgtgtgtgtgtggttttaagagggtaattgtgggaggtctgggcaattcaagaagtgctgggggaaggaatcctctcctctaactccattctgctcatcggggcctgcctgagacctggagatctggtaacttaacagagagaaagtgatcagagagcaggttggggaagaactccagggcctaaaaggcagtgtcccagggggccaagctgagcaaccactctttaaaaggggaggggtcgagggaaagtccttattcatcgacttctctccttctccacgccccagacaaacaaaaggccaccgcgaaacagttgaaggtagagacctactggctttgaagactatcaatcaggtggaaacctgaacaaatcacaatttggcttcctcatcaagttttctccccagcctgacaaaccctcctccgccgccgcctccacctcctcctccgcctcccaggctcagcacagctacgaggccaaagggaccgtcctgtgatgcctgctggtttccaactttccgctcatcttcgtctccgcagcctcctgcaaagcggctgggaaaagggcaagtttgcaaagccgaggatacaagtcctggggaagccacaaagaagctgcaacaccaacaaagattaacctcttgtggggcagacgaaaagcgccagctgccgttcaggggggcgaacgtgggctcgggctggcagaggctccggccagctggcagcggacagcagggccgggggtcccgcggccgccctcggccccccgccccgcgcggactccccctgcacctgagcgggggtgaggacagcgccgcgctccggccctgcccccgccaggtagctcggctgccgcccgcgctgcgcgcccgctgcctgcagccgccgggagcgacgagagcagaggcagcctcggcccacggcgtcatgcttcctgccaccacattacggcgaatcgtcaccgggagaggggagcgaggggagagggggagggaggggagcagacacacgcagccccccgcctgccaaaacgcgcggagacggggccacgtcccggtggagtccccgcgggacctgccccgtttgcacaaagcgccgcagtttggccaagaagggagggagacggccacgaaataaataaataaaaacagtcgggtctacgtaacgccctgtcgaaagcggacgccatatttttttgtggcttatgtcgacatagggaaacgtagacatgtttttcctcctcctcctcctcctcctcgctctggctcccatttatccaaacttgtaatcaaaactcttaaaaaaaaaatcttcttccctctctgtatccgctcatttcctcccacccgcaaaaagagcctgcacacccccccccttccgtaccccccttccaatcacaaacccggccaagtcccattaacaacacattttcgggagccgcggcggcgacggcggcggtgggaaagttgggctggagtggccggcgcccggcgtgcggggtttggggccggcggcgccggctggggggctccgcgccgaggcgaagtttcttacctgcgctggggctgtgaacgcggggacccgggctgggaacgcggagacgcggcacgggcgttccaaaatggaactctgctggctccccccacccactccccactccccaccgggcgcccggctcgggctccgtgggaaagagggggaaagccagcctgccagccagacagacagacagaaaaagcccccgtacggagaacgatggccaaaatttttaaaagaaaaaaaaaaaggaaaaaaaaagggaaaaaaaatgcctcgatcagtggggaatctacgccaaaacccacatgatctgtaacgtcagcatgcgtatttgcatacgataccaccacccgagctgccacccgggctcgggttccgcagaaagttacaaagtgaaattcagccccctccggagacaccggcgaaatgtcatttttcaggcaggagctgggggggaggctagccctaaaggcgctggttactggccaaggtaggggggcagtaaattaacttaaaagtctgagcccagtaacggactcggtggaatttctgcgagaagaggagggggaggcgcgagcgagatcattgaatattaagcacgaccccgcgcggcggccgcggccaaaccgtctccgtgcaatacccattttctttatgaaaagttcaaggtgtcactgatgagctcaacaaactgttgatcttgaccacgtggagtggcggaccgtgggaccgaagggcgcgcttgcaggcccggctctggcggtacccgggccccgggaccctttgcgtgggactgtgcgcgggtggggccaccacgcaccctgggcgctgcctgcgccttggcccggcttcaggctcaggaaaataataataacgattttaaaactatgttgagcgagacacattttactcccggaatgataatgagaaggctcggcgtagggaggggaagaaggagccccccacttatataacgacttgaagttatatcacttttgcttggggagattccgggatttccgcccgcgccaggtctgaggctggttaaagatcttcaaacttttttcccttaagagccaataaacaaacagacgccccaggggccgacttaaactctggtagagcccgagttcgctggaattctcagattcgaagaaatgcacacgcctgcggtgctcgcagagaagtccctcggaagctaggcgggtcgctttcgcaactgggactccaatgttcccagtgggagcggagctctcaccgcggcagcccccaggttcccctaggcgccttagagcaaaggtggcgggggatcgcgctgcccttcgcccgccggctcggaaccatgaacttgtattccgggcgccgcgctcctgccacagtgctcggctaaagagctctaaggaattcgggatctgggtacacttcgggatctcaggcggcaacctgtctgcgccgcgcattcctgcccagatgtaccttgtttccccctgggctggcctgtggactcttgggcagctcccgggcggggacgaggggatgcggtctgggggctagtttagaagcttcgagcgcagcgagaaaacaaagggagcctggggctgggaggctctgcggagtccccgcccgccctgcagattagcaggcgcgtcgcgtcggggcttcccgggcagctctgctctggggaattagaacgaactctagcggccgtttgcaactcggctgtgggcgcgagggcatcaacaggtggccgtgtgcagcggagaggccaatggcgaggacccggactggggtgaggacggctggccttggggctgactgggtggcggatgcgctgggtgaccttttggctttttcatttccgaggccggggagaaggaagtagctaaaaggtttttgtaagttctgccctagggctctaatttctgacataccccttgactccccagaaatcctttgcaacaaaaattaaaacagctcatatgcaaaactttcttaatggcctgcacctgtttgttcggttattgctgatgtagggtctgtttgtttgcattttaaccgcccataaaacaagattctatcctgggaaggagtctcttgcgtgatgctcgcggacctgaaaggcgacctggaggggctcttacaggattctgttaacttcttgatgactgtaatccagcttgggccacatctttctcagcctcatttggtaccggctaagaacctaatttacttgccatcaacatcagaatttaccgctgcctgatctcctcccaacctctgcctcacccagggtgaaccaa

SEQ ID NO: 588064 - DNA, 4001 bp, Homo sapiens
tcatgcaagatcccccacgtgctgggggctgcccctcctgggctccctgggggtcacgtgccctggagaggccacagaggacgacgtccatgactaaccatgcccaccggctgggaaaagttcagcttccgctccaggccccccaaacacaaaaagattataattggcagggctgcaaaattgttttgtttactgtcagataggaagtacagaagagaacgctgatggtattttgacaccccccccaaaaaaaaagtgggcaggcatttttttaaccattgtgaatagagtttcaataatcacagttcccacccaaaatagctgcctacaggaggtggaggagaatctgttgtggtggttaaagaaaataagaattaaaaagtggaagggatttgtggagctggagaatcaagactgtcatctgcatctccgtggaagggtgccctgaggaagaggtgtcactggagaatccctcccagaacatgcagtcttgtcaggactgggaatcgaactccccagctgcgggtttaacggaaatcagagggatgaaaatcatctaaactcttcaatgcccctaggacttggaagatcacccccagactatcagcttcagagtatcccgcaggtaggcagcgcaactggtgaagtgcggtgggcacacaagcagaagctgccttcgcagaagaggaagaaagttcgagaccaagcacatcgcctgcttccccatgggtccctgcttcctagtgactcacctacctaatatctccctttagcagaagccaaaggcggaggaggcagggggagaaaggagtttcccaagggtctcagagcaagagaggcccctgaggtctcgcgatttagaatgctcaagggtgcttctgggctgaaccagctgcctgccggggtgagctgttttacttcaagagcagttagcagaagcagtgtggatggtgacttcagcaccacctctgccacaaatgcacctgtgcaccaaaacaacctgcgcacctacacggagccaccccctccaccagcctccacctcccagagctgcggggatgctccgggccaggcaccccttctggggacaagggtgtaagcttcacatggtaccaaaccgaactctctatcccgttttttggctttttctttttttttttttttcaggataccccaagcctggaaagtcttccagagttttcgggagctaattaattatgtgatttcctctcctctgagaactgttttgctggcgtgtcaccaagttgtcacgtaggtgcccaccaggtcaaacagaatagaccatcctcacccacccaccccggggaatgtctccttccaccaaataaaatgaactgagacaggcaggaaggaggcagaagtttgaggaaggactccagttgaaggtcacaatagtttggggaaggcagatcaaggtaatacgaaggggacagaccctatagcggaaaacacaaacaaccaatcacgtttctctcggaaccagcctatccatgatgggtgcaccaggaaacagcacaccctgggatccaacttctttcacccagcacacccgaatctccaccccagccctgcagacaccctagcctgagaccagacctatttagacagacctgagcgcagctaattaggagtagtaaacaagcccatttcttgccagcgcagaagtttcccaaattgtccgcttgttttcctcccaacaaaagacagtgatttcccacctttatcacattccctcccagaaacttttctttctgcaatccctccacctaggctaaactgcaaagccactggcaatggagacgcaggcgctgcacccccgggacgcaggcagaggtaccttttccgcgaggcagaggggccgccggtgcccagaggccagctgccctgccgagcagtagagcgaagctgtgggctggagcacgctgaggattacacgttcctgtctctgcgaccagacctttcggcagctcggaccaactgtgctagcgatgcacttagcaattatctgctggctccgacgccccgccctctgctcttgcgattggctctccagtcccgggcaggactgcattggtttcagccgacctcactcattgctttggctcctactattatctaagccatcaaaggaaataattccatgtttcattgacaacctgtaaggctctcctccagcccaatgtgggggcaggaccgggaggccagtggagagaggggagaggagtaggaaaatgtgggggagcggggtgggggaaggaggtggaggggagaggaaaagaaggagaaactgtgggggggtaggagggtaggagggagagagagagagagatggagctatcaagcaatcagattcttgctctagcattttaacttccacaaaacagagcccatagcaacaattttctggctttattttccccctaactggtaaatgttgctgagggcagagagaataataactatggggtgtctgccggcatgagacagactctagaaagccgagcaaggttgagggctgaagggatggagtaatgcttttcacagggccaccctggaggacatgtgaaggacatggcagattgcttggggagcatagtaggtgcatacctggagtttatctatcagtactttatctcacagtccccctcatcccccaacctgaggagacaattttcctttgcaccctgtccaaagagtctcagaagagctattcttaaaatccataaaactctggagtttctcactgttctcactgggaggtccagaaagccgagcattctagagtgaatgattctgctgggaccctcactttggtttattctgacatggcttaaattaatcgcttagactttcatcaacaacctacgcacgtgaagagagaacatacccatcaaagggtggggacagcttaaacacttttccttgttcaccaagaaatcataaagtctcaccctagttaaaatggcttttatccaaaagacaggcaataacaaatgctggcaaggatgtgaagaaaagagaatgaaccctcctacattgctggtgagaatgtgaattaatgcagccactatggagaacagtattggggtttgtcagaaaactaaatatagagctaccatctgatccagcaatcccactgctaggtatatacccccaaaaaagaaatcagtatcttgaagagattcctgcactgccatgtttattgcagctctgttcacaatagacaagatctggaagcaatgtaagtgtccatcaacagataaattagatgaagaaaatgtggtacatatgcgtagtggagtactattcagccataaaaaggaatgagatcctgtcatttacaacaccatggatggaactggaggacattctgttaaatgaaataaaacaggcatggaaagacaaacttcacatgttttcattcatttgtgagagctaaaaattaaaacaattgaactcatggacagagagaatagaatgatggttaccagaggctaggaaggggcgggggtggaatggttactaggtacaaaaatagagttagatagaatgaataggatctggtatttgacagcacaacagggttattacagtcagcaaaacatattgtacattttaaaataactgaaagagtacaattggattgtttgtaacaaaaggaaatgctaaatgcttgaggtgccagataccccatttaccctaatgtgattattacacattgcatgcctgtatcaaaatatctcgtgtaccccataaatatatacacccactatgttcccataaaattaaaaatttttaaaaattaagaagaaatcataaagcacaaattttgaccttcccctctccttaatgtatttgtcaccatatggaaaagacatcacttggcagctaaattttcttaactaggtaaaatatttattattaatgtttctaaaatgaaagagcttttataaatcaataagtacaagacctataaccca

SEQ ID NO: 588065 - DNA, 4001 bp, Homo sapiens
caaagggaattaaggttatggacgtgaattaccctggtggacccaatctaatcaaatgagcccttaaaagcctgagaaagatctgagggccacatggaaggacctcggagagctaaggatcactcaggctggcagccagcacttctgaggaccaacctcaagaaaaacagattcggccaacagcctgaacaagcttggaagtggagtctcctggctagaggctaagcctgctctttaggagtcacacaactggaagagccagccaccaccctcccatagcaagcagccacaggatgggccctggccgatccctcagcaccttcccccttggggaagaactggcccaaactctcctcccttcccagagtacctcctccacacgcagagcgactccactactgactgggcctcccaggcaggacatctgaggctgagcgaaaccccctttctcccccagctctgctcagtgcatctctgacttctcatggaacaccaggaaccacgaacccacccttgtctcccatgcgctgggaaccaccccatcgcactgctgccccatgtagggaaaagaaagaaagatcagactgttactgtgtctgtgtagaaaaggaagacataagaaattccattttgacctgtaccttgaacaattgctttgctgagatgctgttaatttgtaactttgccccagccactttgccacaactttgagctcacaaaaacatgtgttgtatggaatcaaggtttaagggatctagggctgtgcaggatgtgccttgttaacaaaatgtttacaagcagatgcttggtaaaagtcatcgccattctccagtctcaataaaccaggggcacaatgctctgcgataagccacagggacttctgccttggaaagccgggtattgtccaagatttgtccccatgtgatagtctgaaatatggcctcatgggatgagaaagacctgaccgtcccccagcccaacgcccgtaaagggtctgtgttgaggtggattggtaaaagagaaaagcctcttgcagttgagatagaggaaggccactctctcctgcctgcccctgggaactgaatgtctcggtataaaacccgattgtacatttgttcaattctgagacaggagaaaaactgccctatggtgagaggtgagacatgttggcagcaatgctgccttgttattctttactccactgagatgtttgggtggagagaaacaaatctggcctacgtgcccatccaggcatagtacctccccttaaacttaattatggcacagattcttttgctcacatgcttttttttgctgaccttctccctattatcaccctgctctcctactgcattcctcttgctgagataatgaaaataataatcaataaaaactaagagaactcagagaccggtgccggtgcaggtccttagtgtgccgagtgccggtctcctgggcccactgttgtttctctacactttgtcttatttcttttctcagtctctcgtcccacctgatgagatatcccacaggtgtggaagggcaggccaccccttcaccccgtcgctccgcccgagctcgaatggtggcaccgacaggcgggaacgccaccagcctgtgggcggagtcctggctcggcccctcgcggcgaccttaccccggggtctccccggagaccccctaccggaggcagcccccagaggctctgacctccagcccaggccgagctgcccccgccccgccccccccgcgctcccacaaccccccgcgcggctccgcccccgcccggggtccccagctcgctgcccgccccgtctgagccctgagaggcccctgggccccccaaccacgggggcatcagggacaaccagacgcagggtcccaggcgtggagcttcgcggaactaacctcaacgggtcgcgcttggaaaggaggcagcaccgtggcacgaagacgtctcagccaacgccggctgacccccggaagtcccgccccgaattccggcccgccgctcgttctatctggggcagcgtagcctctctagatggcgggaggccggggcgactctgtggttcagccccagacctggtcccactagccctgaggccagagacccttctgttcccctttttttcagagttgacccgtgcactgaacaaggcggcaactgaagaaaaggggacactaatagaaatgcagagataatgagatatactcgtgtagtgggagattttaatatacaggcccccagaatcggaacagacggtagtttgataaaaacctaaggatacgttttttggaagaactgaatcattcaatcagtaagtgattagatagataaatggaagaattcagattccttcagtagataacatgttttcgtgagattgtgcatggatcgtttctaatacggaaatgaattgtacacttggacataaagaatacaaataaggctgggtgcggtggcccacgcctgtaattccagcacttgggaggccgaggcgggcggatggcttgaggctaggagtttgagaccagcctgggcaatatagggagactccatctctacaaaaaatacaaaagttagccaggtgtgatggtgtgcgcctgtagtcccagctactcaggaggctgaggtgggcggattgcttgagccggggaatgtgcggctgcagtgagccgggatcacatgttgcactgatgagagagtgagaccctgtctcaaaaaaaagaaacaaacaacaacaaccaaaaaaaacctcacaaatattttgacgttcattttgcaggcagattaaactatcaaaatcaggaatacataataaaaaatgcatgacaaactctattggaatttaagaaacactgtctagataaccccccccccttttttttttagttcaggctgaggtgctctcagttggagatgaggaacttattggaagctggagtaaaggtcactcttgctatgctttagcaaagagattggtgacattttggccctaccctagagatctgtggaactttgagcttgagagagatgatttagggcatctggcagaagaaatttctaagcagcaaagcattcaagatgtgacatacctttttctgaaagtgtacagtcatatgcattcacaaagagatggcctgaaattggaacttatgtttatttttttatttatttttaatttttttatttccataggtttttaaatttttatttccataggtggtggtgtttggttacatgagtaagttctttagtggtgatttgtgagattttggtgcacccgtcacctgggcggtatgccttgaacccaatttgtagtcttttatccttcacgcccttcctgcactttccccctgagtcccagtccccaaagtccattgtatccttcttatgcatttgcatcctcatagcttagctacctctcacgagtgaggacatacgatgtttggttttccattcctgagttacttcactgagaataatagtctccaatcccatccaggttgctgtgaatgccattaattcactcctttttatggctgagtagtattccatcatatatatatgtatgatggaatactactctctatatatgtatagatatatacatatatacacacatatatacacacacacatatatatataaatatatatatgctacagtttgtttatccactcgttgattgatgggcatttgggctgcttccacatttttgcagttgtgaattgtgctgccataaacgtgcatatacaagtatctttttcgtataatgacttcttttcctctgggtagatacccagtagtgggattgctggacgaaatggtatttcttggtagttctacttttagttctttaaggattctccacactgttttccatagtggttgtactagtttacattcccacaagcagtgtggaagtattcccttttcaccacatccacgccaacatctattattttttgatttttgattatggccattcttgtgg

SEQ ID NO: 588066 - DNA, 4001 bp, Homo sapiens
tatgctatccttgtatcaaaatatcacatgtatcccataaatgtgtataattattatattcaataaaaaagaactttaataaaaatacaggtatatttttattatttcatgtgggaagggctgttctaagcaaaataccaaaagcaaaaagcagagctccacagatctgcagcttataaatcaaaatcatatgcacatcaaagctaccaaactccaaaaatggacctaaaggcatgcaacaatttagtatatgacaaaagcggtttttcaaatcaatgggaagatcaatggtgttagaaatggctatgatttagaggaaaaaaggaattccaaaagctgtattccaaactcaccccacaataaaataaattccagacgtatccaacattttacaagtaccacagaaaaacaagagtttattttaaaaataatcttggagtggggaaagccctttaaaacacagcacaaagcccaaaatgccttaaggcaaaatatttgactcctaaaaattttaaattttctattttgaaaaagcccaaaccagaatcaaacaccataatcagagtcaaaagacaaattgagaagcatgttttcaacatacatggaaaaaaatatgagctggcaaatcacaaagaaatacaaatggcgaaaacacaaatgaagggatttcaatctcaccaataaacgcaaaacgtcgacctggcaggaatgcagtgacctgtcaaagcccacaggaccagagtcccgtccagggcgggaatgtcaatggcaatctcccacccttacccacttcgtagagaccaccggacagagaaacctatgtccagaagacaagttacgaactgaaaaatctgcgagtacccacccggcggaggacgagtggagcgccccctgccgcccctggtgttagtcaaacgacaccagcttccctttgatgacagaaaaaagggtgtgcgtgcgtgcctaaagctctaacggcattcaaaaattctgaaactgttcacagctcctgcctcttcatacactggcagagtgtcgggggggatgacttttatatatttctgacatgcctgcattagaagaagtattgcatattattttcaattttaaaattaagccaataaacaacaaggaaaatatttgctgtgttgcaaagagttgggctcattcattaaaatagggctctaacacagtaacagaaaagacagcatcgacagcaaaatggggagaggataagacacccggcaagtagcacactcgaccaactgctgaaacgaaagcagctcgttttcgtcttgacgcgggaagactttttatagctaagtaaagtggcgctcccggtgcgccgccggggtcttcatggggctcctcaggatgtgcatcaaacagaaaaaacctccatttttatattttggggaagctccccacccctttccgggcccatcccaggggacgcgagaccccgaggagcgcggcaagaagagcggcccgggggtccggactgcgcccctaggactccggccatcctggccctaggcacggcgcccggtagaaagcgcgcgggagggcacgagggggaggaaggccggagatctgaggagatccaaggtgggagggacgccggtctgacggggcccaagggggtaggggcggggaagggaccgaggccgtccgaggcggacgggggtgcgggagggcctgagggggtccaaggccgggcgaggggaagggtgggaaccccgaacgggggagagggcgcggccttggccctggggaggaggccgccgcgcgtccgtgaggggaggggaccagcgtaaacgcaggaggcagtgcgtgctcgcggggaagagtccacgattcgtgtggaggacgcaccggctccggtgtccgtgatgggagagggtcctggccggcgacgacacgcgccccccactcaccgtcagagccgcagcctcacgcgcgaaggaacggcatcccgcagcaccttcagacaaagggctgccccgccccgtctgcgcagccgccaatccctgggggctcctgcccctcagttcccgcccccacagccgagttcgccaatcctggagggcaagcatgtttacgtcatttggcccgcctgcccgcccgaagcctttctcggtgaccgactgcagggagctctcaggagccaccgagagccagacctccgcgatccctagaggggccgaacacctctgggcaatgggcccggccggctccccggccgcacttccgggcgcggaggttacagcccatcgccgagccttacccgctcgcagtcccggttcccgagctcctgccgccgtcgccctgtggaggacacccctgccggccccgcagtccctcctcgacttgcgctggcttcggccgtcctggaactcgagctcgttcccccctccgagccttttgcccttgcggttcccgctgctgggaacgaccttgccctcagccgcctggctggtccctgcgccgctgcagtgcgaatgtcgccttctcaggggccctttctcttccttcgttgcaacactgaagtcctcttgtttgatgacttgcgtgaggttattcctcccacttaggaggctgagtgctgcgaggtccgaggcgcagccgctcttcgctgtgtccggcccggcgtgctcccgacagggggcgtcactgaacagcgaccgtctccgtcgcccactcggccctggtgtttgctttttggtgtgtttacaccgcgcacctgggggagaggggcgggccttcacgagggcgcgggccacacccgtgtggaggcttcgggcacagcccaggacctgacagccgcggcagggagggtggggctggtttggagcggtgtcaggggacgggaaggctgacgcctagtccaccttctgctggccccactcccgaaggtcaggtccgcgtcgtccattgggcgcgtgggcgggcccagactctcaagaggcttccccacagggcggggctgggggctgcgtgggggcggcggggaaggcttaaggttagggggtaggcttgaagcgagtgcccggcccgtgctgttgggagcggaggccgggaggatgtggcgataattccgtacttgccgcgcaccaggcagacgcgaagtctgtgctacgcttcagcgaacttagcagcccttgcgggcaggggttcgcacttcacggagctaccatccaccacgcgcgtttcgagcaatgggcccgttgcctggcgcactagaagccaaaacggtggcaccagtttttgagaaaagagaaggctttattatttcaaggtcgacggccaaggagaccggaggcatggctcaaatgtggctcccacatgtgggcttaggtcaaagtcgacgggttagggaggacaggttggcacacagaagtgctggcgggcaggtttcaataggagggctttaaacttggccatttatggtaaggtgtggaatggcaggtttcagcaccagatcttccaggataatggacccttcccttctgaaagcgttccgcccctcaagctccggtcatgtccctgtcttcttggctccacagggaggaaacgttggttccgagttatgattttcctcctttgtgcatgtccgggttacatgactttcagttttggctctgctatacctcctgttaccaacagaatagggtcagtttgggccagtcttgtggttacacctcagtgtcacaggatttcctctgccaaagggctgtgaagctcaggaccaaggtaatcaaaattcagctctactattggattgtcctggattgttttagcagttgacagggatcaagctctgtcccagcaaccttgatcccaacagagaactgatgctcctaggaccttcacctcagacctcagtgcatcctggtttttgtttttcttcctcctccacaacttttttattttgcaaatgttgatacattcataaaggttgaaagaataatacaatgaatacctccgtgcccttcacttag

SEQ ID NO: 588067 - DNA, 4001 bp, Homo sapiens
ttaatatgaacgccatgccccagctgtccctcgcttggagcctcttaaggcaggattgggaggctgctcccaggattagcatcccatccattctcacctttctggcagcttttcaagatatctggttcctcagctcccagaagattcaggacccaaagttccttcccctgctccagctgggagatcaactccggcttagggacagggaatcctgttgaggatgaggacactggtgagctggcatggcccactgggccttccaggccaggtgtggagagatgggccctgtgtgcacgtgtgtacgcctgcacgtgtgttggtcagggggcccgtgggctgagactaagtactgaaggagaatccactcatcagctctcctgccactggagggacaccagtggggccactggcaacagggagtgaagtccctagaactggggagcaaggcaggcttttcccatgggaaatgttccttctgtagagatcagactgatacccggggacaaggggcaggaccctcttctttgggatccaaagagccaaagcagcctcccaagctcctcagaggcccccactgcgaaccaggccaagtgcagagagcctcacccagagaggccacgttcccatagttctccagcatcacatcccggtagagcgcccgctgctgggggcccagctgccgcccctccgcctgagagaagtacacggccacatcctggaaggtcagcggcatctcctgcaacaaaacatcgccgctgcccaggccatgcccacggggcagcagcctgcactaaaagggccctgacctggtggggccccactacccagggccctgctgtggtcagtatgaactgtgtatcagcaggtccctgatggggcagctgagagcgctgaggaccagccaacttcagctacacggggacccagctgagctcagagcccctctccctgcaggagggcgagtctacctctcagaaccctttcctcacggttgctatgagcccctggctggccttaccagttgccgggctcacggctccagaggagagtagcttctgactgggatggggatgaagatgaagaggtgggcaggaaggagggttaactcacctggtgccctggaagctggaatgtggctgccattctgtgtgcatgggctgctgtggtttccaagagaagacaggagactgccctggcctgaagtctccccgaacttaccttcagtggggagaactcaggctcagccccattcaaccaggggtgtggaaggatggccaggaggcagaagctgattgctgctgtggcctcctgggtcgcgggaggcaggtcactatgcagcacgggccgacgtgccctactgctcagtgactcctgaaatcccagaacggccagagccagagcccggggggatccagggacgcccggctaaggggtgaaagctggcagttcccgtggtccagacctgctgaaggccctggaaatggggtgcagggccgttctacctgcctggccaacctggggcaaagagccacgtgagggtgcagcctcaccaaggctgaggacgtgagaaggaggccgcggggatgctgccgaaggccccaggctccggggagaggccggaagccagctgtggtcctcagtccagccttctagggccgcgccgcggtcgcctcctcccggcctctgcagcccgtcggtggctcccgcggcacccagaacaggctcctcctggactggccgccgcctccccgcgccctccccgcgccctccccgcctgcctgcccgcttggcgctccttcctggtccgacactgccccacctgtttgctcgacccggggaagccaccgaggaagcgccgaggagctgcgcagtcgcaccgagcccggaacggaccctcccacagaaccgggtccagagccggggagggggcgggctaggatgaagagggcgggccgggccgagctgcgcacacgcaggcttccccgccccctgcggggcctcagtacgcctccgagaacgccgggaaccggaagccagccgcggttccgcccggattcttccggggccgctctgggatgactggaggcctgcgccgtctatggtcggggagggggagagcccacggcagctgagcggagggtctggcgcggtgacgctgcgcatccgggccgcgccgcgctcgccccgaccctaaaccctcacctgaaccctaaccccgctgggctcccggctcccccgtcggtcaccatacatcgtgtgtcccgattcaccataaccaccagaaagtcgcttatgaagatgttacaattatcggggctcagaacacaacgccccaaaatgaaggcctgggaggcagtttccctctgaccttcccaggcctccagtctcagttcttttctcccgcgaggctcctcacagagtgaatcccttttacccaaggcgagtcccagaggccagacccccaaagccagccacaaaacctaaaaacacgactctgatgttccccccgcttttctgtgtgaaaactggcggtaaaggccgggcgtggtggcgggcgtctgtagtcccagctactccggaggctgaggcgggagaatcgcttgaacccgggaggcggaggttgcagtgagccgagatcgcgccactgcactccagcctgggtgacagagcgagactccatctcaaaaataaataataaataaataaataatccatttatttgccttttctccaaaaatctgccttttatgagttggctttcagtgaaccttcagagggcaaagaggaactttccctttggcccctacacaataaagcatggttgaaaaaatagcacttgataaaggtgaggagaccagcttaggagcagggggagaaggaaaggaaagccaagccatcttgtcacccagaatatagtgtaggccctgtacactgtgttagaatcaaggcagaaattttatatctgaacttgagacgatcaacgaggatggagaatgtctagaagtctaaagcaccatgcaaagtcacacatgattaagaagatgccttacattattaatatcagtgctggggagattgtggagaattacgcactgctatgcttgaggaagcgtgtttagtacaatgttgaaaatgaattaagctgtacataaagagccttaaacacttcaattaatctaggaatctatcctatggaaataacaaaaatgacaaagagaagggtgcccattccagagtttgttgtgtgtgtggttttttttaaataatggggagaatttggaaaatagctagttattcatagaaggggaaatggaagataattatgctttttgcagcacagaaatagataaatctattgtcttctgtacactcagttgaacattatgcagccattatgtgtggtatttgaaaaaaaagtattggcagagggtaatgcttatgaaatagaatgtgaaaaatagaatacaaaattatatttatgatatgatctcaattgtatatatgggtgtttaagttcacaaacttaaggtttccagatataaggacctaggttggtttgttcactgctcagccaccagcctggaacatagtaagtactctataaatacttgggaagtgcttgaaaaacgtatataaaaagctgaaaataaatacatcattactagttgtaagattgcagaatatttgatttcctctttttctttttcacatctcctacagggggcgtgtaatcactctgtgactggtggctgcaggctctcctaatggatatttcctatttacagggctaccaactgccaagcatccaagcagtccctaggcagcaatccagcagctgacagggttaccggcgtcaactgccacagatgctaggctggtttgccatatttacatggatttgatcagcaatgagcacaaaagatagagattgtttctttctttcttttttttgaggtggagttttactcttgttgcccacgctggagcgcaatggtgagatc

SEQ ID NO: 588068 - DNA, 4001 bp, Homo sapiens
atcacttgaatctaggagttctgggctgtagtgctgctgtgccaattgggtgtccccactaagttcggcatcaatatggtgacatccggggagcaggagaccaccatattgcctaaggaagggtgaatcagctcaggtgggaaacagggcaggtcaaaactcctgtgctgatcagtagtgggatcacgcctgcgagtggccactgcactctagcctgagcaacatagtgagaaccccatctctaattttttaattaagaaaaaatgtaaagtaaaacaagactctccccacagattggggaaatataaaatacttcataataccaaatgttcagaacactgtaaactggtagacactctagaaatatgtctggccctacctggtagaactgaaaccctgcaaaactctcagtggggaaaccccactcgaagtatgtactttatggagactcttgctaatgcacacaaaaagaaacacaaaaatgttaccatgtgcctgtgtagaagaagaaaaaacttcagcgtccatcagcaaagtcagagtggtggaaagtaatgtcaaggagatagagcacagttataaggctgagaaaaactgtcaggtacagaatatacacagtataatacataggtagtttttttttttttttttttttttgagacggagtcttgctccatcacccaggctggagagcagtggcgggatcttggctcactgcaagctccgcctcccgagttgacgtcattctcctgcctcagcctcccaagtagctgggactacaggcgcccgctaccacgcccggctaatttttttgtattttttagtagagacggggtttcactgggttagccaggatggtctcgatctccagacctagtgatcccccccgcgccttggcctcccaaagtgctgggattgcaggcgtgagccaccgtgctctgccatacatatgtagatttttaagagacaaaaacagtattaggtttgtagagatataagaaaacgaggccgggcgcagtggctcacgcctgtattcccagcactctgggaggctggggcgggcagatcacttgaggtcaggagttcgagaccagcctggccaacatggttaaaccccatctctactaaaaatacaaaaattagctgggcatggtggcgggcgcctgtaatcccaggtattcgggaggctgagacaggagaatcccttgaactcgggaggcggaaggtgcattgagccgagatcgcgccatcgtactccagcctgggcgacagagcgagactccgtctcagaaaaagagagagagaaaggaaagaaggaagagaagagaaaagaaaagaaagaaaaaataaagaagagaaacaaaaatctggctgcctggctgcggggagaaaagccttggagcgccagaagcgaggagggtggggcggagggaaggcacaagcagagggaggagcactggcggagcgcggacgctaaaggcaggaggggcggcattcgcagagggctgggaggaccgcgagacgcacgagccccgcccctgaaaagctgacaggagaggagcgtgggagggagccgggatgggaagcctcgggccgctgggaccaaggggtctggagcgcatcgggacgcagaagccgctctgtgcggcaggagtccaggggaccccgcgtggggcaagggagttgtcaggggctcgagagcggaaggagccccgtgaggagcgaccccagggctggcagagagcggcgaggcgcagtccgtactcggggccttgtccggggggtccctcgaacaggaagtgccgctgatggcgggacggacccacgcctgcagcaccgcgagaggaccgggcacaggggcaacgcgcaggggagggtctgcgccgggagggtctgcgccccgcgcgcccgcccccgccgggctcacactcacctcagcgccgccgagcagcacggcagcccaacctcgcccgttcggccctccctccccgccaatcggaaccgatccggaagtgacgtcagccgactgtctgggtccgaggcgccgtccgggccgctctgggaagctaggacgccgcgtgtcggctgcccacctccctggcttgcagtaaggctccggggacccgcgaatggcaaagccgtaaagcgggaatgctgccaccgggtggcagtccgaagccacggcccagaggcctcagaactggggcgatggtcagaggcgaaaacatattagtctttccctttttctgagaaattctctccctaatgatgcacgaaaggcgccgcaaacaagaactaggcccttcgatttacagagaaacgggaaccgcacccttccttagggccaagaaaggatgcttactggccaaagaagcctgtcttgggtttaacctattgctcctcatccttaactcctgtaaatggggcccagtgtccactctggagaaagggtttttcgggtgcctgagctgcttctggaacaaactttccctcatggccggtccatcggccaagccctgccgtccactttgcccagaagggagcagaaaaacagtgaccgcttatggccaagctaagcatctagtgctttcccaaaaccctctttccagatgcccctccatccttcaggaggaaacaccgccctcctggattctttctcgacaagtcagctgggaccctgggaccggccctgcgaatgacgagatcaaaaccaggtcccgtagttactggcggggaggcggggctggagtgggaggaccacatgaggccaggggcttgagaccagcctggcaatagcgagagcctgtctaaaataaacaggccctgctgggtcactgcctaggtgtggtgggcgcccaaagacaggtggggccataccagcaggatcaggaaagcaagatcacgaaatggggggtaaggttctctagagacagcgtggaccatgacagccaggaaccaccgcgcagccagttaggacttgtcatcccggagtgaccacggaagcctaaggtgactattctcacctgccaggcaccctccaaccaagtctatagggagagaccgtgcctcatcctgcctgctgcagttccacaggagtgttgttaggggcagtgatctgcagctgctgcattcgctggtggaacttcctcgtgtgaaagtgctgataggatgctgtcctgggatctcctcattggatcatggttaagggacaagatgccatgggctatggccaaacaggaagcccctccactctgccttgtgacggaaaccagcttacttgccctcccattgcagggggggttccccaacacttccaacctgattccactcaatcatcactgtcagcctcatcactaccaaagctagagagaaccaaagtatcagcccctgccagcagggaaaggccatgtgctttaaggtaatcaatgcagctttgggggctgttcctggttagtttctctgccccagggaagagggggctacatgccctgcgaagctgtggagttacaggactcaaggagcagaccaacctactgctggtgccagctccagtccagtgtagggctctgggtgggtgggtgaagggacttgggtggtctgggattccccatacacacactgcatgcattcatccctttgttcagcaatcccagcagtgacctgggaccccacactcaatcaccaccctcaacctcacctgtcactatcaggctagaaaatgaggaaaggcatgaggccccacccaccacccacaggaaaaagcacccagaaccctccagtcagtgaccactccccaccatggcggggtgggaatgcatgcagaacagaatggtaaaagccaggctaggaatggcttcctggctgtagacagggtgcctgtcccacattccttcagggcccatcccaagttcccagtgcaaggcagacacctgcaagccaggtatccctggcagtgacttaaacacactgacatcagcagggctgtagccagtatggaggga

SEQ ID NO: 588069 - DNA, 4001 bp, Homo sapiens
tctgcacctcgcactttgacagttaccattccctctcttggcgtctgatttcacatgctgacatccttctgtcccctctatgagggcagaagccctggagggagggaatcatctcttacaccttctgtctcctctctccccgagacaggtatgagcctctgctcctctgctccactttgtaaattatcccacctgttactttcttctcctcttgtctttgggccctacgggtgagttactctccacaggcataatttacttcaaaacttagtactccaagtcccttccccaatctcgtttttcctttatctgatatactccctctccagcatctccactaactcaggcagccactgcacattaacttgaacgtaaactcctaaatcacttccacctagtcctaggcttcctgaagcctggggtctcttcggtgcctctcccacctcccagagggcctggcaccgtgctgagagcacagcagctccctgacaggacctgtggagttgaacttaatggccatgtttccctgtgtttcgaggtgtttgcgaccaggtgcttctgtttacacaacgcctagggagggtgtcaagaaggccttagatacctgtggatcactcactttgaagcaaaacccccaggtgtacttttctagaaagggggttctaagaaaagcagcgccggcctgcaggaatcccccgcgcctggtagcctggcatcatgggaacgcctgcccggtggaagtcctccaaggccacagggagctggccagggctgcccaaaaccgggaggcggcggcggccccccttcccgctggccaggtgggcttctttaggtctctgagtcagttccaaagtgaaggcgctgagccctgcactcccaggcagggaagaaaacgctgccttggaaattgtttgcacaagacaaactccctgtgcagccccgccccccccccgggcacccgcgtgagcccacggtgccaccgccggggagggccaggggcgcgggcggaggcgggaccgggcgagagcgtgcgggcagagggggcggtggccgccagggcgggagggacgcgggtcgcccgcgggcggagggtgtgtccctctgtcccgcccgtcccgcagcctggcctcgcgcgccggccggagtgggcaggaaccggcagaaacgcgcggggcgcgggagggccgggcgcgggagggccgggcgggcggccccgccggaaagggccggggaggggcaggcgggccggtccctgtccctgcgaggggcgagtcccgactgcccgaagtcgggagggggctccgagagtgggggcgccggcggagggcgaggtaaacaaggcgacgcgcgggagcggcagccaccccgcccgccaccccggccctgccgcagcgtcccgcgccccgcccgccgcggccccggcctcccagacccccggaccccccaggccgccggcccgacagccgcgggcgcgcggggcgtgggaagttcgcggccgcccccgtccccggctgccgcgccgctaggtccccgcgcagctcacctcggcccgccacgagcggcagcacgcgcccggcttccccggctcggacggctcggctcggacggctagctcagctccgggctgcagcggccgcggccctgcccgccctcccggcgcggcccgcggcccggctccgctccggccgcccgccgaggctcggttggcgcccacctggccggcctgccctcctccccgggacactgcgctcacgtacgcggccgcggccacaacccggcccggattcccgcccgggaagggagcggagcagcacgccagcccctgccagccggcgcccagcggcgacactcgggacacacccccgcccgccccccgcgcctccgcgcccccgcacccgcccagcacgcccccagcgcgcctgggctacacacccccggccgcccgtagacagtcggcgctcaataagtgcccgagcgactcctcgcgcacatgcgcacttgaacctgaccgagtggtgacccccccctccacacacacacacacacaccccgccccgcccctcgatcggaaccggcagctgcagcccggagccaaacttgaggcttggcttttcgcaccgagccaaagtttctctcgctgttgtttttccaggcctgcctctgggacaggctcctccgagaggggccgggctcgacccagggcgggaagggagccagacagctggggcgccgcggacgggagctcggctggggcctgggggacccaggcggcgcagccccagccgccccaagcgcccatgcccgcgctagtgggaggaggctggaaagcgccttcccattttcctttggactcaatgttttcttccccatttcatgacatctcactcctctgtcggtgtaaagtgaggcgttatttactgttgctggaattaaatgggagaaagttaactgttagccttcaatccttacgtaaacaagaccggttgcttttggcaccgttaggctctggcttttggataatttgtaacaaggagaattgaagttgttccattgtgttgttctgtgtttttcagagataagaccagcgccacaacggtagtgagggggccccgtgtctatatatgtgtgggcatcaatatttctattcaagcgaatttaatgactccaaaggtagtaattcctttcccccaaaaaaggttttaaaatctgtgttggacataatgtttgaatttgcagttcaccttggatttaaggtgtgctgtttttctggcaaagagtcagtgggagtgtccgggaaaagggctaaagtctttgtagtcagacaaaccggcttgcagtcctgactgagctacattcactttatgatctccagcaggttcttccactctctgtaccccagcttcttcatctgccccaagatggaataacatagataagtgtgtctagctcatagcaaataagtattatttcccttcctccatctcccaccatttgtgaaataagaacattatctaactagaaccaaaatttctataggacactggttctcagctgggggtgatgagacagcaatgtctggagacgtttttgattgtcacaattgggagaggggtgctactgacatctgatgagtaaaggccaaggaggctgctaaacatcctactgtgcacaggacagccccccacaacaaagaattgtatagtccaaaaaaatgctggtattgccattgagaagtcccgctatagaataatcctgctacccagtaattcagcaaagactggttctaccctttaactctcacccttaaggaaacatttctggtttgcactaagaagaggaacaaaacgttgtggggatcacctcaattacattaatatgaaaatgcagactgaaattttatatttaattattcaaggaatatttaggccatgcaaggtggctcatgcctgtaatcctatcactttgggaggccgatgtgggaggttcactggaggccaggagttcgagaccagcctgggcaacagcaagacctcttctctccaaaaaaaatgaatagttttgttagttaacaatgtatcctctcttatttttaaggtatttttgtatgttacatgttactacagttcatgaatagttttatgttcttgtttccatttttcttcaaacagtgggtgtttacttacttctatatatttacctctctgctaaattcctcacctatcctgaggtttgtaatatagtccctgcccccaaggactatacagcctctgaggaagtggattaatgcacatgcaacaattagggaacaatacaagataacatataattatgctctaattgcaacacccagagtaaagtggttcagagaaaagggaaatgagtccggcagcaaaagccaagggcttgcctttgagactaaggtgttcaggaaatgtttattgagtgaaatgaaatagtgaatgtttcttacatgaggtaggactagtatgtaaactccataa

SEQ ID NO: 588070 - DNA, 4001 bp, Homo sapiens
ggcgacagagtgaggttctctctcaaataaaaataaagagtgcgtttagaggcaggagggctgcttggtcacaatgctatgaagtgacatttggcagcagagcccttttgacatgttagggtacgaagggcgatgggggtggatcagacagattcgtgaatcacccctgcacagagggcacagactgcaaacgcatggaagagcagggccacaccacccccacccagcccccactcactgtctgtccagggcagtctgtggcaggacccacctgggccactgcgatggccacacgtgttgtcctcaccccaacaaggcaaccagagtatctcagggtatgaggctgccagaagacttgatccccgacccctcaacacataccaccctccactctggtaagaactgcaacccaggactagggtaggacttggactaggagcggtaagttactgctgctttgtgtttgctcatgtctagggagtgcatgtcctcagggaggggctacctggttagaggggaaaaaaacctgcttttagttctatcttcggaattaggaagtaaaccttcaatcagattaaacagcactgagctaaaaataatggagcagtgatatgatgacaacagatcaagctgttgctgagacagaaaatgtcaaggggaggagggtgctaattttagatgaaggaccaccaagaaatgttactgggggaactcatttaactggggtctggaagactaggaggggtcacctccttccatacgcagaataagccctgttcctcggggacctggggcacccggctcactacgccgcagccatgccagccttctctctgttcccccgcctgggagtttctcctcagggatctgtggctgcttctctcctccagcaggtttcagttcaaatgttaactcttttttgttgttgctgttgtttgcgacagagtctccctctgttgcccagcctggagaccagtggcgcgatctcggctcactgcaagctccgcctcccgggttcacgccattctcctgcctcagcctcccgagtagctgggactacaggcgcccgccaccacgcccggctaattttttgtatttttagtagagacagggtttcaccgtgttagccaggatggtctcgatctcctgacctcgtgatccgcccgcctcggcctcccaaagtgctgggattacaggcgtgagccattgcgcacggccaaatgttaactccttacagagcctcccctgaccgccaaggctaccctaaccccctaactctcacaattttatttccttggtttattctgtgcgaggcccttgtcaaaaccagaagttattttgctgcgttattgcctgttacactaacgcctcacctctattacaattcatgctcctggaggcgaggcgggctgttcgctcactgcggggtccccagcaccggaacgctcacagttaaatacccaacagctatttacgaaatgactgttggtccaataaatgccccaacccggggagggggcaaaactgcgcagggtaaatgaacgctgcgggaaacggcgtccgccggggagcgaggctgccgggaagagcccgccatcggacggaagcgaggggcagagcctggtcctccccggagcagccccacctcgccaggcctccccgcctgcagcctcatctctgcgcaaccgtccggctcggcggagcgggtctcgggggcccggccgcacgcccccgaccacagccagcatggaccggggcgcagggcccttcgccccgataagggttcggaacccaaggcgagcggaggcgacagtgacggctgcgggtccgctccctgccgagctccgcgcgcccactgcgggggctacagcctccaccaggccgggctcggaggaccgcgcccctcccagtccccgccccgcggccgcggccgactcaccctgggccgccgagacagcgcggggaggagcgcacggcgcccggctctcaggctccggttccttccccgcccccggaaacggccgctgcgccgctctgggaggcctggaggaccgcgcgcctcgatggcgctcgcgtctcgacggcttctagcccctgcggcgcggcggtcgccagggccccagctaggggcgcgcctggggggttccgggccagaccgggtatcagtcccaggcccgacgggcgcggaagggcgtcgacgttctcggcgctccgtttcccccgggatcggaggcagcgaacgttcaccccttgcgcccactctctgcccccgggtggcctgcgggggttggggagcacggtgggggatcgactcccggacccgcaggaagggcggagcgggggcgtccggccagggtcggtctcatataaatttatgacattgtttagtatgacttttttttttttttttgagcctgagtctcgctcttgttccccaggctggagtgcaatggtgtgatctgggctcactgcaacctccgcctctcaggttcaagcgattctcctacctgagcctccggagtagctgggactacaggttcccaccaccacgcccgactaatttttgtatttttagtagagacggggtttaaccatgttgcccgggctgatctcggactcctgatctcaggtgacccgcccgcctcggcctcccaaagtgctgggattacaggcgtgagctaccgcaccgggccagtttctgggatcttgaagtgtctttgctgctccctctgatcactctcagaccacctctcctgtctgcacccaagggtggccattctgacttctaacagccctgtgacttctgtaaacatttgtatgctctttgtatttactaatttaatcctcatggtaatcctatcaaaatactactgttcccatactaaaatgaggagagcatagtgtccctgttatttgccaaggtctagtctctttttttgagacggagtttcactgttgttgcccaggctggagtgcaatggtgccatcttggctcaacattatctccacttcccaggttcaggtgattctcctgcctcagcctcccgagcagctgggattacaggcatgcgccaccacgcccggctaattttgtatttttagtaaggagggggttactccatgttggtcaggctggtctctaactcccgacctcagatgatctgccagcctcgacctcccaaagtgctgggattacaggcgtgagccactgtgcctggccaaggtctcatctcttaagtaacagagctgggatccaacccacagacctggctccaagtcacatattctttagccactaaactgtgttgtgaaaccatcatgcaagtgggaggaacagttcaatatatgaaactcggtgtttcccgagttcccactcacctccacacacactttagagatggtttcacacacactctaggttttcagatcctctgaattgcaaccagaccctgggaggaggaatgaggatcaaagaaggtaagggactcatccagagccacagctggttgggagccgggtcagatttgagcacaagacagaccaggaaccatcattttcttccttttcacaaggacaggggaaactgggtgaggagggtgatatctgtctaagtaggcttagcccagcactccactatgggtggtgctaaacttgtatgatgtctacatagatccttgtcccaggactggatgcccctaggttcctcagattctttgggggaccaagggtgtctcctgcattcacactgctgacagcggatttgctcaggagtgaggcacaggctgggtaggacagaggcactcttcaccaggagggaattgtgggtacttgctgtgtcctgacagccacaaccatctttgggggagggatcatgactcccctcagggccatggcacataatttcagacaatatgggtattgtggtgaacttggatgtccaaaaattgtatgtaaatcctgtgctattctctcattgtaaaaggatgccaaaacttcaacta

SEQ ID NO: 588071 - DNA, 4001 bp, Homo sapiens
ttaaaaagcaaagtattttttttaagacaccaataataaaacttataaagacttcaaggaatcaatatgaaggcataagcagcagctaaagaaaaaaagcaccctgtttagtttcaaaagaataacttggtcttgacagaaggaaacctttgaagtcaatttcaaaggaaagttaggatttatataaccagtaaagagaaattaggacaaagccgaggtggaataattatagccaataaccctgcaatataaaaaggaggctaaagagggacctcttcctccttgcacttagttcctaagtctatcatattcacaatatccatttcagcctaaacttcgtcttctggagccaacaatcactaacctattttaagggactagaaaatgttccatcctggctaatgcggtgaaaccccatctctactaaaaatacaaaaaattagccgggtgtggtggcgggcgcctgtggtcccagctactcagggggctgaggcaggagaatcgcttgaacccaggaggcagaggttgcagtgagccgagatcgtgccattgcaccactccagcctgggtgacagagcaagactctgtctcaacaaaaaaaaagaaaaaagaaaaagaaaaagaagaaaatgtgatctatcacaggaaggcagtgacatatggacttttggcatccatttcagaatataaagagtatcattatttgggagaaaaataaggacgtaaaaggatatacaaatgcacacattttaaaaacaaaaaatagtatatgtacttatattgtatcttcaccattactgcctattatgtgccaggtagtgaatgaaataatttgcacacatttgtcatttaattcttacagtagccctctgaagtgtatgaacaactaccagcattttataggatgagtttgaaaggtattaagaaactttcctaaggtcacctagaaagtggtagagcaggactgagctccaagtctgtttggatgctgacctttttcaccctctgatctattatcgtaaactagaacaggaagcagagctgggcataatcccaaactgcaaagaatcctcagagtccctttattttagaatatttagaatactggcattttaaaacagaggtctacattcctaaaccttgttaacaaagtgagtcgacattccctaagcacactcagcaagtggggatttgttctagagaaacgtgaaactagtctacattactaatatccccagtgtttgagttgggggggagaaaaaaccatacacctgaatgcaaaaaaaggaagggggtggagttgttcgaatggagttatatattttgctgtcctaagttacatattgttatcaaagtatttacaaaagcagcaagagtctgggcaacacattaccatctcccccattttccctactaaaatactattaaatttggcagcaaaggagcccccggaacagtggctcagcaaaatggtggcaaatgcaagaccatacaaggctgccattaagatgtctctccacggggaaggagtgttttcactgttctagagcaacaatgtgatcagagtggggccgtgctttgatcagaaagccttcaaagaaaatgcactgcctgaagcctagttttaagaaccgctggctggtacaagttggagacgctggggggtgaagttccaggataccagacggtctccggccgacaagatcccgtaagggaccccgcggacaaggatgacggtggcccgtcggcgggagatgctgggccttcgcccctggcagcagcgggaactctctcccggacgtccactgcagcctggacggggctgtttccactcctctagcccgcaaccctcggctcccttccccccaagaaggaactcactgttctgggtgctacacccaaggcgccctgcacccccagcggtccgggaggaaggtaccccctctccctctgaccccaccaacccagggtcctaaactctcaaacccggaaggcagaaacaggaagttaccctcatctcccccggcggctttgctggggccgttctaggaaacagtgatggcccactctcgttgatcttaacccttagggtcctggaccagaaggagcgtgggggtggatttcctttccctgtgctgtgaccagccaactgtgaacctcatttctctcacttgtcaggcggcttacgacaggggcctgattggagcttatacttttccttgccatcagaatatcatcagattaattatcatcactattagaatcaaaatcaatctagtatttttcttttttgagacggagtctcgctgttgcctaggctggagtgcagtggcgcgatctcggctcactgcaagctccgcctcctgggttcacgccatcctcctgtctcagcctctcgagtagctgggactacaggtgcctgccaccatgcccggctaatttttatatttttcgtagagacggggtttcaccgggttagccaggatggtctcgatctcctgacctcgtgatccgcccacctcggcctcccaaagtgctgggattacaggcgtgagccaccgcgcccggcctcaatctagtatttttaaacacctattgtttctgttcccaccgctatgaacatggatatatatttacttacctgtgaaagttagaaagctaaggcatccattcacatataaaacaattcgtttacaaggcacccttattaacacctagaaaagtagttaatccctcctctttcattacagagaaaatagaagccaatcccttcatctcacctctaccaaacagaaatctactcaagtctgcaccctgccgttttctttcttccctcctgttacaatacagagtccctctgtgaccttttttttttttttttttttttttgtgatggagtttcactgtgtcaccagtctggagtgcaatggcaggatttcggctcactgcaacctctgcctcccgggttcaagcaattctcctgcctcagcctcccaagtagctaggactacaggtgtgcgccaccatgcccagctaatttttgcatttttagtagagactgggtttcaccatgttggccaggatggtcttgatctcttgacctcatgatctgcccgcctcagcctcccaaagtgctgggctctttggtattttaataagccctttactggtactcactttcctacctatcttcttggaaacttcgcactaccaactaaactctccatccctccacccccatccccaaatagtccctcagcttttcttttctctttttactcacaatgtttccatttcatcaattttccactaaccttaacatttctcctgcaacaacaacaacaaaaaaatcactagcatcaccaatgacctccatgatgttagttagtgcaactggtatttttagttctcgggtcctttttcaggaggtttgatatggctacggactcgtcttctagaaacactcttttgaggtgacatcacattctcctccttttcttccaacatctctagtcagtcctgttagtctcttttccaagtcagtccctcaagatcatcctctcctcttatcactgaatgttctctgcctaggcaatctcatccactcccacattttcaaataccacctaggcagacaactcaaaaatttacttctccagcccaagctacatgtctgagctcttcactcataaccaatggtctatttggcatctcatacaggaagtctcaataacacctcaaaaccaaaatgtcaaaaatcaaaatcataatctgtcttctctctcactgttcttctccatatacacatataaacacaaaataaaacaaaataaacctgtttctcttccaatattctttcaaccatccatccagttatatggaaacccagaagcccttcttttcacttccctttccttaccttccatatacaattcataaataagcctcatctgttgtgtaataaataattctcacctgtagttgtttcttctaaccaccag

SEQ ID NO: 588072 - DNA, 4001 bp, Homo sapiens
tctttaccacaaccacatatatgggggcataactcaacatgtgtaaaagacaatcttctgcttttcactgaacctccaggaattcaggacaataaacctctacatgcagaccaacaggtgagtttttctgccccttctttcataacaccgttcttccctagtgaagtccacacacatccttacatggcagctgtgggtatatcaactggtctgaccccttttagtcacagagcctgaagtctgctagtacctgctgagcacagtgtcatgggtgagaatgggcaaggctttttctttctctggttcctgaacttcccaggctctctcacttctggatcctgaatacccaaatcccaagcttccttcccagaaccaacacctcctcctcattagaaagatacctttgttgtgtgcttactttataaagtcttgctctttccctgtccactgccttgtgtcactatgtgtgtgtcttggggccggtggaaaggtgaacagaagccagtagagagtaacaagcaccagcttcacaggaatggcatgaccttaatacgatagtggcagttttcccttaacatccctgccccctaaagatttcagatcatatgtcacactcttaagtaacagcgatttgtctttcacggttttaatcatattgattaaaagcatttgtcttctccagaacatcacattaagtcatcaaaaaatataaaccttaaaaagatgtaattattggaactgaaaaacataaaaggtgagctttggaaatatctttgagcagtctattcattatgaacacatgtaatctgttggaacaaagttctaggacaatccaggtcatccttcaatatttgcagaaaacagcacaaagaaaacttgatacttaaacttagttggaaactttatgccacagccattaaatacagagatcatataaaggaatagaggaagctgttgaatactaaactaactcaaatcatcattatccttacgaagtgcacactgaattaatgtaaaaagcatttagtaaacaaaaagtattttcaatatacaattaagactgaaaagtattgaggcctcataagctgaacctgacacaataaatttaaaagggaaactaatttggaaatcagaaaaccatctaaagaatttgggaattaggcttctgctgccctctctgctactgacggtcaaggcctcctcattgtattctgtcctccatatctctgctgattcccattttgtctatttccatttaccccactactacttgctcaggtcactctccttcattgtcggtgtttgttcaaattcctcagacccatccacttcccatctaaacttccctccccttttctcgctcgttggctctacctccctcctctgttttctcctcactctcctgccccacctcgacatccacagcgaggcaatgaagaagcccctgccaaggaagagcccgcttctcagtgggacaccgggaaggtaaacacccaacagtcaccgctagtgggaggcgattgtgcagaagcacgagggttgttacaggatcgggcaggtcccctaccccagtctcggactcagggtcctgtctgaggcggccaccccgaagcgtggggtttgcggagacgtagggcctggcggagggaaggatggggaagcatctcagggaggactggcgtctgccgaatcccagggctgccctgaggggccaagaggggcgagggtggggacgatggaagacaagccacatgccgaatcgggacctgaggccgcgcgcgataggatgggcggacggtgaagagaactagggtggaagggccggacaggggcgacctcagtgacggaaccggacacagacgcagatctggcagctgggcgacaggcttcggagcatttccgggcgtcgcgggactccccgccgacaggagggcggttgccgagcctgtgacatccgcggagaccagcagaccccgggtgtggaggacgccgcaggaagggaactgcgtggctgggtttggccacaaaaagcggagggcactcacccgagcggacctcggctccggagaatccgtttccgggtcaacaaaaaacgtcgcgcgaggggcggggcccgtacgtgcagggaggggaggcagagaaaaaggcggggccgggccggggcggggtctcgggcaggggcggggagcttaccgacctcccgcccccgctgcgcgcgtttctggccctgccagtgtctccgccggttgaaagcgcgtgtctgcgtcgggttctgttggagtgcgttcggtgtgccgtgggtccgcgctgcttccacccaacttcctgttaggtaagaggcgcgtgaggctcctgtgccgggggcggtgctgctcccgagtcggcgcgcggcggggacgcgagtccgtaggtgctggcgggagcgagagtcgggtggggaccctcgcgagcccgcactccgcctctgggtagcagcctcttcggccccacacggcgtgacgcgcgctcgggctccgcgttcgcgtcgaggcagaggcgtagtaggggtcgggcccagggctggaggggccgggaccgggcggggtgccgccctggacaccgcgccggcagctgttccgcgcgggttcatgtcattcctattttcaacctgtcctgctccgcacctgagatgatttataaattcggtacctttgggacaggcgtggatgacatcccataatttacttcgttattaatttctaaatgtaatacataccactatctaaaagtattttttaatttgaaatatatttgtatacgtatacatgtatatttatttatttctgaattttatctcgtacatataatgaggctcgtaaagtggatactgttcaggacataggtggattttgcttttaagtagtaaagacttaattggtgacttactggggctatttgataaggatttttttttaatgaacattaaaaacagtgaaattgtatttccggatttcgttagcttcatttatatcttaattggtgaaaactgtaagttaataactcatttttatttcctttggagattcttaagtttgtgctaccaatgattatttccaaaaaaggcacacttctggttttcccagaactaatgctagcttctcaatcttttgagtttacttgatattaatgtttgacctcaaatcatgtcacatttttgaagaaaactttctcttagccaatggaacataaaccaccctggagttcatatagaggaggggttcaaatgcctctgatagtgtcgtgttaaaactcatggccaaacgcaaggtcacatagctttctttctatgtttccctctagaatttgtatagttttgtcattataaaatgggtcttgtcctagaccccaagaacaggtttttggatttcacatgggaaagaccttttggcaagtcacagagtatagtgaagttaagatagtttattagtgactactcagctacatagcagggcgtcctcagaaagcaagaggagaaatgcacctgttgtaaacatataatttttttttgagacagagtttctctcctgtcacaatggcatggtctcgcctcactgcgacctctgcttcctgggttcaaggattctcctgcctcagtctcccaagtagctgggattacaggtgcgtgccaatatacccggctaattttttgtgtttttggtagagactgggcttcaccatgttggtcaggctggtctggaactcctggcctcaagtgatctgcctgcctcggcttcccaaagtgctgggataacaggcatgagccacccggcgcccgggcttaatgtttgtttatataggttattaagaatcagtttgtgacaggctattagtattgttacttctctttgttactgtcgattttaacaacaatttatgtgtgtactgttacctttaaagtaaaacttatttttaaactaagaatgctttttgttcttaaagttctgggacatttaaataacttt

SEQ ID NO: 588073 - DNA, 4001 bp, Homo sapiens
ttcactgaacctccaggaattcaggacaataaacctctacatgcagaccaacaggtgagtttttctgccccttctttcataacaccgttcttccctagtgaagtccacacacatccttacatggcagctgtgggtatatcaactggtctgaccccttttagtcacagagcctgaagtctgctagtacctgctgagcacagtgtcatgggtgagaatgggcaaggctttttctttctctggttcctgaacttcccaggctctctcacttctggatcctgaatacccaaatcccaagcttccttcccagaaccaacacctcctcctcattagaaagatacctttgttgtgtgcttactttataaagtcttgctctttccctgtccactgccttgtgtcactatgtgtgtgtcttggggccggtggaaaggtgaacagaagccagtagagagtaacaagcaccagcttcacaggaatggcatgaccttaatacgatagtggcagttttcccttaacatccctgccccctaaagatttcagatcatatgtcacactcttaagtaacagcgatttgtctttcacggttttaatcatattgattaaaagcatttgtcttctccagaacatcacattaagtcatcaaaaaatataaaccttaaaaagatgtaattattggaactgaaaaacataaaaggtgagctttggaaatatctttgagcagtctattcattatgaacacatgtaatctgttggaacaaagttctaggacaatccaggtcatccttcaatatttgcagaaaacagcacaaagaaaacttgatacttaaacttagttggaaactttatgccacagccattaaatacagagatcatataaaggaatagaggaagctgttgaatactaaactaactcaaatcatcattatccttacgaagtgcacactgaattaatgtaaaaagcatttagtaaacaaaaagtattttcaatatacaattaagactgaaaagtattgaggcctcataagctgaacctgacacaataaatttaaaagggaaactaatttggaaatcagaaaaccatctaaagaatttgggaattaggcttctgctgccctctctgctactgacggtcaaggcctcctcattgtattctgtcctccatatctctgctgattcccattttgtctatttccatttaccccactactacttgctcaggtcactctccttcattgtcggtgtttgttcaaattcctcagacccatccacttcccatctaaacttccctccccttttctcgctcgttggctctacctccctcctctgttttctcctcactctcctgccccacctcgacatccacagcgaggcaatgaagaagcccctgccaaggaagagcccgcttctcagtgggacaccgggaaggtaaacacccaacagtcaccgctagtgggaggcgattgtgcagaagcacgagggttgttacaggatcgggcaggtcccctaccccagtctcggactcagggtcctgtctgaggcggccaccccgaagcgtggggtttgcggagacgtagggcctggcggagggaaggatggggaagcatctcagggaggactggcgtctgccgaatcccagggctgccctgaggggccaagaggggcgagggtggggacgatggaagacaagccacatgccgaatcgggacctgaggccgcgcgcgataggatgggcggacggtgaagagaactagggtggaagggccggacaggggcgacctcagtgacggaaccggacacagacgcagatctggcagctgggcgacaggcttcggagcatttccgggcgtcgcgggactccccgccgacaggagggcggttgccgagcctgtgacatccgcggagaccagcagaccccgggtgtggaggacgccgcaggaagggaactgcgtggctgggtttggccacaaaaagcggagggcactcacccgagcggacctcggctccggagaatccgtttccgggtcaacaaaaaacgtcgcgcgaggggcggggcccgtacgtgcagggaggggaggcagagaaaaaggcggggccgggccggggcggggtctcgggcaggggcggggagcttaccgacctcccgcccccgctgcgcgcgtttctggccctgccagtgtctccgccggttgaaagcgcgtgtctgcgtcgggttctgttggagtgcgttcggtgtgccgtgggtccgcgctgcttccacccaacttcctgttaggtaagaggcgcgtgaggctcctgtgccgggggcggtgctgctcccgagtcggcgcgcggcggggacgcgagtccgtaggtgctggcgggagcgagagtcgggtggggaccctcgcgagcccgcactccgcctctgggtagcagcctcttcggccccacacggcgtgacgcgcgctcgggctccgcgttcgcgtcgaggcagaggcgtagtaggggtcgggcccagggctggaggggccgggaccgggcggggtgccgccctggacaccgcgccggcagctgttccgcgcgggttcatgtcattcctattttcaacctgtcctgctccgcacctgagatgatttataaattcggtacctttgggacaggcgtggatgacatcccataatttacttcgttattaatttctaaatgtaatacataccactatctaaaagtattttttaatttgaaatatatttgtatacgtatacatgtatatttatttatttctgaattttatctcgtacatataatgaggctcgtaaagtggatactgttcaggacataggtggattttgcttttaagtagtaaagacttaattggtgacttactggggctatttgataaggatttttttttaatgaacattaaaaacagtgaaattgtatttccggatttcgttagcttcatttatatcttaattggtgaaaactgtaagttaataactcatttttatttcctttggagattcttaagtttgtgctaccaatgattatttccaaaaaaggcacacttctggttttcccagaactaatgctagcttctcaatcttttgagtttacttgatattaatgtttgacctcaaatcatgtcacatttttgaagaaaactttctcttagccaatggaacataaaccaccctggagttcatatagaggaggggttcaaatgcctctgatagtgtcgtgttaaaactcatggccaaacgcaaggtcacatagctttctttctatgtttccctctagaatttgtatagttttgtcattataaaatgggtcttgtcctagaccccaagaacaggtttttggatttcacatgggaaagaccttttggcaagtcacagagtatagtgaagttaagatagtttattagtgactactcagctacatagcagggcgtcctcagaaagcaagaggagaaatgcacctgttgtaaacatataatttttttttgagacagagtttctctcctgtcacaatggcatggtctcgcctcactgcgacctctgcttcctgggttcaaggattctcctgcctcagtctcccaagtagctgggattacaggtgcgtgccaatatacccggctaattttttgtgtttttggtagagactgggcttcaccatgttggtcaggctggtctggaactcctggcctcaagtgatctgcctgcctcggcttcccaaagtgctgggataacaggcatgagccacccggcgcccgggcttaatgtttgtttatataggttattaagaatcagtttgtgacaggctattagtattgttacttctctttgttactgtcgattttaacaacaatttatgtgtgtactgttacctttaaagtaaaacttatttttaaactaagaatgctttttgttcttaaagttctgggacatttaaataactttcatgtctttattaacttgttcccacaatcataaatattttataacgaaaagtgctcaaccccc

SEQ ID NO: 588074 - DNA, 4001 bp, Homo sapiens
agcttctttcttagggaagatccttcttgagaagcccctgctgagtattaggaaaatgcatttcaggacctctcatcaacacaccctctttctttaccacaaccacatatatgggggcataactcaacatgtgtaaaagacaatcttctgcttttcactgaacctccaggaattcaggacaataaacctctacatgcagaccaacaggtgagtttttctgccccttctttcataacaccgttcttccctagtgaagtccacacacatccttacatggcagctgtgggtatatcaactggtctgaccccttttagtcacagagcctgaagtctgctagtacctgctgagcacagtgtcatgggtgagaatgggcaaggctttttctttctctggttcctgaacttcccaggctctctcacttctggatcctgaatacccaaatcccaagcttccttcccagaaccaacacctcctcctcattagaaagatacctttgttgtgtgcttactttataaagtcttgctctttccctgtccactgccttgtgtcactatgtgtgtgtcttggggccggtggaaaggtgaacagaagccagtagagagtaacaagcaccagcttcacaggaatggcatgaccttaatacgatagtggcagttttcccttaacatccctgccccctaaagatttcagatcatatgtcacactcttaagtaacagcgatttgtctttcacggttttaatcatattgattaaaagcatttgtcttctccagaacatcacattaagtcatcaaaaaatataaaccttaaaaagatgtaattattggaactgaaaaacataaaaggtgagctttggaaatatctttgagcagtctattcattatgaacacatgtaatctgttggaacaaagttctaggacaatccaggtcatccttcaatatttgcagaaaacagcacaaagaaaacttgatacttaaacttagttggaaactttatgccacagccattaaatacagagatcatataaaggaatagaggaagctgttgaatactaaactaactcaaatcatcattatccttacgaagtgcacactgaattaatgtaaaaagcatttagtaaacaaaaagtattttcaatatacaattaagactgaaaagtattgaggcctcataagctgaacctgacacaataaatttaaaagggaaactaatttggaaatcagaaaaccatctaaagaatttgggaattaggcttctgctgccctctctgctactgacggtcaaggcctcctcattgtattctgtcctccatatctctgctgattcccattttgtctatttccatttaccccactactacttgctcaggtcactctccttcattgtcggtgtttgttcaaattcctcagacccatccacttcccatctaaacttccctccccttttctcgctcgttggctctacctccctcctctgttttctcctcactctcctgccccacctcgacatccacagcgaggcaatgaagaagcccctgccaaggaagagcccgcttctcagtgggacaccgggaaggtaaacacccaacagtcaccgctagtgggaggcgattgtgcagaagcacgagggttgttacaggatcgggcaggtcccctaccccagtctcggactcagggtcctgtctgaggcggccaccccgaagcgtggggtttgcggagacgtagggcctggcggagggaaggatggggaagcatctcagggaggactggcgtctgccgaatcccagggctgccctgaggggccaagaggggcgagggtggggacgatggaagacaagccacatgccgaatcgggacctgaggccgcgcgcgataggatgggcggacggtgaagagaactagggtggaagggccggacaggggcgacctcagtgacggaaccggacacagacgcagatctggcagctgggcgacaggcttcggagcatttccgggcgtcgcgggactccccgccgacaggagggcggttgccgagcctgtgacatccgcggagaccagcagaccccgggtgtggaggacgccgcaggaagggaactgcgtggctgggtttggccacaaaaagcggagggcactcacccgagcggacctcggctccggagaatccgtttccgggtcaacaaaaaacgtcgcgcgaggggcggggcccgtacgtgcagggaggggaggcagagaaaaaggcggggccgggccggggcggggtctcgggcaggggcggggagcttaccgacctcccgcccccgctgcgcgcgtttctggccctgccagtgtctccgccggttgaaagcgcgtgtctgcgtcgggttctgttggagtgcgttcggtgtgccgtgggtccgcgctgcttccacccaacttcctgttaggtaagaggcgcgtgaggctcctgtgccgggggcggtgctgctcccgagtcggcgcgcggcggggacgcgagtccgtaggtgctggcgggagcgagagtcgggtggggaccctcgcgagcccgcactccgcctctgggtagcagcctcttcggccccacacggcgtgacgcgcgctcgggctccgcgttcgcgtcgaggcagaggcgtagtaggggtcgggcccagggctggaggggccgggaccgggcggggtgccgccctggacaccgcgccggcagctgttccgcgcgggttcatgtcattcctattttcaacctgtcctgctccgcacctgagatgatttataaattcggtacctttgggacaggcgtggatgacatcccataatttacttcgttattaatttctaaatgtaatacataccactatctaaaagtattttttaatttgaaatatatttgtatacgtatacatgtatatttatttatttctgaattttatctcgtacatataatgaggctcgtaaagtggatactgttcaggacataggtggattttgcttttaagtagtaaagacttaattggtgacttactggggctatttgataaggatttttttttaatgaacattaaaaacagtgaaattgtatttccggatttcgttagcttcatttatatcttaattggtgaaaactgtaagttaataactcatttttatttcctttggagattcttaagtttgtgctaccaatgattatttccaaaaaaggcacacttctggttttcccagaactaatgctagcttctcaatcttttgagtttacttgatattaatgtttgacctcaaatcatgtcacatttttgaagaaaactttctcttagccaatggaacataaaccaccctggagttcatatagaggaggggttcaaatgcctctgatagtgtcgtgttaaaactcatggccaaacgcaaggtcacatagctttctttctatgtttccctctagaatttgtatagttttgtcattataaaatgggtcttgtcctagaccccaagaacaggtttttggatttcacatgggaaagaccttttggcaagtcacagagtatagtgaagttaagatagtttattagtgactactcagctacatagcagggcgtcctcagaaagcaagaggagaaatgcacctgttgtaaacatataatttttttttgagacagagtttctctcctgtcacaatggcatggtctcgcctcactgcgacctctgcttcctgggttcaaggattctcctgcctcagtctcccaagtagctgggattacaggtgcgtgccaatatacccggctaattttttgtgtttttggtagagactgggcttcaccatgttggtcaggctggtctggaactcctggcctcaagtgatctgcctgcctcggcttcccaaagtgctgggataacaggcatgagccacccggcgcccgggcttaatgtttgtttatataggttattaagaatcagtttgtgacaggctattagtattgttacttctctttgttactgtcgattttaacaacaatt

SEQ ID NO: 588075 - DNA, 4001 bp, Homo sapiens
tctcacttctggatcctgaatacccaaatcccaagcttccttcccagaaccaacacctcctcctcattagaaagatacctttgttgtgtgcttactttataaagtcttgctctttccctgtccactgccttgtgtcactatgtgtgtgtcttggggccggtggaaaggtgaacagaagccagtagagagtaacaagcaccagcttcacaggaatggcatgaccttaatacgatagtggcagttttcccttaacatccctgccccctaaagatttcagatcatatgtcacactcttaagtaacagcgatttgtctttcacggttttaatcatattgattaaaagcatttgtcttctccagaacatcacattaagtcatcaaaaaatataaaccttaaaaagatgtaattattggaactgaaaaacataaaaggtgagctttggaaatatctttgagcagtctattcattatgaacacatgtaatctgttggaacaaagttctaggacaatccaggtcatccttcaatatttgcagaaaacagcacaaagaaaacttgatacttaaacttagttggaaactttatgccacagccattaaatacagagatcatataaaggaatagaggaagctgttgaatactaaactaactcaaatcatcattatccttacgaagtgcacactgaattaatgtaaaaagcatttagtaaacaaaaagtattttcaatatacaattaagactgaaaagtattgaggcctcataagctgaacctgacacaataaatttaaaagggaaactaatttggaaatcagaaaaccatctaaagaatttgggaattaggcttctgctgccctctctgctactgacggtcaaggcctcctcattgtattctgtcctccatatctctgctgattcccattttgtctatttccatttaccccactactacttgctcaggtcactctccttcattgtcggtgtttgttcaaattcctcagacccatccacttcccatctaaacttccctccccttttctcgctcgttggctctacctccctcctctgttttctcctcactctcctgccccacctcgacatccacagcgaggcaatgaagaagcccctgccaaggaagagcccgcttctcagtgggacaccgggaaggtaaacacccaacagtcaccgctagtgggaggcgattgtgcagaagcacgagggttgttacaggatcgggcaggtcccctaccccagtctcggactcagggtcctgtctgaggcggccaccccgaagcgtggggtttgcggagacgtagggcctggcggagggaaggatggggaagcatctcagggaggactggcgtctgccgaatcccagggctgccctgaggggccaagaggggcgagggtggggacgatggaagacaagccacatgccgaatcgggacctgaggccgcgcgcgataggatgggcggacggtgaagagaactagggtggaagggccggacaggggcgacctcagtgacggaaccggacacagacgcagatctggcagctgggcgacaggcttcggagcatttccgggcgtcgcgggactccccgccgacaggagggcggttgccgagcctgtgacatccgcggagaccagcagaccccgggtgtggaggacgccgcaggaagggaactgcgtggctgggtttggccacaaaaagcggagggcactcacccgagcggacctcggctccggagaatccgtttccgggtcaacaaaaaacgtcgcgcgaggggcggggcccgtacgtgcagggaggggaggcagagaaaaaggcggggccgggccggggcggggtctcgggcaggggcggggagcttaccgacctcccgcccccgctgcgcgcgtttctggccctgccagtgtctccgccggttgaaagcgcgtgtctgcgtcgggttctgttggagtgcgttcggtgtgccgtgggtccgcgctgcttccacccaacttcctgttaggtaagaggcgcgtgaggctcctgtgccgggggcggtgctgctcccgagtcggcgcgcggcggggacgcgagtccgtaggtgctggcgggagcgagagtcgggtggggaccctcgcgagcccgcactccgcctctgggtagcagcctcttcggccccacacggcgtgacgcgcgctcgggctccgcgttcgcgtcgaggcagaggcgtagtaggggtcgggcccagggctggaggggccgggaccgggcggggtgccgccctggacaccgcgccggcagctgttccgcgcgggttcatgtcattcctattttcaacctgtcctgctccgcacctgagatgatttataaattcggtacctttgggacaggcgtggatgacatcccataatttacttcgttattaatttctaaatgtaatacataccactatctaaaagtattttttaatttgaaatatatttgtatacgtatacatgtatatttatttatttctgaattttatctcgtacatataatgaggctcgtaaagtggatactgttcaggacataggtggattttgcttttaagtagtaaagacttaattggtgacttactggggctatttgataaggatttttttttaatgaacattaaaaacagtgaaattgtatttccggatttcgttagcttcatttatatcttaattggtgaaaactgtaagttaataactcatttttatttcctttggagattcttaagtttgtgctaccaatgattatttccaaaaaaggcacacttctggttttcccagaactaatgctagcttctcaatcttttgagtttacttgatattaatgtttgacctcaaatcatgtcacatttttgaagaaaactttctcttagccaatggaacataaaccaccctggagttcatatagaggaggggttcaaatgcctctgatagtgtcgtgttaaaactcatggccaaacgcaaggtcacatagctttctttctatgtttccctctagaatttgtatagttttgtcattataaaatgggtcttgtcctagaccccaagaacaggtttttggatttcacatgggaaagaccttttggcaagtcacagagtatagtgaagttaagatagtttattagtgactactcagctacatagcagggcgtcctcagaaagcaagaggagaaatgcacctgttgtaaacatataatttttttttgagacagagtttctctcctgtcacaatggcatggtctcgcctcactgcgacctctgcttcctgggttcaaggattctcctgcctcagtctcccaagtagctgggattacaggtgcgtgccaatatacccggctaattttttgtgtttttggtagagactgggcttcaccatgttggtcaggctggtctggaactcctggcctcaagtgatctgcctgcctcggcttcccaaagtgctgggataacaggcatgagccacccggcgcccgggcttaatgtttgtttatataggttattaagaatcagtttgtgacaggctattagtattgttacttctctttgttactgtcgattttaacaacaatttatgtgtgtactgttacctttaaagtaaaacttatttttaaactaagaatgctttttgttcttaaagttctgggacatttaaataactttcatgtctttattaacttgttcccacaatcataaatattttataacgaaaagtgctcaacccccgaaatatataatccaacaaatttaacgtgtgtgtgtgtgtgacagagagagagagacagggtctcactctgtcgcccaggctggagtgcagtggtgcgattatggctggctcattgcagcctcgaactcctgggctcaagcaatcctcccgcttcagcctcctgggtagctgggactacaggtatgtgcaagcatgccatctaatatatatatatattttttgtagacataagggtcttgctatttgcccaagctggtct

SEQ ID NO: 588076 - DNA, 4001 bp, Homo sapiens
cagtgtcatgggtgagaatgggcaaggctttttctttctctggttcctgaacttcccaggctctctcacttctggatcctgaatacccaaatcccaagcttccttcccagaaccaacacctcctcctcattagaaagatacctttgttgtgtgcttactttataaagtcttgctctttccctgtccactgccttgtgtcactatgtgtgtgtcttggggccggtggaaaggtgaacagaagccagtagagagtaacaagcaccagcttcacaggaatggcatgaccttaatacgatagtggcagttttcccttaacatccctgccccctaaagatttcagatcatatgtcacactcttaagtaacagcgatttgtctttcacggttttaatcatattgattaaaagcatttgtcttctccagaacatcacattaagtcatcaaaaaatataaaccttaaaaagatgtaattattggaactgaaaaacataaaaggtgagctttggaaatatctttgagcagtctattcattatgaacacatgtaatctgttggaacaaagttctaggacaatccaggtcatccttcaatatttgcagaaaacagcacaaagaaaacttgatacttaaacttagttggaaactttatgccacagccattaaatacagagatcatataaaggaatagaggaagctgttgaatactaaactaactcaaatcatcattatccttacgaagtgcacactgaattaatgtaaaaagcatttagtaaacaaaaagtattttcaatatacaattaagactgaaaagtattgaggcctcataagctgaacctgacacaataaatttaaaagggaaactaatttggaaatcagaaaaccatctaaagaatttgggaattaggcttctgctgccctctctgctactgacggtcaaggcctcctcattgtattctgtcctccatatctctgctgattcccattttgtctatttccatttaccccactactacttgctcaggtcactctccttcattgtcggtgtttgttcaaattcctcagacccatccacttcccatctaaacttccctccccttttctcgctcgttggctctacctccctcctctgttttctcctcactctcctgccccacctcgacatccacagcgaggcaatgaagaagcccctgccaaggaagagcccgcttctcagtgggacaccgggaaggtaaacacccaacagtcaccgctagtgggaggcgattgtgcagaagcacgagggttgttacaggatcgggcaggtcccctaccccagtctcggactcagggtcctgtctgaggcggccaccccgaagcgtggggtttgcggagacgtagggcctggcggagggaaggatggggaagcatctcagggaggactggcgtctgccgaatcccagggctgccctgaggggccaagaggggcgagggtggggacgatggaagacaagccacatgccgaatcgggacctgaggccgcgcgcgataggatgggcggacggtgaagagaactagggtggaagggccggacaggggcgacctcagtgacggaaccggacacagacgcagatctggcagctgggcgacaggcttcggagcatttccgggcgtcgcgggactccccgccgacaggagggcggttgccgagcctgtgacatccgcggagaccagcagaccccgggtgtggaggacgccgcaggaagggaactgcgtggctgggtttggccacaaaaagcggagggcactcacccgagcggacctcggctccggagaatccgtttccgggtcaacaaaaaacgtcgcgcgaggggcggggcccgtacgtgcagggaggggaggcagagaaaaaggcggggccgggccggggcggggtctcgggcaggggcggggagcttaccgacctcccgcccccgctgcgcgcgtttctggccctgccagtgtctccgccggttgaaagcgcgtgtctgcgtcgggttctgttggagtgcgttcggtgtgccgtgggtccgcgctgcttccacccaacttcctgttaggtaagaggcgcgtgaggctcctgtgccgggggcggtgctgctcccgagtcggcgcgcggcggggacgcgagtccgtaggtgctggcgggagcgagagtcgggtggggaccctcgcgagcccgcactccgcctctgggtagcagcctcttcggccccacacggcgtgacgcgcgctcgggctccgcgttcgcgtcgaggcagaggcgtagtaggggtcgggcccagggctggaggggccgggaccgggcggggtgccgccctggacaccgcgccggcagctgttccgcgcgggttcatgtcattcctattttcaacctgtcctgctccgcacctgagatgatttataaattcggtacctttgggacaggcgtggatgacatcccataatttacttcgttattaatttctaaatgtaatacataccactatctaaaagtattttttaatttgaaatatatttgtatacgtatacatgtatatttatttatttctgaattttatctcgtacatataatgaggctcgtaaagtggatactgttcaggacataggtggattttgcttttaagtagtaaagacttaattggtgacttactggggctatttgataaggatttttttttaatgaacattaaaaacagtgaaattgtatttccggatttcgttagcttcatttatatcttaattggtgaaaactgtaagttaataactcatttttatttcctttggagattcttaagtttgtgctaccaatgattatttccaaaaaaggcacacttctggttttcccagaactaatgctagcttctcaatcttttgagtttacttgatattaatgtttgacctcaaatcatgtcacatttttgaagaaaactttctcttagccaatggaacataaaccaccctggagttcatatagaggaggggttcaaatgcctctgatagtgtcgtgttaaaactcatggccaaacgcaaggtcacatagctttctttctatgtttccctctagaatttgtatagttttgtcattataaaatgggtcttgtcctagaccccaagaacaggtttttggatttcacatgggaaagaccttttggcaagtcacagagtatagtgaagttaagatagtttattagtgactactcagctacatagcagggcgtcctcagaaagcaagaggagaaatgcacctgttgtaaacatataatttttttttgagacagagtttctctcctgtcacaatggcatggtctcgcctcactgcgacctctgcttcctgggttcaaggattctcctgcctcagtctcccaagtagctgggattacaggtgcgtgccaatatacccggctaattttttgtgtttttggtagagactgggcttcaccatgttggtcaggctggtctggaactcctggcctcaagtgatctgcctgcctcggcttcccaaagtgctgggataacaggcatgagccacccggcgcccgggcttaatgtttgtttatataggttattaagaatcagtttgtgacaggctattagtattgttacttctctttgttactgtcgattttaacaacaatttatgtgtgtactgttacctttaaagtaaaacttatttttaaactaagaatgctttttgttcttaaagttctgggacatttaaataactttcatgtctttattaacttgttcccacaatcataaatattttataacgaaaagtgctcaacccccgaaatatataatccaacaaatttaacgtgtgtgtgtgtgtgacagagagagagagacagggtctcactctgtcgcccaggctggagtgcagtggtgcgattatggctggctcattgcagcctcgaactcctgggctcaagcaatcctcccgcttcagcctcctgggtagctgggactacaggtatgtgcaagcatgc

SEQ ID NO: 588077 - DNA, 4001 bp, Homo sapiens
caccatgttggtcaggctggtctcgaactcttgacctcatgatctgcccgcctctagagaaagtttttaaaattgcaaatatcttgctttgaagaaacagttatctcaaaaaggaaatagctatcttcagtttttgcttaactttttcttgtatgaatttaagtaaaattaaatcaatacattttcatttaaagaaactgacatgaaatgcaaaaaaaaggaagccacctgacttgtggctccacacaacaaactgactagcatggacccatctcctgttgtaacacagaatttgctggataaaacatcacctgaggccaggcgcggtggctcacgcctgtaatcccagcagtttgggaagccgaggtgggcagatcacaaggtcaggagttcaagaccagcctgaccaatatggtgaaacctcgtctctactaaaaatacaaaaattagccggacgtggtgccgtgtgcctgtagtcccagcaactcaggaggctaaggcagaagaatcacttgaatccgggaggcagggggtgcagtgagccgagatcatgccactgcactccagcctgggcgacagagcaagactccgtctcaaaaataaataaataaataaataaataaatatcacttgaaattgtctcaacagcagatgttgtgtatcatcagcagccacagcagctctggggtgtctaggggtgtcccatctggcattagaagcccccagctcttgcacccacactggtaaggggaaattccagcctcaagctcccagccagagtcactgtgtgttgcttacagcctgaagaaattaacaggatacaccaagcttcaccctcaggaaacaggaaaagcagaaccagagggcaaccgagtgagacgtggactagagctccactaacatctggacctccttgccccgcgccacaccaaggggcctactgggcgccacaggctaggcagggagcgcttctgttcctagtgctccccacgatgccccggaagttcagggaggtaagaagcgtaaggtcagagaactggagccagctgtcaactgcccccgccccacccaggccatttggcttctgctaccggcatgctgctcagggctctgcccaaggacaacgacgagccccctgtgtcctctcctgggtcatcttccatgaccctgaggcagcgaagacaagctcggcagctccctgagctgcttcacaccaactacctatgagtctgaggccagcatccaggcgctgcccagaccctgagagtccctggaccatgacgtagcctgtgtgtgaagggagcaagacagccttgacagaagcacagagaacgccactgggattcttaaagacgcgaagggaaaagggtaccttcaagaaaaagcaggacagcgtagccacaccacctctccccatctgggaattctccaggtccaagtcttgtacttaattctaattctgctcatcatgtttccctccccacccctatccccaacagcacagaagatgctggcgctgcatctcctccagcaccgagaggcctcgaggccccagggagcggaggcagggttcaggcacagccgcgggaacgcccacacccagtcctgccacaccgtaaaacatgtctgcggcatcaacctcacgcaggcctggcggacctgaagactgcgacacggacactcaagcccgcggctctccggcctgggctcagggcggggggaaggagagggaaccaggggtacccacacggcgctcctcagggacaagaccccaggctcgggcccgaggcgggctcgctggagagacgccgcagcctcgcgggggcggccgtggctgcgtccgggagactgactagccaaggccccgctcctggacgccctagcggggcgggcagcggcctgcggaccccgcccggccctctcggcggactgtgccctggcaaggcggccgggctccggagccagccggggctgcggctaaggcgttgcccgcccccgtccggaacgcgccactcacccggcgcgggcggggagaggacggcgcgagcccgaccctgcagccgctgactggaccccgccggcgcgggccccacagatcagccgacaaagcctgcaccgccgccagcccgccgcgaccggaagtcgcgagaggccccgcctgggaaacttcctgcgccgttctaggagcgccagggatcggctcccctctcagtggtgcggacttccgggcccggggactaagacccccggaggggccaggggtgtccggcaggagcggcgttgctacgcggttgggagggttgcgggccgggaagcgcgggctcggaaactcgggtctggagctcgcggcgaggtccgaccgcagcccaagaccagcttctcaggaggcgaggatccaggggaagtaaataccgtgagggccaaacttcacctctctgcgccccagagaagtggggaagcggcgcgctgtggagttttttggttttcgggttttggtttttttaagacagggtctcgctctgtcgcccaggctgcagtgcagtggcgcgatctcggctcactgcagccccgacctcccgggctcaggtggtcctcccatctcggcctcccaaagtgctgggaccagaggcgcgcgccaccgcgccggctcattgattcttggtagacattactcattgctagaatgagtcacagtccgaaataatcgaaataattacattcccctgccccccccccccaccaaaaaaacattatattcgtattttgggttttctttttccatttttctgctagcactgaggaaacttgtttacctaaattgttagataggattgggaggaattttgttttagcaatgacgctcaatttatttttatttttattttttgagatggactctcgctctgtcaccaggctggagtgctggaatgcagtggcgtgatctctgctcactgcaacctatggctccctgattcaagcgattctcctgcctcggcctctggagtagctgggattacaggcatgcgccaccacgcacagctaatttttgtatttttagtagagacagagtttcaccttgttggccaggatggtcttgatctcctgacctcgtgatccacccgccttggcctcccaaagtgctgggattacaggcgtgaaccgctgttcccagccgacgctcaatttctttagctctttctgacttatatgcaaaaaacataacagcagtttatcaccaagtgtacttaatgacctgtcagttgaccacttgaataggtcctttttaaattttgacagaagcaaacaaagaattagaagtaacctaaagtgcaaaactacatgaagtctttcccagccaataaattcacctactttcttaaaatcaactgcagagttttgaattgtccctttgatgaggaggacagcccaggtaccaaggccaggtaccagggtgaataaaggaagagaagcaacgtgggagaaggagctgtggccaagggggacacgctaggcgcgtgccctcatccaaggaccttctacaggaattccagggcagaatccatgtggaactcctgctgtgattctccaggggctccccggctcttggaaaggcttctgtgttccaggggtgtgtgtgaaagccctacattgagcgaccccacctctcatccaggcccggagaccttggctgctgcaaccctattgccagcttaccatgggacccagctcttaaggcgagaagggcttgaggcctcttccccacagggcttacagacctttcagcctccctgtccgcaggcccaaagagcttgagaacaccgcctgagcaggttgtcacagatcaaaatctgccttgtacacctgacgcctgccacttcaaccccaccaacagctaacacatggctgcagcttggcacttaatactttttttttttttttttttttgagacagagtctctctctgtcacccaggctggagtgcagtggcgcgatctcggctc

SEQ ID NO: 588078 - DNA, 4001 bp, Homo sapiens
tgtatgaatttaagtaaaattaaatcaatacattttcatttaaagaaactgacatgaaatgcaaaaaaaaggaagccacctgacttgtggctccacacaacaaactgactagcatggacccatctcctgttgtaacacagaatttgctggataaaacatcacctgaggccaggcgcggtggctcacgcctgtaatcccagcagtttgggaagccgaggtgggcagatcacaaggtcaggagttcaagaccagcctgaccaatatggtgaaacctcgtctctactaaaaatacaaaaattagccggacgtggtgccgtgtgcctgtagtcccagcaactcaggaggctaaggcagaagaatcacttgaatccgggaggcagggggtgcagtgagccgagatcatgccactgcactccagcctgggcgacagagcaagactccgtctcaaaaataaataaataaataaataaataaatatcacttgaaattgtctcaacagcagatgttgtgtatcatcagcagccacagcagctctggggtgtctaggggtgtcccatctggcattagaagcccccagctcttgcacccacactggtaaggggaaattccagcctcaagctcccagccagagtcactgtgtgttgcttacagcctgaagaaattaacaggatacaccaagcttcaccctcaggaaacaggaaaagcagaaccagagggcaaccgagtgagacgtggactagagctccactaacatctggacctccttgccccgcgccacaccaaggggcctactgggcgccacaggctaggcagggagcgcttctgttcctagtgctccccacgatgccccggaagttcagggaggtaagaagcgtaaggtcagagaactggagccagctgtcaactgcccccgccccacccaggccatttggcttctgctaccggcatgctgctcagggctctgcccaaggacaacgacgagccccctgtgtcctctcctgggtcatcttccatgaccctgaggcagcgaagacaagctcggcagctccctgagctgcttcacaccaactacctatgagtctgaggccagcatccaggcgctgcccagaccctgagagtccctggaccatgacgtagcctgtgtgtgaagggagcaagacagccttgacagaagcacagagaacgccactgggattcttaaagacgcgaagggaaaagggtaccttcaagaaaaagcaggacagcgtagccacaccacctctccccatctgggaattctccaggtccaagtcttgtacttaattctaattctgctcatcatgtttccctccccacccctatccccaacagcacagaagatgctggcgctgcatctcctccagcaccgagaggcctcgaggccccagggagcggaggcagggttcaggcacagccgcgggaacgcccacacccagtcctgccacaccgtaaaacatgtctgcggcatcaacctcacgcaggcctggcggacctgaagactgcgacacggacactcaagcccgcggctctccggcctgggctcagggcggggggaaggagagggaaccaggggtacccacacggcgctcctcagggacaagaccccaggctcgggcccgaggcgggctcgctggagagacgccgcagcctcgcgggggcggccgtggctgcgtccgggagactgactagccaaggccccgctcctggacgccctagcggggcgggcagcggcctgcggaccccgcccggccctctcggcggactgtgccctggcaaggcggccgggctccggagccagccggggctgcggctaaggcgttgcccgcccccgtccggaacgcgccactcacccggcgcgggcggggagaggacggcgcgagcccgaccctgcagccgctgactggaccccgccggcgcgggccccacagatcagccgacaaagcctgcaccgccgccagcccgccgcgaccggaagtcgcgagaggccccgcctgggaaacttcctgcgccgttctaggagcgccagggatcggctcccctctcagtggtgcggacttccgggcccggggactaagacccccggaggggccaggggtgtccggcaggagcggcgttgctacgcggttgggagggttgcgggccgggaagcgcgggctcggaaactcgggtctggagctcgcggcgaggtccgaccgcagcccaagaccagcttctcaggaggcgaggatccaggggaagtaaataccgtgagggccaaacttcacctctctgcgccccagagaagtggggaagcggcgcgctgtggagttttttggttttcgggttttggtttttttaagacagggtctcgctctgtcgcccaggctgcagtgcagtggcgcgatctcggctcactgcagccccgacctcccgggctcaggtggtcctcccatctcggcctcccaaagtgctgggaccagaggcgcgcgccaccgcgccggctcattgattcttggtagacattactcattgctagaatgagtcacagtccgaaataatcgaaataattacattcccctgccccccccccccaccaaaaaaacattatattcgtattttgggttttctttttccatttttctgctagcactgaggaaacttgtttacctaaattgttagataggattgggaggaattttgttttagcaatgacgctcaatttatttttatttttattttttgagatggactctcgctctgtcaccaggctggagtgctggaatgcagtggcgtgatctctgctcactgcaacctatggctccctgattcaagcgattctcctgcctcggcctctggagtagctgggattacaggcatgcgccaccacgcacagctaatttttgtatttttagtagagacagagtttcaccttgttggccaggatggtcttgatctcctgacctcgtgatccacccgccttggcctcccaaagtgctgggattacaggcgtgaaccgctgttcccagccgacgctcaatttctttagctctttctgacttatatgcaaaaaacataacagcagtttatcaccaagtgtacttaatgacctgtcagttgaccacttgaataggtcctttttaaattttgacagaagcaaacaaagaattagaagtaacctaaagtgcaaaactacatgaagtctttcccagccaataaattcacctactttcttaaaatcaactgcagagttttgaattgtccctttgatgaggaggacagcccaggtaccaaggccaggtaccagggtgaataaaggaagagaagcaacgtgggagaaggagctgtggccaagggggacacgctaggcgcgtgccctcatccaaggaccttctacaggaattccagggcagaatccatgtggaactcctgctgtgattctccaggggctccccggctcttggaaaggcttctgtgttccaggggtgtgtgtgaaagccctacattgagcgaccccacctctcatccaggcccggagaccttggctgctgcaaccctattgccagcttaccatgggacccagctcttaaggcgagaagggcttgaggcctcttccccacagggcttacagacctttcagcctccctgtccgcaggcccaaagagcttgagaacaccgcctgagcaggttgtcacagatcaaaatctgccttgtacacctgacgcctgccacttcaaccccaccaacagctaacacatggctgcagcttggcacttaatactttttttttttttttttttttgagacagagtctctctctgtcacccaggctggagtgcagtggcgcgatctcggctcactgcaagctctgcctcccgggtttatgccattctcctgcctcagcctcccgagtagctgggactacaggcacccgccaccacgcccggctaattttttgttttttagtggagacagggtttcaccatgttagccaggatgttctcgat

SEQ ID NO: 588079 - DNA, 4001 bp, Homo sapiens
gactctgcttaactggggatgaaacttcttaaaaaccttttcttgagacctgtcttctccctgcccctactgttccagctcagagtcaggtgtcaagccctgtgactctcctgaggacagtgctcacagctgaggagaagggctgagccgagtagggctgcacagtggcaggtggcacccactgcaaaagcagccccatccatgactcacaaaattctgacatgtccaaatcttagaaaccacatgaatcctaattccacgcatttccaaacatcactcactgggcgggaaagtaattattttataagttacctgtgtgttcccccttatctacagacctctcacccaaatgtatgggggccttactcaaggagagtccctcttggtgaaccctttgattatttttaacgtttgtagttgagttaaaatctctcccatactgactacattcatagagcttctcttcagtatgaattttctggtgttgaaggaagtttgacctctgaataaagcctttcccacaataactgcacacatagggcttttctccagtgtgaataatctggtgcagaagcagcttggagctctggatgaaggctttcccacagtctttacattcgaagggcctgtccccagagtggatcttctggtgctcagtgagatgggctttctggagaaacgctttcccacattccttacattcatacactctctctccagtgtggattttctggtgtcgaataaggtatgaactcagaaagaaagctttcccacactcgttacattcatagagtttctctccagtgtgaattctctgatgctgggtgaagtttgacgtctggctgaagcgcttcccacactcattgcatacgtaaggcctctccccagtatggatcctctgatgctgaatgagctttgaactccgaataaaggctttcccacactcattgcattcaaagggtctctctccggtgtgaattctctggtgttcaataaggtctgagcgatgacggaatgccttcccacattctttgcattcatactgtttcacttctgtgtggatctgataatggcgaatgaggctcgagctccttatgaaggatttcccacattcattgcactcatagggcctttctcccgtgtgaatcctctgatggcgaataagtaaggagctctgactgaagcctttcccacactctttgcattcaaaaggtctctctctggtgtgaactctctggtgcctaatcaggtctgaactgtgacaaaacgccttcccacactgcgcacatttgaagggcttttctcctgaatgaacgcgctgatgctcaatgagacctgaatagtgaatgaagtctttcccacacacattacagacgtagagtctctctccagtgtgaattctctgatgctccataaggtgtgagctctggccaaagcctttcccacactgatcgcacgtgtaaggtttctccccagcatgcgaaatccgatgcctaactaggtccgaattaaacgtgaaggttttgccacagatatcgcaaggattggcttccccctctatgagctctctctgaagcagaagaaggtctgagttcagaatatggtttcttcctgacttggtgcacacttgagctgtctctcctgtctggatcttccaatgggtcactgtcacctgcttgcagcccctgtcctgagagggggaactccccaggctctgaccttctggatttcccaagagctcccctaatctgggctcgtggacttcctcagactcgggagaggggagctccatcaccgtgagtctgtctgacgtcgtcctatgtgagttttcatcctcagaaatccaggcttcagtcaccttcttctcaccagttcctacattagaatctgaaacaaaagacaacaaaatcatctttccccttacttaacagatggggatctcctgaatcagggcaggataaaatccatatccaagaggtggaaagtgtttcctctgcccctcatcctgacccaacatgctgctacccacagctctggtctcacacccaagcctgtcccacataagatggcttctttgtggctccacttttaacatccaacaccaggacagactggtctgtggtgcacaacactcctctgaccattagtgaatcctggatgagttgcagaggggtggggatatgcttgaactccattaaaaaaccgagacagatactttaaacaaacgtataaacacatcagccctgccacctcttcactgttcctcattccttccttcatgtcctcttctcccctccatacctagcttagagcccatgatctggggcactgtgttcactgtaagttgcatgagaatcaccctcctgcacagaatcgggctcccctgccctttcctccctccatgatacttggatgggaaagcccaacctttggttaaaacgaggttgtgttttgatttgtgcctgcactcttgctgtttttttgtttgtttttgttttttttttttttagatggagtctcgctctgtcacccaggctggagtgcagtggtgcaatctcggctcactgcaagttctgcctcctgggttcacaccattctcctgcctcagcctcccaagcagctgggactacaggcgcccgccaccacgcccggctaatttttttgtatttttagtagagacggggttttaccgtgttagccaggatggtctcgatctcctgacctcgtgatctgcccgcctcggcctcccaaactgctgggattacagacgtgagccaccacatccagccagctgactgagctctttaaattcagagctgcttgcctaatggggcctgagagctgccagcaactcctacccttcccactccccacaggaccttccacttctcctatcttcttacaaactcagcactccctcctccctccccactggtgaccttgcttcttgtttcaatgagaaaacagaagaaatcaggcaaggacatccactgcctcccacgtctcctgccagcctgtatctccacccatcctctgccaggcttgttacctgggttaaactgcccttgttctgacttaaaggcaacacttccacttgtgtgtgagctccctttccctctcacacatgcagggacagcacctgagcacccatccctctcctccatcctgaagtccttgccctccaagcccaccactcccctcagcatgaagaagtgcgccagttcccagcgacctgaaaaatgcacgtcatgggccccatgtcccaccaattactaccccatgactctcctcctccgcagccccattcaaagagcccccaccccacgctcgatttctccatttcctccttcccctgagcctactacagtagggctctcaccccaaacatccacgtcaccatatcaggggtcagctatggccacacttccaactcaacctgcggtggcactgacacagccccgctccttcagaagtcactctccttatgtgaatctgggacagcctttctctgttccctacccgcctcactgatagctcctcccagtgtcccctgacgcctcaaagccctggcgtgtctagggctcagccctcatctctgtccattacagaggggagtgcactcattatcagacaccaacgccatctatgctgaacactcacatgcctgcctccaacctggccttctttccagccccaacacctgaccagctcctcacccaacaccttcatttggatgctctcagaagtttttcaaccctaatgcgtccagcctcacttctgattttcctccttctatagttttctccattatctcatttgttcaggccacagacactgcaataacccttgaatcctcttccctttgttcacactccacatctgttcaaaaccatgcccagcgccagacgcccacagcctacagggctgccatctgcaccatcgcctttcaccatgaagcgtgaccacctcccacctgcttacttctccccttctccagctct

SEQ ID NO: 588080 - DNA, 4001 bp, Homo sapiens
caggatggcccctcaacaaagactcgtccattccaaaacagccacggtgccaaggtggagaagcactgagagagagaccttcccagaggcagagcctggggctgccagactttctaaccaaaagctctcagttcactggcaaagacagtcaccaaacagatgcccaggagatctgatgggcctgcgtttacctccctccctcaccctgcgcccaaggacacagtatatgctctgcgtcagtgactgagacatggtgtttttcctgtattcctgttcaattcctgccctggaactctgggcccgactgtggacatgtcccctcacctgcaagggactccatcagggtactgctctctttagcacctgtgggctctcctcctggctccatcttgcagaacaccagcagttggaacaatttctgcttaggtaaaagaaaaggaaaataaatcacagccagggctaggtacaggggccaggggcagtgaggtcagaatgccttcagaggaaactgtcagaacaggccctgtgggagctgcatcacccagctgggcccactcctgtcactagcaatcaaggtcctggctcaacagacactcccagaagcgggtgttctgttctgtgggatgcccaggaactctggtccaggctctgcgggtccccctccacccagggctgacgcagagcacaggtgggcgtggccacagcttcctagctccatgctgaggaagcccgcgccctccagcagtcttcaaatgtctagagaaattcccatgggttttaaaattttcttggtagttataaggatttgaatataaaaatgttaaaccagaagaaaagaacaacttatttgaatggtaaagttttggaatgaggaatgatttttctaagcctgacatcagatgtctgacaaattcaactacataaaaaaatttaatgtaaaaaaaaaaaaccaaaaagggaggaatacgtgcaatgcaaagattcatccctatctgataaagacctctatatattaatgagaaaggaaggaaaattggcaaagatcatgaataggtaactcacaaagaagaaaaaccagtaggcaatacatttttttaggtctcacctcaagtgcaattaagaaatgtaatttggctgggtgctgtggctcacagttgtaatcctagcacttcaaaaggctcaggatggaggactgactgattacaagagttcctgaccagcctgggcaacatagtgagaccccgtctctacaaaaaatcaaaaaattagccaggtgtgatggtgggcgtctgtagtcccagctactagggaggctgaggtgggaggactgcctgagcccaggaggtctaggctggggtgaaccgagatttcgccactgcactccagctgggcgttggagtgagaccctgtcttaaaaaaataagtaaataaagtgattaattagtaaatttaatttaagccgcctgtaatcccgcctgccagggaggctgagcgggaggatcgcttgagcccaggagtaggaggccagcctgggaaacatagcgagaccccgccgcttttacaaaaaggtaatttaaagtgcaattttttagtctggaagcagatttttgcaagtaccttaccggcaagaattagggaacaggccctcctgttcacagctgggaagaagctcgatgagctgggccggtgggaaatttgacaacttacaaaggcctgaagacgcgcagcggggactcagctcgcaggaagccccgcacgtgtcggaccccgggtacgcacctgcagggccgcctcccccacgccgcgcccgagagcggctggggcctgcactgcaaggagagcgcgggacgcgcgggccacggcggcggtgaccgccccgttctctcggccgcgccctcagccctcccgaatcgacaccccagcaagagaagccggggcctcagcgtccagagcagctggactgcacccgctacggtccccgccccgtcgcgcgccggaaacgccagtctccacccctggcccgccccctcggcacttccggcgacgctctgggcagcgggaggacagcgcgctcggcggcgggagagcgggacggcccagccgcggcgccttcagctcatcggttgcccgcaggcgccggccgagtccttcctgccgggcaggaagccctgcctcgtggggggcaaggtcgagccgttggcgcgccgggatccggctcgagccaactgaggaccgggcacccgcaggacgtgtcaggaggtgtcgaaggcccgctgtggggcggccacgcgcgttcccgtccgttccccgcggcgtcccgcgcttgtcccgggtcccgctcggctcacgggaccctccaggcccccggggctgtggcagcacgcgggtcccgagcgtgggcttccttggggccgagagcttggagcgccccaggcgctgccccccgcctccctgcaggacgccgccctcgcgtctccgctgcagagaagcccttgctgcccgcctctcgcgggctctgggctctttctcaccagggaccgagctctcattcgttcagccttccccgggcaagatgcacctcctgtccaagtctctcgcccttccgcctgccgcagaccgaaggtcacgcatctccagctggaatgctgcaaaagtgacgcttttcatcatgggtgcaaagtgtacagctgcaatgtggacttgttccctcttacaacgagtagacagaccctctctggggagaaaagaaaggctgaagaaccgattcccatgagagaaccctaagaagacagcaacagagggccagacgcgcccctggaactggaccctggactggggcgggagggccacagccttgggagcccaggtccctgcccgcgcctccgacagtcccgcgccgccgccacccggcatctgcctctgggcctccacatctcgtgcctggaaccgcgttcattgcgcactgcaccagtaaacacctgaacactcccaccacatgctgcacgtttatttgtaacaaattagaagctgttgtaaaagataaaaattaaaacacttagactgggtgggcgagaggctcatgaatgtaatcccagcactttgggaggccaaggcaggaggattgtttgagtccaggagtttcagaccagcctgagcaacatagttagaaccgtgtcgactaaaaattttttttaaaaattagccgggcgtggtggccggcgcctgtggtaccagctactcgggaggctgaggcggggggaccacttgagctcgggaggcggaggctgcagtgagccgagattggcactgcactccagcctgggtgacagagattctgtcgcaaaacaaaaacaacaacaacaacacacaccacacacacacacatctaaaagagatgatgtagaagtacaagtaaccgtttccctctgcatcccagtggaacgtcgtgggtcttctgaagaccctctcttgccctgcaggctccggtactccaagcacgcgagtctgcgcaggaggcgcttcgctctccggagctccccactgcctcctagacacagtcccggctccttaccccgggcggaggctcttccagacgggtcccgactgcctctgtatgcccactgctgccgtgccagaagccactgccctctcctcgcccctttccaaatgtgccctgcctcaggcccgtgtcatgctgttccctgtgccgctttcgcccgtcccctcactccccgccaccagaaccgggaaggcggtgccccctttccaggcccaacttccggcactgaacctctaggagtccgcagcctcctccgcccgggcctctccccgctggctcagaccgcagggccagcagccccgcccacacggaagccccgcccatcaggccgaccccgcccctcctgcctcggccccgccctcgccttggccccgcctcctcgctggcagccggcaggcgcagtcggggtcgtgggacccaggaggggcctccagcaggtgcc

SEQ ID NO: 588081 - DNA, 4001 bp, Homo sapiens
cgagagaagtgcacagccacatcgccaaatgttaccacctcctgaaaggacacacaccagcaccccaggaatccctgggtgccagcccccttctggcgctgcctcatgacatgtctcaggcagctgccccatggggttgggcgagacgctcaccaggactcctctgcctctaatattctggggaggggcagtctcggggaggaggaaggaacccagtccatggtggtcatacaaccctcccccctcaagagcctcaattaggccctggtttgggcaggggtttgctcactaccttggggttgggggcaagggggccttcctaagcccagcaagggccaaggtagggtctgggcccagggccagtgggcagagcaggaggtgggccttcacaggacatgcgaggggaaggaggcagtcaagcttcctaccatgaggctcagtggtgggtgggcatccacgtgttctggccgagagacctgttggcaattatgaaaggattagaggtcaaggtgccagaagcccaacttccaggctaatcaagggggtactgtgctctctgctcctttacctccagccccagatttctctagcagggacatggggctgggctgaagcagccatggcacttgagtgaaggaggcccactgaactcttgttcctctttagagtgtatgtgtgtgtggcatgtgtgactcactccacaaagccgtaagaagtggatgccacgtgccaggcactgagtaatggggatacagtagtggacacgaggaccctgccttcacgaagcagtctggcggaggaaagagttaaataaccacacaaataagcacactgcaaccacgacagcgctcaagtacagggaactatgaaagccacttagactagaacgttcagtgtaatgggtcacttccccagggacctcggccaaggtaatggaggtggagagagcactccaggcagcaggaatagcatgtgaaagggcctgaagcaagaagaaatggggttggatgaaccagtgtgggtaaattcccggcagcaagggaaggcagtgagcgactggaggttggggaaggcagtgagcgactggaggttggagaaggcaggagcaaaaatgacaaactgtagggaagacaagagtggacatggaaacccctgccctcaagtacataaattccagtctccagctcacctgtcgccaggatggaaccaggcacagggatgtaatctgatataaatcgttcacctcaattaagccaatgaccccagaccctctacctgcccaggcattcccccgggaggtcggaatgggaaaaagagtcttcgtatggcagcttctggcccagaaagtggtttgtgggtggaagccccaggtcaccggcacaggtaggctgatccccccacctggctcctgacagtaggaatgcccggaatagcaaccagaatttagagaagacaaacagcctaccccacccaaggcaccgttccttcctccactgtcacttatcctaggccttccggggcaataaatagaaagagaaaaggctctagaaggaggtgatttcgcaggaggagtcagggccccgggagtagacccaggcctgaagaaaaggccgcagctggagctcgccttactcaggccccggacaccgtggccgccacgagcggggtctgcggggagctgcgagactcggccaaacgaagcccacctcgcgccgccgcgggggagggtggctgggctcgaccacctcccacaccaggcgctcaaggccccgcaaagcccccgcgctttcccgcctggaggcccgggggacgcggggaccccaatgccgaaggcgggagggctaaggaagcgaccagggatcactcggaccgagggcaacccgagtccgcgcccgccgcgccgactcaccctccctgaggaccacccgaggctcgcaaacgcgcgacgccgccggaaacgggccttggccacccgcgtccgccccgccccgcaaacttccggccgccctgggccgctcggaggcccggccatctctgtggttctcagccccgcctcccaggctccggagaaggggtggagtcagagccgaggaggggcgaggctggggcccgagggacaagaacctgggcgggaccagaagcccagataggcggggctggcgcctgggggcggggtacagtcagaggcgggcagggggcggagccgcgagggagaggagggcccagagcccggagtgggcggtgcctgagcaggggcggggcggggccggggcctggagctggggacgcgggccggggccgggagttgcggactcgctggcgggtgggaggagcggagtcggggcgaggctggcggagatccaggggatcgcccggttgggccctgcgcaccccggatcaccagcttcgggcgctggttcccaccgaggctgttcaggcgccgctcccccgcgtccctgcgacaggaggcgcctgctgggcgcgctatggaccccgcctcgcggagacgcctggctcgggccttgtccccagtgagcggctggagcggccgcggggtcgcagagcctccgggaccccgaggaagggcgcccctcggagttgcccgaggccgggcccggcgtccactcgccactcgcctcgcccctccccggccccgcaccgccctccaccccgcctccttcgggttccttctgcgtccggcagagcctgcgcgcctcccccggacggccacggactcgcagcctcggcgaggacgctgcctgcgtcccgactgcctggacctccccgcgtggctcccggcgaagcccagcagccggagggtgccaggtccgcctgacgcgcccctccccacgggaagaacggggcgggggtccaggagggacgtaagccgggctcccccggcgtgttgatccgaacccgcgcgggaaaacttgcgcaaaccaaaggagggaagagtcaggcagcccccagccccccagggaggcccaggtgaaaaacagacgccggcctcgcctctcccggtgcggatgatcccggcactcccacccccgcccctgctgccccgagttcggctccctcagccccacatcctctctggtcatctaagtggactgcagctgctcagggagcatgtcgcgaaggatagggaaggacagggggtctgcttccccagccgccctccagacccccagggctggtaggggccggcaaccctatgccccaacctggcctgctgcaggtgaggggggcacaccagggtaacacaggagcaggagggggagaaagcctggctagagcatccacctcataggcaccttccttgtgtccagggtgcagatgccagggctctgaggccctgaggtcctgtctggggcgagggggcttcctccatccactgcatccactgcccggctgagtctagaggccactgagcaagcagaccctccaaagccaggcacactcaggccctcacatggtcacggtgcttatgctctgggccagcctggattgctcatccctagctgagattgggattcacagggtcttccagttcccccttttctttctctactgattgagaaacacagagtcctttgattgctctgggacctggccattgcgtgttccctgcagccttgaacccagttcaatggggccgggcacattccctgataaagctgtttaggttgcttgaaaacacaatcaaccctattgctaaacacgtagaaactggccctgccctgagtccaatcccttaaactctcatctaagctccatagccagagtcccttgctgcaaatgtacctgggtggagcatcccttgcctcatcatcgatcccaagaaagctgaagctccatgtgaaaatttccggaagaaatgctctggactgatcaccctggcgtttagagcttctttccttggaatcccaaccaattccatcgcgggactgtttggggaagtcttttgaggcaactcccttgctgccacttttggggcaact

SEQ ID NO: 588082 - DNA, 4001 bp, Homo sapiens
cgccacgtggccggcccccaccagcgccgagggcggctcggacttgcgcccggaggccccggactcggcgccaccgtgcgccccgggctccccaccgccgccgcggctcacggctgccggctccgggctgggcttgggctcctggtctttcttgtccagctccccgccgccaaccccgccgccgttcttgcagtcagagtggtgcggggagccgccgcgggagccgccgggcgacgacgaggacgaggatgcggagaccggcgctccatgcgggggaaagggcgggcaggcggcgctggggaccctgaagcccgccttgtctcccggggacgaggaggacgaggaggaggtggaagacaccgaggaggagccgctgtctttgcgggagtcgccgccgccggagcccttggagtagggcttgaagctggacttgtcctcggccggtgagtcccccagctgcttcagggccgcggctgcggaggcggcgcccggggctgagcggccggggtccttctccgctcccagcccgttggccgccgccgccaccgagttgagtttggaggagggcggcgggtccggcttgccgatctgcgagcaggtctgagccagcagcgccaaggggctcttcttggcgtccagctgtgggagacagaagcagggggagggagaaggagtgagactcagaggcctgcggggcgagcgggggcgcccggggagctgggcggcggcgccacggggcggggcgggcctggggagagggtctgcgagcgagggccgggccgggcgcggcagctggcggaactgcgcccacactgccgctgggtcccggggtgcgccgcaggccctgcggaaggagttcacccaggacccctgcgggagaaggtgacgtctctggagtcggggctgtgactcgccacttccctctaatgtccccctcctccaggcccaggaaaaaacttattcctttagtttgggggaacttcgcttgggacgggtttctggcgatggcgccgcggggtaggagaggggagcgcggattctaaaggaggggctgcagttggcgctctctccgtagcccctccctcccggggagggcacccagggaagaggcaggaagaaagatccgggatcgggagcgccagggcgccgtgcgccctcaccggatgggacagaggcgaagtgggacccgggcagccagggcttcaaagaaaacagcccggcgtggggggcggggaagacccagcagagaccaactcctggctggaaactggggatcagaggaaaagtaaaggacccagaggggactccaggagcaaatccaatccgagagaaaacacggagctccgaagggcgagcgtggaaggagacccttccacggggaagcctggggaagccctggtgggctctgatccctcggttttcttcccctcctcactcagcccgccagcgtgaccagacttgggtgtcgcaccgagccccggggcgctgggagctgggtcagggtcccggtcgcggtgggaggaatggggccggcgcccgggggcagcggccggggactgacctcaatggggctgacgggagtggaggacagcggctgcaggtactccgggtgcaggaggtgaccggtgtgagcgctcagcatcttcaggaccctgatcgggagccggttcgcctggcgcagggggtccgccggtggcaagagggacaccgctgccggcaccgccggcctcttcccgccgccgccgctgccgctgccgctgctttcgggtgtccttgggttagatccagcgggcgaatcgctcatttggaggaggcagcgccgctgggggggcggggagggcgggggagcaccggggaggcgagctcccggggcgggtgggctcgctccgcagcgtcgatcgcggtgcagcgggagctgcgcctcctcgccgcctcccctcctccaccgacgcctccgccgccgccgccaccgccgctggccccggctagcaacacaaaaaccttcgccttcctcgagccgcacgtcaaatagccgcgatcggcagccacacttcaaagggatcgccgcgcccgcccaatcgcagctctcgccgggaccccggggcggggagagcggcgggctgaggccggctccatcggtgggcggggagagccttaaaggggccgcgccgcgcgccgccgctgcctcggtctcggccgctcccgggattcctcccctccccccgactgggccttcctcgccctggggtcccccgcctgggacgggacttctccgggaccctgagctctgcgccccgtcctcctttccggccgctctctctcctctctcccttctcaccactgggtgggtggggggtgatgctggcgggggctgtaaccccgcccgccgtgtgtgtccgaggtggggtggggtggggtggggtggggtgggagggatcgcacggcgcgggctctgggacgctggagttcaagcctctcccagaggccgcctgggggcaggcctcgcctcgggagcccgggtccttctccagagctgctccggctctcctcggccccgctctccttcccctacttggcctccccttggtgtgttcacttggaagcgcccgagcctcggaggcacccactgttctcgggacgcggcgtaggcagctccaactactttgagcccgtcttgtctgaagcctgcaagtttgtctcccttctggagtgacatggtcggcgaccaagcgcgggaccccaggctgtgcgcgctgtgcctgcgccctgcgttagaggctcggtgtctggtgtgttacaggcttcttaccgtgtcctgctgaggggcgtgaagttcctcactgtaccgcgcccagctgctacgaggagagaccgagatcacgggcgaggcgggtgtccctggagggggatctctctctaagcgctgctcggcaacacaacccctccgcccccccatccttctcactccgggggaaaaagcacttgctttccccaggcaaatttcgggataaaaacttttaattaaaaataacaatacccttcccgactccctgcgcctttctgatacagtgtgcattgctagcttcgccctgggcagagattttacgtagtcatagtcctgacatccaagttccggatccgccgcttttccggaggcgaagttggtcctttgggtgccgaactctggggagcccacttctccgtgcgctcggcggccagtggaggcgcgctggtgtcactgcctggctcccagcaccacttttccagtcccgatccatcactccggttgtcagggctgtcactcggggcgtattgctctaggatggcaggttcccgactctgccgcgctgaccgacgccttgagatgacctgagaacccaagatggggagaggtgatttcaaaggagctcttcaaacagaaagaaatagctatcacgaatctgtatcttgcccagtagtagaagacagcagaccccacttccaggcagtatcagtcatacccaaaactaagtgcactccctggatccatactgtattttgggcagcacttatagaatgcttagaaattacacaagctgtaattacatgttccccaattttaatcttggtaaaatcatgttacgccgaatggaaaggggtaccctgactgtgagatggatcccacattgcagcaagaggggtgcgggaatgaaaagggagggagtgatctcatttatttcatcgtggcaggcttctcatgccgacttctgtgcgggcagccattgccatcactgcaaacaccacctgtaaaagtccactgcagggctgtgtccacccacaagccattttgccttcgggagactgctgtgtagagcgggaagggcagaaggaagccagggtgcagagaggctggcctttgcaggaacgcagaggaggaggagctgggcagaggggagacctaggaggctatgaaagatgaaagtctccctgattattgtaaccagcccagctgtgagagggag

SEQ ID NO: 588083 - DNA, 4001 bp, Homo sapiens
gctagaattctcagcagaaactcacatccaatttaaatgctaccccccacccccttttcctggtttcctctttttttctcatttgcaattttgaggagggaaaaaaacctcaaacgctaaatgatgtcgagtggaaacacgggagggcgagggtcaatgccaaaaactgctagcaaaatgcatgtggaaaccaagggcttggattttgctgtactgggtttaccggttctctcacaagcgcctgtgatggaaactcatcgacaattgttcttggttggaagaaggggctgagagattgacaagaaacaccgctttctggtttcaataagcttgaatagccctcaaaataaggagaaggggacactccttccttgggggagaataaaatctcactctcccctgcctcacccgtccccaccgggcacgaaccggcgcctccgtggtcccatcacccaagttccccacctcactggggagaagcgccctttcccggcacccacaccaaacaacaaacccgacacggcctttgaggaaagcgggagccgccgcctgggagagacgcaggggcccaaggcgcaggcaaatcaacagttcctcgcgctgccccgcgcggccgcccgcgccgcctgacacacccctcctggccgggtctctccccggcgccgctgaccgtcctcggccaggcgccttgccccggggcccgggcccgtccccctccccgggctggcgggtcccacgcgcgccaccgcgcccaacacgcaccttcaacgcgccccgggccgggcccctggggactgcgtggccgggtccgaggggcacgaaacgctcctcgccgtcctcgtcgtcttcgtcgccgtccaccacctcgacgaccacctcctcgtcctcctcttcctcgtcgtcatcctcctcctccgcgccccctcggggcttctcctccacacgcccgagccccctccgccgcctgctcccgccctcctcgtcctcgtcttcctcccctagaagcagcagcaccggcgacgaggcggcggcggcggccccggtggcccgaggggggccggtcccggcgctgcgcggcggcggcggcagcggcggcctccagctctccggggcgggcgccggggccgggcccgggacagggggcgggagcccgggtagggcggcttccttggcgggcgcgggcgccggcccggcaggctgcagcgcggcgcccccccggcggctgcccaggctggagcgcttggctagacgccgcgcctgcatgcctgagcgcggggttgcgggccgcggcgcggggccggagagtttgtcacctcctcttcctcctctgcctccgccggtggccgcagggccggggactcgcggccgcaaggggctgcaggagccgccggccaggacccgcggctgccactggctgcagaggcgcgggcgccgccttcgctggaccggccggcggggacgccggcggccggcggctacggcggggcggcgcggcggccgcgggcgggggtgggtgtgagcgagcggcgcgctgccgcctccgccgccgccgccgccgcccgggagccgcgggccgcgctgcgctccatgcggccggcggccgagcccgcgcgcgcctctcccggccggctgcgcccgcgcgctccgggcctaccgctgccgtgcctcggcgcgagctgtttgtgttgtatgttttccaccaccgcccccctcttcgcgagccattcctcacaaccctccggtccccccgctcagacaaaacccggactggattttttttttctcttacccacagtctccgaaagtctggcgcttcgaagcagttggccctgacaccagggcaaacgcttaaccgcagcccattcttccctccggagggaggggagtagacttcgctggaagtaaggttgtctgtcaaagttagactttgaacgtagagatttgctacaagtcattttaatggacactgatgtgcatggcagctactcctgagcttgtgtgaaatcaaggaaggtgtaccaatctgaggtttgggatgaattcctaatatgaatcatcagagtcgcttagattttcgaaacactgtttcatgagcgattgtctaccaatctcacactctttgaacgcaccactctaggccctgcgattgagctgccttggctctgtgctgagtgtgtaggtctttcagcttttactcctgctattctaccttgagtgcctgattttaatggctgaattccaagaagctttctgtttgcactgtctgatctgtagactctcttctggcattgttcaggactttgaagaaacaaatgggtgggagttcaagatcgtttgagttggttacttaagaaattaatatgaagtaagaccaaatctggaaatcaagcacataacatgactaattttgccattttctgacgatttttaggtgtgataaagaaaatatatttgctattgcgtggggttaggctatgtagtaagtggtatttcttcttttatttattttaatttttatttatatatatttctttatttttcagatggagtttcgctcttgttgccaaggctggagtgcaatgtcatggtctgggctcactgtaacctccgccacctgggttcaagcgattctcctgcctcagcctcctgagtacctgggattaaaggcgcgctccaccatgccatgctaattttgtatttttcgtagagacagggtttcaccatgttggccaggctggtctcaaactcctgacctcagatgatttgcctgccttggcctcccaaagtgctgggattacaggtgtgagccaccgtgcccggccttaagtcgtatttcttacattcaaatcatacccccaattccatccctgtagaggagggctggggaggatcttacgcatcaaataccctggtaggcacctccgtggggccagaataaaaggtgtattcaccttcagttaattattgttggacatttaacatcatatgctctgttagacacttgaatggggctcattaaatgctcacttatggtggcttccaactgttgaacagggatgatgacaaagattctaaaatgaactttttgttctccctgaatcagattagcttcctgatgtacctatttcaggtgatgaaactctcattataatcatttgagcccaaaatagcggtatcattttaactcccttctctaccttatccctagaggcaattgcccacaagtccaacccattgttctttctaaaatgcattttgaatccaccccttcctttccattcccaaagctcttacagcattttgtgacttcaaaagtggaagtttctaacagttctacacacccattttctcacccacacaccctccctttccctcctcagatgccaccaccagatttatgtttccgaaaccccatttagatcacaccattttcttgttggactttatatttgtaaatattctgttcaggaattcagagagaagaaaacagaacattaagagatgggtgtgtctgatcaaagcatggaatagcaggggctagccaataagtgaataatcagtatcagctagagtgtgcaaagaattaagaaagaacattaaggtggtttcatcccaattggaagaaatttagcttcgttgatttgggagatgattttagagtgaggcagcaggatctttctctggccatgaaaaggaaagatcggggcaaggggtgggcagacaggtatggaggaggtggaggaggacaaaggtgtgaggcaagctggctagtagttaggcacatggtctcaggagcacctaggtccgaatcctgactctggaacttaccagctttacttttactcatcctctttctgtgcctgtttcctcatctgtgaaatggggatcatagtagtaaagttgttttgcagagtaatgagtgaataaatgcaatcagcttacaagagtgcctgggacaagctagggtttatatgcgggcttatcatactaaacattgtaat

SEQ ID NO: 588084 - DNA, 4001 bp, Homo sapiens
gaagtgctgtggcccgaatgtttgaatatttctgtctccccattcatctgttgaaatgccaacccccaaggtggtgacgatattacaaggtgcgggctttgaggaggtgattaagtcgtggagctgaagtccttgtgatgggattgctgcccttataaaagaggcctgaaggagctcgtttgtacctttcaccacataacatcacagagaagggaacgagctctctccagacacctatgccggtgtcttgatcttggacttccaacctcgagaactgtgagaagtaaacttctgctctttataagccaccctgtttatattactttttaatagcatcccaaatggactaaggcaggaaggaaggaagaaaagaaggaaggaaggcagggaggaaactcagggatgcatacctttcgacctctctaacagtggtcaccctacattaataatcagtatgtgttgagaagccaaaaggtagattgttgatgagatgtagacatcagagaaatcagccaagctctgatgtaagctgtggtctttgcaaaaatagagacaatttttttttgtacctaagaataaaagagctctaaagtcagataaccctggtttcaaaacttttgctctgccattcatcaactgagtgatcttgtgcaaataattcaacctttcaaagctccagtgtctcctgtttatttggtgatggctatagtgtcaacctcctactgtttgtctcaggaaaaaaaaaaaaatcttaggaagagtcaattgctacccaatacctatccacgcagagttgtgttttaactaggatcaccacaagagtttcaaccccatcaaaaagtgggcaaaggatgtgaacagacatttctcaaaaaaagacatttatgcagccaacaaacatgaaaaaaagctcatcatcattggtcattagagaaatgcaaatgaacctaacctgtaagaggaacttttaagtcaacttctggatacctgaaatcacacaagatactactttcctccataaggcctggaatgtctcaaaaaaatccctaaaatttaaaacttaataaggacaactttgccttttagggcccatggaattagaggctggtagggaaactttggccattttgggtgtgggagaaagatggtcgtagataaggcctaaaattgtaggaacacactgaatttcacttattaaatgttagcataacttaagtttacataatttaataaaataatatagaaactcctctgtcactccagtaagaatgaacattcttgaacacctatcacgtaccacgagtcttgaaagtggtatcttagttgacataacttttatatgagatagatattttctctgagcaagtcaatgcaggttatacaactagtgattgagctgggatttgaactatccacaatcaaaacttttgcttattttacagtctttcttgctaaaaaagaaagataatattttttgaataaaggaacacatctctagtgagataaactagttctgtgtgtttgacagcaatagagcttgaggtttagagaatgaacagggtcgtgcataaaaggttgtctgaattgcacttccctaacaaagggggaaagtctgcatcaggtgggtcatggtgggccaagtgggtaaaggtcagtgttccttaatcacttcccaaatgttccgcttcttaacactattgcattggggattagatttcagcatgaattttgggggagagacacaaacactcataccacagcaaataatgatggtgataatactactgataataataataataataataccactagaaagtaaagtggaggctgaaatctgttgtctacattcctgtctcctacacttacaccctgaaagcaagcctctttattgcctcccaccccttctttagccccagttggccctactggaaacccaccttgcagttggttcctccaccctccacaggctgtgtgctgtatgtcccttgggacaaggacacctgaaagcagctccagtgaccacataattaggggtcatatcaatgggcagaggcagagcttagtgaggtcatgcagaaggcattgtgaccctattgacagaagtcaggtttgagtggcagtgagggaaagaagggtggtaggatgtggggactgtgtagcacccctttcatagggtttccctgaaaagctgggcaaatgcaaaagacgagagctcttgtgtgtccaataagtgtttttcttttagttggtatagatgcagtagaggggaataagagatagattaggtgagagaaagaattgctggagtcctgatgcgatttggctctgtgtctccacccaaatctcatctctaattgtaatccccacatgtcaagggagggatctggtgggaggtgattagatcgaggaggcagtttctcccatgctgttcttgtaatagtgagtgagttctcatgaaatctgatggtttaaaaatggtgcttccctcttctctctctctcctgctgccatgtaagatgtgcctacttcctctttgccttctgccatgattgtaagtttcctcaggcctccccaaccctgcggaactgtgagtcaattaaacctatcttttttttttttttaataaattactcagttctttatagcggtgtgaaatgggctaatacgagtcctgtctatgagtaagcaaggaaatgcgatctacgaccctttctctcttcttccctctttacccttcccacctttgttccctcctttcctctctccttccttccctcccttttctttattcctccctccctgctttcctccctctcctttccccctccctttccttcttcctttttccatcccttctgtcttttcttaccattctttctctctctctctctttcagtgccctgtctttttttttttttaacttctctttcaatacatgccgggacaaaataaaggaatagcgaagctaaagtcatctgaaagccaaagttgtgatggagaacagtgaagagaccacatggggcacttatggcaagggttcactgtataaagtgccccaggcatatattatgagcttctctaggtgccccaaaactcttccatttaattataaaaggatatactcgtaaagagatagccagaatttctatccttgaaataaaattaatcattttacttccatttaaaatggcacttatcccttaaatataggcaccccagtcttgccaagaaaaagcgatgggatcatcacaggtaatttcagtctgttaggttgggccatgaaaacgtaaaactctgaaacctcctctaaagctatatgtaccttcaatgttaaagggaaggtgcttagttttcacaaactgttcaaatagtctatctggtctagagaaagaattagtaataaactacaatctaacctcaatttatgtcaaccctcttgtttctcagctccctcttatctggagcaggcaacaaggacaaaaatggcaaagtgaagagcaggtaactgacattcatagctggtggctgaccagccaagtgacaagccaagattgctaccttcttaagagtctgacactttctacacaaatgcagattctaagaacgtacatttttgacctcaggtttttatggattatgatctttcacttctggaactcagatgaggattgaaggcattaaaggcagcctgatgttttgcaaggcagcaatttgctgttttttgggtttttttgtttgtttgtttgtttgttttttaagaatagcactttggaggtgtgtgattgattaataaagaattagatcttgaaccataagaataaatctctgacagtacatatttactctttgcaaattctatggaggaagtgcttttggtgtaggaatatcctggagatatgaaatcagggaatggagacatatgtcttccaccctcacctaagactgaatctgttcacaataaattccaagctacagatctgaaataaatgggctattca

SEQ ID NO: 588085 - DNA, 4001 bp, Homo sapiens
ttcaacagtatagatacagctacagaagtcagtcttttactaccaaagccaatctataaaattagaagaagcaactgttttaccagatattcaaatatcaatgtaaggacataagaaacattaaagagcaaggaaacatagcatccctgaaggaaaaccaataattctccagcaacagatttcaatcaaacaaatccataaaatgagtgaaaaggaatttaacagctgaaattgaataattcaataaataaaataaataatacaatttgagaacctcaacaatagactagattaagaagatgaaagaatttctaaacataaagatcggtcttcatatgcaggattaaatggattaaagacttaagtgtgaaacacaaaactataaaaaccctggaagacaacctaggcaataccattcaggacataggcacgggcgaaaattttataacaatgacaccaaaagcaattgtgacaaaagcaaaaattgacgaatgggatgtaattaaactaaggagcttctgggcagcaaaagaaactattaacagagcaaaaagacaacctgcagaatgggagaaaacttttgcaagctatgcattcgacaaagatccaatatacagcatctacaaggaacttaaagaaatttacaaaaaaaaaaaacctttaaaaataggcaaaaacatgatcagacgcttctcaaaagaagacatacatgctgccaacaatcatatgaaaaaaaaagctcaagggtcatgagggattatgacagacaggaggcagaactagatggcagctctggacagagcagcatgcggaggcttgcgttgtgaattttagctccagatggactgcaagagcagaccagcaatcctgacaggacccacagaccctccgaaggaagcagactgctcttgcaggacctgggagacaccccaaatactttaagtcccctaaccacggaaatgggaaagggagaccctcgtctcatgaacacacacccccactggagaagctgaaagtctgtttgtgggagaagttcgtgactttacctggagctgagtcaagttagagagccgagctgagcaacatacaggagtagaggaagtagcacaaaggcactggaaggccgctggatccccaagtagcccattcctgcctggcacggcagacatccatcgggggggtggccagaggagcagggggtaaaacttcacagggagaagaacctctctagctgaactttgtaaaaaattgaatggggctggaagcctcctggccagaactcgggggagggcgtgaatcaggcttgcagacttcacaggcggggtaagaactgaagcccatttctttgtcagtcgggaggcagaaagcctcaggtaagttttcaagccagattcgccttcggcctggaaacagactccgggctatcacaaggggcattgtgggagtgagacccgcctttcagcgtgcctggaagctagctttccccaacttccctgacaacctgcatgactcagcagaggcagccataatccttctaggtacacaactccactgacctgggaatctcacctccatcccccacagcagccaaagcaagacccacccaaggagagtctgagctcaggcacgcctagccccacccccacctgatggtccttccatatccaccctggtagcagaagacaaagaacatacgatctttggagttctggagccctgcccaccactggtccctctccacagtgtccggaattggtgggttcttggtctcgctgagtttaagaatgaagccgcagaccctcctggtgagtgttaacaattcttaaagatggtgtgtccagagttgcttattcctcccagtgggttcatggtctggctggcctcagaagtgaagttgcagaccttcgcagtgagtgttacagcgcttaaaggcggcacgaaaccaaagagtgagcagcagcaagctatgttgcaaaaagcgaaagaacaaacttcccacagaatggaaggggacccaagcctgttgagctgtgggctccggtggcctgcttttattcccttgtctggcccccatccatatcctgctgattggtccattttacagagagctgattggtccgttttgacagagtgctgactggtgtatttacaaacctttagctagacagagtgctgattggtgcatttaaaatcctttagctggacacaaaagttcttcaagtcccccaccagattagctagacccagagcgctgattggtgcatttacaaagttttagctagacacagagtgctgattggtgcttttacaatcatttagctagacagaaaagttctccaagtccccagcgggcccagaagcccagccggcttcacctcttgatggcactcgccagacaggactttgcagcacccagccctggcactccagcagcctagagagagctcatcccccggtcaagcccagcaggcaccggccagccgcctcaagtgtggggcccaccgagcccgcgcccacgcagaacccgcgccagcccacaagggccacacgcagccccggctcccaccacggcctctccctccacaccctgcgagcagagggagccggctccggccttgaccagccccagagagggacccccacagtgcagtggcgggctgaagggctcctcgagtgcaaccagagtggacgccgaggccaaggaggcactgagagcaagcgagggttgctagcatgttgtcatctctcaacactactacagcggatgctttctggaaagcgccatctcccagcaggaggcccatcagcacaaaaaatagagccttaaaccaccaaaatggtggaagcagtttgaaaaacaggttggcagttttcaaagaattaaaaatagagttagcatataacccagcaattccactcttaggtatatacttaagaaaaaagtttgtacgtaagagttgaaaaattctcagtgaattcttatagcagcgttattcataatagtaaaaaagctgaaataacccaaatgcccatcagctgataaatatataaacacattgtggtatatttatataatacagtattatttattgatagaaggaatgaaatagctatatatcctacaacgtggatgacccccatggagtcatcagaacaccaccatcattcttcagagttagtaaaaacaattctaaaattcatatggaacaaaaaaagagcccacatatccaaagcaagacaaagcaataagaacaaatctggaggcatcacactacctgatttcaaagtatgctataagatcatagtcaccaaaacagtgtggtaccagaaaaatatatacatcaaaatatgtgcactttaataacatagcatcaaatttataaaacaaaaattgagcaacctacaaggaaaaatgaaaaaattccaaactatagtgggagattataacttatttttcttagtcattcaaagaaaaagaagactttaaacatcaataatacattggatgttaataaaaatttactatttttgtgaaggaaataattacaaataacttcattcaacaactacagaatacagttttaataggacatattgaatatgcacaaatattgaccatataacgatttgttctacatgccaaatcttaacaaaagtcaaataactgacactctacagaaagtgttcatttatcacactgatatgaaattataagaaactgttctaaaacccagttaattaaagaaaaaaatcttagtgaaaaaataaatatattgaaattaaaatattacttattaaaactttttggattccattggtataatattaaagaggaaattcagggtcataattgctaatattagaaaataataatggtgagtctttggcaataccatcatgaacactcctgatctcatctgatctcagaagaaaataataatagaaaacagaaacatctcagtctttgcagtatgaattacaaagaaaataaaatgcacaaa

SEQ ID NO: 588086 - DNA, 4001 bp, Homo sapiens
gagttcaaacctttttcagatgagatctgtgagagaatcagagaagagattagagtgagatatggggaagctgttttaacacttattgaatgaatgagtgaatgtgtctctacatatgtacatgaatgttcagggactcaccgagggacaccaggtgactgatattttccagcatcacatctctgtacagctttctcttggatgtgtccatcatggcccactcttcctgggtgaagtcaatagctacatcttcaaaagtcagtttcttctaaaacatcacagacattttagtttagacagagaaattcctttcaatgtccggaagaggaaggctgagatgacatagctagcagctgggtatgcagaatactcagtgttttgggttccagccagttcattctcagtactaagctggtatctgcctttcagattcactcacagagatatacccactctgaatccattaaagtttactataaagaaatatcacatgaggtgtggcataatataacccagatatttttcagtaatgtgttaatcacctctacataactgattataaaattttcacttgaacattcataaataaaatgaaatttaccatgaatttcaagtaaattacagatttgtcacaaggcaaataaccatgatttactacttcttaagcatgactctgatgaaataaattatttctccagatgaaccacaggtttctcaccaatcaaatggttaaaagacctatgatgtgttttgaataatctaatgaactaatagaaaacgtgtttcctatctagcaaatatttattaaatataagtcattggtcccttattcattaaaaagttagaaagtaatgacccagactccagcattcttcagaactgaacaagctttatgcagaatataggattcaattcatatatatagtctctctaatgttatataattcaggtattcatgacaaggcttaaagacagtctagcagcacaagacaagaccgctgaggctgctatactgaggaaatcttagtccgatgattcctgtgatatgaagctttctgttctcaactttctctcggcaatccaaacatcagttatcatcgtttctcttttaaatttaccttctcactacacttgttcaaagatttaaaaagcctcttcattgttttttttctaaccagcccttataaagcatttccacagaaccctaaattgtactctatctactatattccttcttctgagtgtgcaaccataattaaataattatatttcttatatgttacttttacttaccagaaggcaaaaaggttaattaccaaaaggtaaagtgaatggggataagaataataatgacttctttagttgtcctttcacaaagtttttaaaagctcaaatacattttatcaaactcttcttttccctcaacactgcacagctcttgtccaagtcctatcacactggatttattgaactcagctgctagaacatcagactcattgttgggctgtgatgttctgctcttcactcatctctatcgcctgcattaatcacaatcctaagtctatttcaggcaacagtatagttaatgggtcaattatttccctatgagattataggatggatagaagaaaaagaaatatataaatgaaacctctcatatctttttttgtaaatagccttaataggggctggaataaagtagtgtaatattagaaattatattgataatttcggagtctttgacacacgatacccaacctagagtcctgagaaaacttaatggggggccagatacctgaaagcctcctgattgcatttggaacacccaggcagggtggattttacatcataaaaacaaacaaacaaaaaaagaataaaaatgaaacacccatgcaaattggagaaaactgcccatttgccagcaatatgggtataatttcagtagaaagaggcatcccctactcactagtgaatgcattgtcaggaactcagtttctctctgtcttcctctggatttccacttgcagacactttaggcactaagaaaagctgaggttggagaaagaacatgtgagacaccagtcttgtgcacaattttcagatcaatctgtgatgaaaagccagactttcactgaagtgtgacaccagctgcaccacagcctaaccaacagacacaaacatgcagaggcctctcctcttttcccgtggtcaaaattaagaagcctatgactatggttgctaataaagaaggaacacagatatcttgtgaatgagaacatcaaaagcacggagttttgtatgttaattggcacaagtccagatattcaattccctcactgattttaaaacacagggatccctgactccatccacatgtggaatatgatttccacctatagataaacactgggatttctcagattttattatcctagctttatgccctagcaacgtttctccaacacccaccacagccttctgaagccttactccacttttattttcactcaactctgacttttgtatttccccttggaacttggaaataatcaagtaagaatctgttttagggtggagtgtggtggctcacgcctgtaatcccagcactttgggaggccaaggcacgtggatcacctgaggtcaagtgttcgagactagcctggccaacatggtgaaaccccgtctgtagtaaaaatacaaaaattaactgggtatggtggtgcttgcctgtaatcccagctactcaggaggctgaaacaggagaatctcttgaacccaggaggcagagattacagtgagccgagatcccaccactgcactccagcgagggtgacagagcgagactctgtctcaaaaaaaaaaatctgttttaggatggggataatcaattgagggatttatttcacttagagggtcaacactcccatcctgctaatatagcccttaaaatctcctgcatcagaaattagcaggagtaccccgagtcatggtgtttctctcctgtgtatacagtcacaatcctctaggatgctcagaaaatacaaaatgacttaggagagggagaaatttagcagctcaatctgatattttactaacgtggtatctaaaattcttgcaatcatggtttatattagtctttgttagttgcaatatctctgattatcatgatacatatttgctgagaaataccgatgtccatgtatacattcgtacatagatatgtagatatataggtgcatatgtttatatgaatgtatgtgtttgagacagggggaaacatgcatgtattatttccctgctaaaaatataaaaataattaaatatattttatgtacaaatgataattatgtgtcataaacaaaaaatttactgacccatttgtacatgaagtccaggaaaaataaaaagagtaactttgtattaattgtgacattgtgcttacagatgtacatatatttccttatttaaccctcataataaccctgctgattacagtttatttaccaatttaataaatgatcaacagagtttgaaaaatatgacaaaattacaaaattagaaaatgacccagcaatacttttaattatattctgcgtgtcgctgcctcttcttgctttttgacaaaattactcccctaaccaacgttctctatgattctggggactccagtatttagaccccaggtcccaaacatcattgtgtctatttttactgccacatttaatgcacatttacagacttcaacaagcacttttcaatatcaacttttttcttattccttggactattttctacatctgttcatcaagattccagtaacatatgactccatctgcctgtcccttccatgaatgtacctgacagtacatgtattatgtagtctataattcaagcagaacagctattccttcaaaaaaataagatattagagaatgcctacaaagcttcagtgaaaccagctgtaacccttaatattattaccaagtaaactcttcctcgaa

SEQ ID NO: 588087 - DNA, 4001 bp, Homo sapiens
ccccattcccaccaaacaatggtaaatattaccagctgttatcagtccttgaagactaagcttccatttttgctttaaaaaaaattattaattctaagccaaatggcacattttttttaaaagtgtatttaagtccgatgttaccgcaagcttacaaacctattcccatggaaacaggtttggatacttatgtattatttggacgacagtagtcacgtgatcagcctttatgtataccaatgttttgcaaggttttttgtctcaatgtcttactatcaggaccttgtaacaaaatagccagtcttctcacacatcttaactcttcgacacaatgtattttatgtatcttaatacactgattttgtgggaaatcttgttttatgttaaaaaaaatcttcaaaaatggtaagccactaatttcagaagttcctttgctttctagaagttactagctattttgatatttccatgttgtgactcgtacaaagcaatgtcattagacacacaaaattatttttaacttttgcacttaggactttccctaaaatataacattacacaatagattcaacccattttccattgtcaccaaacagcaaccaaaaagaccgaagagacttaataaagacagtagtcacttgttcttattctgaagacagaaaacttaacaccaggtaaaggaaatggaataaaataagctaaatgcatgaggtaggcccctaacttctgacaacacgccccatcgatttcctttctgaaagcagaaattcaaacgaaccaaccacctgcttttggacagctcaacttaggacttgctctcaagccaacacaattttctacaaaatcgtaggcagctacaaccgctccttgattaaatgcgacaaactggagggaaaaagtcacttacaaatacctacatgctggtttttaatgcaactctcagtgtggttttccgagggggctgcaaagagggaagtagtggaagaaacgagttctaaaatgaggcgctctcgtaggaggcaacaagtaagctctgccccaaagctccttttaaaaccaacataaatgagtaacagaagaaaaggattttgggtccaggaagtaggctcattctccataaccatcggaaaggaagaggcccaggcagcgctccacatcctgaccctagcttttaacaccatcgttttggggagaggagaggaggaacgcacccacagtgaggtctccacccaacacttctccgaccccagcttcagcctggcgcaccttccttcccaaacccgcctctcccgcctcggagaccccctcctcctccctgccaccaaaggccacgcagcccccatctagccagtcctcacggaccctggaccaagacgcgcctcctggaggccgagactgcccgaaacccggcccctgcgtccaccgggagcgccacactctggcagctgaccggcggctgtcgccgggggtaaggttaccgctccgcttccgcggctggcctgcgacccggccacctgcagggcctggcaggcgcccgaactcatccccttcccgcggcccgccccgggccgggccctgccgccccccgcgacccctcgcgacccgcggcgagtcccacggtccccaccgccccccgctggccggcccccgccccgtttcccgggcgtcccgcggcgtcagcaccgcccccgctgccgctcacccgggccgggacagtcttgcgtcggagagacagtgcagcgcgagagggccgggagaggacgccggagggaaaggaagggggagcgcgcccagcaccgcttgggcctcctccacccgctcaggaggggaaacacgagagccgggagcacaacagcctcgcacgcccgccgccgccgcgcgcccgccgccgcctcagccttaggggagaccactacgcctcgtgcccgcgcacgccgcgccgctctcctcggcgcccccgccccgcctgctcctcgcagccccgcccatgtgcctttctgcggctgcctccttctggcccccaccccgctcgcacgcctgcgccctggctggtcgcgcgggccaatggcagcgcgcccctattacataagcgcgagggggcgggccctggctgacacaaacttcaggggacgtcgccttctgtccccaggcgcccctcctctccggcgcgctcggtccgggcggcttcttcacccagccctgggagccacgtgatcccggtcctggttggtgaccgggccgcggcgtgtttcacaagtcgctcgctcgctcatccactcgggcggcggccgggcctcaggcgctgcgacccttttcccgctcctcccaggctgacgcgcccgtctcggcgccgccctcctcggcaccgactgaggcgctggcccgggagcggatcgcggggccgcggtggctgagtcacattcccggagccccgccacccaggacaccgcggccccggcccccagcgagcccggcggacccagcggctctgaacgcggacgcacagcctttgttctttcacagccgccctttacctcactcccatggaaaccccaggtgttttcccaagctgggggcttttagtgagttcaagattcaagcctaagtcgtattaaaaattgctggctaggccgggcgcggtggctcacgcctgtaatctcagcgctttgggagcccaaggcaggaggatcacttgagcccaggagttccagaccagcctgagtacatagcgagacccacgtctccacaaaaataaaataaaataaaataaatagtggagcatggtggcccgcgcctgtagtcccagctactcgggaggctgaggtgggagaatcgcttgaggccgggaggtgaaggttgcggtaagccgagatcgcgccattgcactccatcctgggcgactgagtgagaccctgcctaaaaaaaaaaaaaaacaaaaaaagaaaaaaaaattgctggccaggcttcccggaggggtttagtttgactgctaacaatatacggtactgagttgctaatccttcggggaatggttaaagttctttgcgcgcgctctctctccatttacaggcagtggcagcaaactttcaatatctgacaagagcaatggcgattataaccatgattaaaattgctgaatatctggaaacagtactttagacatcagctttattgtgcatacttacccccgacccccgccacattcgtttctaattagaactactagtgacaaaggagaaaaaaaaaaagtgtttgcattggctgttctcaccttgcctgtagtgccgtttcccaagtttgcgtggcagtgcccaggaaatgttggctgaatattagtatatcccaaatgacttggactgggctatagataccacagaattgtttaaactagccaggaaggagttagctgcctattgcatttgagtggagaaaaatacgaaatgaaacatggcatgcagtgatccgggtgttcagttctccctcttcatcctcatttcagcttctctcaccttcactttttatgctctgacttccttcttgcagttttaaattactctctagtcctagattgtaagattattttcatcagggaatacgcagtatgttaaacatagtagacgttgaataaatggatattgatcaaatgaaccgagtatgtctgaagaaagcagcttttaaattgacatagcatgaagctctagcttagtcactaatagtcactgtaaccttaatggttgtgttaatctggctgatagagggatgggtacttgttggccctagaaatgggaacttcaaagatctgtgtttatctagccgtgaatgacagtagacagtggaaagggacagtgaaatttgtgtggcagagatatgtcttcttaactaaagaggtgactcctattgtgaagtaggttaatatgtcactctttaccatggcctagatgaaatatgtattcaagctagtgtttcttaagtttttgagtcataactcctttgagaatttg

SEQ ID NO: 588088 - DNA, 4001 bp, Homo sapiens
tgtattttatgtatcttaatacactgattttgtgggaaatcttgttttatgttaaaaaaaatcttcaaaaatggtaagccactaatttcagaagttcctttgctttctagaagttactagctattttgatatttccatgttgtgactcgtacaaagcaatgtcattagacacacaaaattatttttaacttttgcacttaggactttccctaaaatataacattacacaatagattcaacccattttccattgtcaccaaacagcaaccaaaaagaccgaagagacttaataaagacagtagtcacttgttcttattctgaagacagaaaacttaacaccaggtaaaggaaatggaataaaataagctaaatgcatgaggtaggcccctaacttctgacaacacgccccatcgatttcctttctgaaagcagaaattcaaacgaaccaaccacctgcttttggacagctcaacttaggacttgctctcaagccaacacaattttctacaaaatcgtaggcagctacaaccgctccttgattaaatgcgacaaactggagggaaaaagtcacttacaaatacctacatgctggtttttaatgcaactctcagtgtggttttccgagggggctgcaaagagggaagtagtggaagaaacgagttctaaaatgaggcgctctcgtaggaggcaacaagtaagctctgccccaaagctccttttaaaaccaacataaatgagtaacagaagaaaaggattttgggtccaggaagtaggctcattctccataaccatcggaaaggaagaggcccaggcagcgctccacatcctgaccctagcttttaacaccatcgttttggggagaggagaggaggaacgcacccacagtgaggtctccacccaacacttctccgaccccagcttcagcctggcgcaccttccttcccaaacccgcctctcccgcctcggagaccccctcctcctccctgccaccaaaggccacgcagcccccatctagccagtcctcacggaccctggaccaagacgcgcctcctggaggccgagactgcccgaaacccggcccctgcgtccaccgggagcgccacactctggcagctgaccggcggctgtcgccgggggtaaggttaccgctccgcttccgcggctggcctgcgacccggccacctgcagggcctggcaggcgcccgaactcatccccttcccgcggcccgccccgggccgggccctgccgccccccgcgacccctcgcgacccgcggcgagtcccacggtccccaccgccccccgctggccggcccccgccccgtttcccgggcgtcccgcggcgtcagcaccgcccccgctgccgctcacccgggccgggacagtcttgcgtcggagagacagtgcagcgcgagagggccgggagaggacgccggagggaaaggaagggggagcgcgcccagcaccgcttgggcctcctccacccgctcaggaggggaaacacgagagccgggagcacaacagcctcgcacgcccgccgccgccgcgcgcccgccgccgcctcagccttaggggagaccactacgcctcgtgcccgcgcacgccgcgccgctctcctcggcgcccccgccccgcctgctcctcgcagccccgcccatgtgcctttctgcggctgcctccttctggcccccaccccgctcgcacgcctgcgccctggctggtcgcgcgggccaatggcagcgcgcccctattacataagcgcgagggggcgggccctggctgacacaaacttcaggggacgtcgccttctgtccccaggcgcccctcctctccggcgcgctcggtccgggcggcttcttcacccagccctgggagccacgtgatcccggtcctggttggtgaccgggccgcggcgtgtttcacaagtcgctcgctcgctcatccactcgggcggcggccgggcctcaggcgctgcgacccttttcccgctcctcccaggctgacgcgcccgtctcggcgccgccctcctcggcaccgactgaggcgctggcccgggagcggatcgcggggccgcggtggctgagtcacattcccggagccccgccacccaggacaccgcggccccggcccccagcgagcccggcggacccagcggctctgaacgcggacgcacagcctttgttctttcacagccgccctttacctcactcccatggaaaccccaggtgttttcccaagctgggggcttttagtgagttcaagattcaagcctaagtcgtattaaaaattgctggctaggccgggcgcggtggctcacgcctgtaatctcagcgctttgggagcccaaggcaggaggatcacttgagcccaggagttccagaccagcctgagtacatagcgagacccacgtctccacaaaaataaaataaaataaaataaatagtggagcatggtggcccgcgcctgtagtcccagctactcgggaggctgaggtgggagaatcgcttgaggccgggaggtgaaggttgcggtaagccgagatcgcgccattgcactccatcctgggcgactgagtgagaccctgcctaaaaaaaaaaaaaaacaaaaaaagaaaaaaaaattgctggccaggcttcccggaggggtttagtttgactgctaacaatatacggtactgagttgctaatccttcggggaatggttaaagttctttgcgcgcgctctctctccatttacaggcagtggcagcaaactttcaatatctgacaagagcaatggcgattataaccatgattaaaattgctgaatatctggaaacagtactttagacatcagctttattgtgcatacttacccccgacccccgccacattcgtttctaattagaactactagtgacaaaggagaaaaaaaaaaagtgtttgcattggctgttctcaccttgcctgtagtgccgtttcccaagtttgcgtggcagtgcccaggaaatgttggctgaatattagtatatcccaaatgacttggactgggctatagataccacagaattgtttaaactagccaggaaggagttagctgcctattgcatttgagtggagaaaaatacgaaatgaaacatggcatgcagtgatccgggtgttcagttctccctcttcatcctcatttcagcttctctcaccttcactttttatgctctgacttccttcttgcagttttaaattactctctagtcctagattgtaagattattttcatcagggaatacgcagtatgttaaacatagtagacgttgaataaatggatattgatcaaatgaaccgagtatgtctgaagaaagcagcttttaaattgacatagcatgaagctctagcttagtcactaatagtcactgtaaccttaatggttgtgttaatctggctgatagagggatgggtacttgttggccctagaaatgggaacttcaaagatctgtgtttatctagccgtgaatgacagtagacagtggaaagggacagtgaaatttgtgtggcagagatatgtcttcttaactaaagaggtgactcctattgtgaagtaggttaatatgtcactctttaccatggcctagatgaaatatgtattcaagctagtgtttcttaagtttttgagtcataactcctttgagaatttggtgaaagctattgactttgcccccagaaagttcatgtacttatcatgtaacttatcctcataggtagtgtttcttaatctcagcaccgttgaaatttgggctggatgattctttattatggggctctgtgagacctggggattgtaggatgtttagcaacatccctgtctcctacctgcttatccaagtagcacctcatctccagttgtgacaactaaaaatgtctccagacattgtgaaatgttctcagggggtcaaagtctcccctgattcagaaccactgcctagaggatatggcataatggtaactttatgtgatggttagggaattt

SEQ ID NO: 588089 - DNA, 4001 bp, Homo sapiens
ggtggtgttttccaattagaacaccttgctgagttcctctagcaagtagcaatgaccacagtgataaaaataacagctcccggccattcgcggtggttcacgcctgtaatcccagcacttggggaggccgaggcaggtggatcacctgaggtcagaagttcgagaccagcctggccaacatggtgaaaccccatctctactacaaatgcaaaaaattagccaggctacttgggaggctgaagcaggagaactgcttgaacccgggaggcggaggttgcagtgagccgagattatgccactgcacttcagcctgggagacagagcgagacgatctcaaaaaaaacaaaaacaaaaacaaaaaaaaaacaccctctcccctcagctcaacagctgtgtttgcacaacctggactgggcttcccagcctggaaagcagagtcagggagaaccgtgagataggccaggaaaggggctaaagccagattcctcaaggcctcctgagccgtggtttcatgtgtaatgcaacaaagtttaatacgggagaacagaaggatattgtcatagctactttttttcccctaggcaaattaacacaggatttttttttctctgaggcaggtccttgctctgtcacccaggctggaatgcagtagtgcaatcacagctcactgcagcctcgacctcctgggctcaagtgatcctcccacctcagtctccccagtagctgggaccaaaagcgcatgtgccaacatgccctgcaattgttttaagttttttgcagaaacggggtctcactatgttgccaagactgatctcaaactcctggcctcaagagatcctctggcctcagcctccccaagtgctggggttacaggcgtcagccacagcatccggcctaagctaccttttttttttttttttttttaataagatgatgtctcgctctgtcgcccaggctggagtgcagtggcgcgatctctgctcactgcaacctctgcctcttgggttcaaacgattctcttgcctcagcctccccagagtaactgggattacaggcgtgcaccaccacacccggctaatttttgtattttttgtagagacaaggtttcaacatgctgaccaagctggtctagaactcctggactcaagtgatccacctgcctcggcctcccaagagctgagattacaggcgggagccaccttgcctggctaagctacattttataaaagatcctctgtgatgaacaaatgagaaagcagcaaaacaggatgggggtggggagaagacagggaggcgttcaggtgagagaggaagacggccaggattgggacttacagggtgggaatggcaaggaggcaaatggttcagttatggagctaacgcaccagtgactgtgtggctgggcgtgggcaggaaaggagaagaagcgaatctcgggtttctgcctcctccccttcgcggtggaatgcctgggaggaccagagggtggggtgtggaggttgcaggagctcagcctggggccggggagctttgggtgttatgaatcaagtctaagcgctcgggtctcatcggagcgatagggctggagacacaggtgtggaaagtgtctatgagggataactaaggtcacgatcgcggacggggtcggccaggaagaaaccagcttcaagaggatacgcaaccgggtcctgacaaacctgcaagtgtaaggagcgaggagagaagaggaggccgagccggaagaagctgaagaacagcccccgaatagccgagggcacgggcagcctccccggtctgtcccagcagccgcgacgctgggtctcacagccctggggcggccgcagaattagaaggtttgacagcccacgacccagggacggaggggcggcgggggacacgggcgcactcaccacaggggcgtcctccactaggatgctgcatccactacgccgcgccggtagcccagacttttacaaacttcccgagcggaagttgttatccgaaagcttccggcccctctaggagcccacgtctcggtggtgcgcgctggccttccaggccgtccaggccgcccgcctcgccccgcaccgcttgtggttccgccgcagccggcaggccccgccccggtcacagccaagcgccacgacgcccggctgatttttttgtaattttagtagagacgggggtttcatcatgttggtcaggctggttttgaactcctgacctcaggtgatccgcctgacttggcctcccaaagtgctggggttacaggcgtgaaccaccgatcccggccctcataacctaaagtcggcctaaaggtttatcctacaaagtgaactgtaacctaactggaggtgtgaacagactgtcacttgctctcctgccagtcacccagttccagccaatcaagggtgtagggtccagccctgcggggctaagcgggtgttgtccccgtgtgcggagatgagagattgtaataaataaagacacaagacaaagagataaagagaaaacagctgggcccgggcgaccactaccatcaagacgcagagaccggtagtggccccaaacggctgggcgcgctgatatttattgcatacaagacaaggggccagggtaaggagggtgaatcttctaagtgattgacaaggtgaagcaagtcacatgattacaggacagggggcccttccctcttaggtagcggaagcagagagagaaggcagcataagttagcattaatcaaagactttaagactttcactatttcttctaccgctatcgactacgaacttcaaagaggaaccaggagtacaggaggaacacgaaagtggacaaggagcgtgaacattgaagcaccacagggaggggtttaggcctccggatgactgcggccaggcctgggtaatatccaacctcccacaagaagctggtggagcagagtgttccctgactcctccaaggaaaggagactccctttcgcagtctactaagcaacgggtgacttcccagacactggcgttagggcttgaccaaggagccctcaagcagccctgatgtgggagtgacagaaggctcacctcttgccttctaggtcacttctcaccatgtcccttcagcacccgaccctatatccgccggttattcctaggttatattagtaatgcaacaaagagtaatggtaaaagctaatgattaataatgtttataataatgattgataattgttcatggtcatctctatatctaatttgtattatgactattcttattctaactattttctttattatactgaaacagtttgtgccttcagtctcttgcctaggcacctatgtaatactccacccacacaagggtggccaactgttcaaacctagacacgcctttctatagattccaggtcttaggtaatcacttaacttattcaaccaattgccaatcagaaaatctttgaatccacctatgacctgaaagcatccaaagtatagccaagaaatatatttaaaagtaaaataggccgggcacggtggctcccgcctgtaatctcagcactttgggaggccgaggcgggtggatcacgaggtcaggagatcgagaccatcctggctaacatggtgaaacccgtctctactaaaaatacaacaaattagccgggcatggtggcgggcgcctgtagtcccagctactcgggaggctgaggcaggagaacggtgtgaaacccagaggcggagcttgcagtgagccgagatcgcgccactccattccagcctgggcgacagagtgagactccgtctcaaaaaaaaaaaaaaaaaaagagtaaaatattttgatttcctttatctgtcatgtgacgttatgctagagtcaggttggaaactaagccaattatatagggttaaataaaacctatctgatgacattttatggtttgtagggcagactccccaggccctttagataagaacttgagcaagagagaaaaagatcagtttagtcctcac

SEQ ID NO: 588090 - DNA, 4001 bp, Homo sapiens
cacctggaggacatcgtgtaagtgaaataagccaggcacaggaagaaaaacaccgcatgatctcatttacctatggaaacgaaaaaagtagagtgtaatgatggttaccagagactggttactcagggataaggaaaagggaggtgatcaaagggtacaaagtttcagttaaacaagaggaataacttttagagatctgctgcacaccatggtgactatagttaacaatgtatacttcaaaattgctaaaagactagtttttacacgctgtcatcacaaaaaactaaaatcactatctgacatgatggatgtattatctcgatttaatcattccacaacgtaaatgcctatgaaaatattacactgtatcccataaacacatacaattatatatgtcaatttttaaaaagagaataaaaggatacgcagaggaacagtcaaaacattgttttcaaaatgatatagtaaataattctctatattctccccaaagacattcttttttaaaaactctgtagcacagttttttttttttcttttttagacggagtcttactctgtcgcccaggctggagtgcagtggtgcaatttcggctcactgcaacctccgcctcccgggttcacgccattctcctgcctcagcctcccgagtagctgggcctacaggcgcccgccaccaagcccgggtaatttttggtatttttagtagagtcagggtttcaccgtgttaaccaggatggtctcgatctcctgacctcgtgatccgccctcctcggcctcccaaagtgctgggattacaggcgtgagccaccgtgcccggccgcacagttatttaatcaatgttattttttcacatcctgattgacaaggtctgctgaaagaacatctgttttataaaggctgctcaatgcctttcctcaaaaagctcacttgggcacaaacctatctgtgcctcaagaaaaacaactatgtggtttgtcctagggacatggaacttgcagcctattaacataaacatttgcacctttacgatatattagtattttcccataatgagcagctatttggagtgtaacaaaaaataaagggaagaaaataaccatttccagcatttgttttagggcattatcagtcaacatttgagaacaggcactaggttaccaggcaacaccacaattgttagtacgtttaccaccaggcagcacccaatgagttagggcagaaatagatctctgacgtctcactccttttggaggggcgagggtggagagagctgcggggaggggcaatccaggctgcaagttccgcgctggagccgcgtcctcccccgccccgctcgcaaggtctgcagaagcgggcactgggccgcccacgctgggaaactcacttgtaagaaactcctggggattttggccagatcctctacgtattccttgcagatgtaacacaggaaatgctgaaagccaaaacggcagaaagggcaagttagtaaagcagcaccctcgggccccgaaggatccctgtacttcgccgtgcgtgacgcgagcaaaggcgacgcccgcggggccgggaccggcggctcgggcgcccggcgcgtgggaagcgggcctcgccctcgccctctccctgccccgccctagttgggaagcggccgcgactgggcaggctgccttcccgtttccgtcctaagaagcaggaggcgcggctcgcatcccggcagcctgcccgggaccctgggccgcgcttcccttccagccccgccgcccgctcacccgcacgaacaccaccacggcgcggcgctcccggaacagcgcgccgaacggtacccgctgcccgcgggcgtccagcaccggcagctcggccacggcggccgccaggggctgcccgctgtcggggccgctcggggccgggaccagggcggcggcgccgctaacctgccgcgtgaccggggccggcgcggccatgacgcggggcggccgagggcctgggtccgctctgtcagcgcggaccggggcggggcgcgcagaggttgggcgcggggggcggggcggggcgtgcagaggtggggcctggcaagtcacggtttccgcggcgcggcgcgggcctgggagctgtcggagtgaaccccacgggcggttctgactcagctctcagggtaggggacagagagagaaagtaaggtccgtccacggcgagcaagcattattgaggaagaaagccgcccgcgccctccatggccacctgagcggatgttctcacctattcgagaactaatgggtgtatgtgtaaaaggtgggctagggccaggcccacgttttgtaaacacacaggccgggcctgtaatcctagcgacttgggaggccgaggcgggaagatcacttgaggccaggagttcgagaccagcctgggtaggtaacagagggcaacgccatctccgttttttaaaaaaataaataataaaaataaagaaataaaaggtgagctgggtgggatgaggatgatgaagttagatgacttagcagctgttttgtagaaatcccacacttccaattcagtttctcctggggtgggtaggcaggcatagggaaatctggggatctcagcctttgtgagaccaaactggccctggatttagaggttcatctttctctggggtttctcatgggtgctaactgtgtgtccaagatttccagagcaggaccagataacattcaggctctttgtcttcataagtttactcactcttgtgtatggatttggggttcagaaagtacatcctttatctatggcctttgttgagctgaagaatatttctggggcggagtgctaggcaggtctatgtgactgatgtgactctgccacaaagtgcaggaaagggggatgctgcatcctctggctttcacctgtgtgaagattttatactttattgagcacacattaagtgctctgtttgagaagctctgcagcgtgtttacaaaattttaagcatagatctgtttctaagtcaagatagtttctttctgagacagggtgtcgctctgtcgcccaggctggagcattggcacgatcatggctcactgcagcctccacctcctgagctcaagcagtcctcctgcctcagcctcccaagtagctgtgatcacaggcatgcaccaccatgcctggcaaatttttttttagatttgtttttgtagacacaagggtctccctatgttgcccaggctggttttgaactcctgggctcaagcaatcctcttgccgtggtctcccaaagtcctggggttacaggcatgagccactgggcctggccaggagctttatgagtttttggaaataaatgcatgaccaaagtgcaggctgatgaatagcactcacaacaggcagtttgccagatgtcaccaaatttattgtaagcagtgttttggtaagcagaaattgatatacagataagaatggtggtattttggcagctctgattaattgctggtatcaatgaatgaaaaattttctttgacattactgctttcagtgtcatatttcatgtgaaataaattacaggttagacaatttcattttgaaatacaaagagccacatgacttagtttttgcagagtgatgaactcagacatcatcaaaaaatagttttgtaggaggaatagtagccatgcagaaatgcagaaattagaaggtattgtctagggagcatcagtacatgactgaatgagacactgagagatgaagtgcctgtgacagttatcaacttgcttctcagctccaaatcaacccttcactatatactctgtgacaatggacagacttcctctaagcatctaacctttgcaatgggcaatatattaagcattttcaatagacagtgttggcaggacattgcaggaggaaggggatttcaaatagcctcctgagggtagcgggtggggctctgcctctggcactttaccaggatacacacttccttggcaacactgcaactattggctgtt

SEQ ID NO: 588091 - DNA, 4001 bp, Homo sapiens
aatggtatcagtgctgcaaaggcaggccaattactgccagtgccagacaacttttttctttgtttatttttaatcttatttctttgcttctttttgataaaagatatacctaaagaggcacctacacataaccctggcaccgtccgccgccccaagaaccttcctgctttaccaatggcctgggagttggcaaacacgctaacaaaaaaaaaaaccaaaaaaacaaaaaaaaaaaaacaaaacgggctttcgcctcaacctcatagttcctccccgtctgcaaccaccggtcttcaccggattcacagtcggaaccgcgagcaaagacacctagtagagccggccgattcctaggtcctccggccaggaggcgctgcgggccagtctccgggggccaccgcagcccgcgcgcccagcacccccaccctcacggcagagcccagcccagccccgcggcggagctccgagttctgcgccgcccgccggggttactcccggtcattccacggcaccacctcggcccagcttccccatctgcgcccaggcagaagctgccccgagagaccagcagcaacggtctggaagatggggctgcagggaacgtgggagagggaggattgggcaccccacctccgggtctccgcaggctctcctaagtcttgtttttaaaagaaacaaaactcggccgcgcgcggtggctcacgcctataatcccagcacttggggaggccgaggccggtggatcacctgaggtcgagggttcgagaccagcctggccaacaagttgaaaccccgtctctactaaaaatacaaaaattagctggatgtggtgacgcgcctgtaatcccagctactcaggaggctgaggcaggagaatcgcttgaacccgggaggcggaggttgcagtgagcggagatcgttccattgcactccagcctgggcgacagaccgagacttaaaggaaagaaaaaaaagaaaaagaaaaggaaacaaaactcgtccgcgctctgcgccagggacaccagctcagctgagcgcacggagactgtaggcaggacctccctacccctcaggtcaaacaaagacccaaggcctctagtgagcaatagcaccacggaccgtttgggacacctccaactcgagttcccggattcacagtccgggactgtgccgctccagtcccggggagcatatagccaattcccaggtcagaacagaccagcttcttaagaaccgagtgaagactcagtgctggcatttgtctccgtaggtactggccgacctgcaaccagaagggtttctagccagctcagggccctccgaacaaagcagcgctcggtgccggacctgcagctctccccacccggcagcagcgccctcagcacgcccgggaacccccgacccctctgagcccggggtactgcgcccgggtctccacgcccagagatgctccccggtctccaccgtcgggcaagccccaagcgcagcagcgcagagtcctggggtcaccagagctcgtactaggacatcgtctccccatttaacaccgcctccggtcccatctgagttgcaagtggtggggatgtggggctccggatcaaagtccccgaaaccgagcacttcccgaagcctccttggcctcgaaacaaaacaataacgcccaagtaagtcactggagagcctcttacctgttttccacttttgtgtttgcgtctctttctcctaccccttgacaagccttccggagaaggggagaaaacagaaccggggaaaaaacaaggagcaaagcgccctgagaaccggctctgttggtgcgcggagctccccgccctgccctgccgcagcccgggagagaagggtcggctcggctctgcgggtcccggccccactcactctcgctcgcaattacggggtttttgccgggactagttccttttatagattcggctgcaccgagcgcagaggttactatcggtcaaagcctgtgctctccctcctccccgccccgttcccggcctctgtttatgtagttcagtcactcagcagaaagcacgtggagccggggcccgccccttaaacgggcgacgttcagccgcccacgacacatctagggagttggggggaggtgggtggggtgggggtggagggtacagcaggtgtcttagggtccgcggtctgcgtccccttcccccgcccgggcccgccggcctaagacgcgcgggaagcgctgggctcggggctgcgccgcagactctctagtccacgttcccggcagccaagggcaccagtggaatttgcttcctctaaatcctgctttccgcaatttttttttcctttgttagtttcctcagccggagggagggattgggggagagagagctctaggctgaatctccctcaggacgccaatcattttgtcttgtcttttgtttcctttcaaaggcctaggctggggtgaggggaaggcggacagtcctctgggtaatgggctgcttttgttttccccccacaaacctggactttgatttttgataggcgacctactgccttggagattcccagcctgagctccccaggtccctcagaggacccgagaggaacatcttactgcttctcttcataaattgagaggaaggaggccacaaaaacaaaaaaagaaacaaacaaacaaaaacacagaacaatatggaccagcccccttttaatttcattatattgatcagcctccctgtgataaaaacacaggacttgtatttagtttgtatacatttgtgaagtgcagccagagaattgcagtcgtgtaaaattatgtagccactccagacctccaacttatctgtttgcctttggctgtaggggagcaaaactacccaaaacactggaggggcaaaaaaaaaggcaagagtaggaatgcaggcctacacaccatatgtctaaatatttaagtcatccatcaagccaacaaactaaatgtcaccttattctggccaaaactcaggtcaaactgtgaagagtctaaatatgaatctgccctgaagggcagattcatagaagactcaggacagacccgtagaagaggcccaagcaggccctggaagtgcacgtggaggccacaaggtctcctaccttgacaaagatacctttgtagccaccttgaagggcagattcacatttagactcttcacagtttgacctgagttttggccagaatgaggtggcatgagagagctgccccaagcctacttctcttcccacctccagctccatcatattccagaactcccaccacctgcatacagacattcagctgcacaagccccctccatgctacagtcaacaggatctccaggccacggctcaagcccaggtactcacatcagtggttctatcaacactcaggacagacccatagaagaggcccaagcaggccctggaagtgcatgtggaggccaccaggcaaggaattctggagtcccaggtactcataactctgggtggcatggcccctttgcaccatggactgtttgcccttagaaagggatggatctgagctgggcgcagtggctcatgcctgtaatcccagcactttgggaggccaaggtgggcagctcacctcaggtcaggagttcgaaaccaacctggccaacatgatgaaacccagtctttactaaaaatacaaaaattagccagatgtggtggcgagcgcctgttatctcaggaggctgaggcaggagaatcgcttgaacccgggaggcagaggttacagtgagtcgagatcatgccactgcactccagcctgagtgacagagcaagactccgtgtcaagaaaaataaaaagaaagggatggatctcagaaaggccagagatgagctttctaaagcccaaggcccaggagagcggacccccttgcctcagtcaaagaataaccttggtcaataaattgggttttggggtcaaacttgacaaccacatgatgagcaatttacgtaaagtctttctg

SEQ ID NO: 588092 - DNA, 4001 bp, Homo sapiens
ggtggagctctgcccagggtgcacccctgccccagcagggcgcatggcacacagggcaaacctctgtcatccaagcttggccccaagagtccagctctgatgtccaagatccttcccaggaaagtggggacccagcaggagtgtgcccagtgtccagccagccccagccccacatcacaagcctggcaaggactcagcctccctgggggaaacagttccccacctgctccagccatgggctaaggacctccactgtggcccagtgggcctctgggagccctgtagggtggggacccaaaaaggtcctggggggcagcccaaaccagcagctgggagtcactcttgcggtcaggacagtgcacacctcccacctgcttgccagctgccctcataggccacactcccttccctgagcattgtccccactggaacaggggccaccattccagcctctgctcccaagcccagtggggaccttcctgacaaccacccccggggactaatactaatgcatgccacatgccacatccctgttcccttggccctgctctgctgtccccagtgactcaatgccaggggctgcaggcctgatccatgggaccccactcagccagctccaggtgcctggccagggcatgtacctaacccaggctccccgccaaggccaggtgcccaggggaattctgccagccatggtgatgatggccaccccagctgactgcagcctgggtttcctgcagtgcatgttgaaagataaacaggcacggactggtgcagcccaaggggtcccgcccgggccctggctgggcaagaggatgtctgccttaggcccccacctgctctgagccctggcctggacaatcccaagggccttcagaaacctaagctggtccaggcctgtggcctgggaggtgtcccttcccttcccaggctggagccaagctggccagctgggggtatggcaggacacccatatccccaagcccctcgctccacgaaggacttctgtccctgacagccatgtgtcctgcaccctcaggtccactggctgcccaggcagtgctgggaaagccggggttcacagctccaaacagtagacccagcccccagagcaggtggggggaccaggaggcaacagagtggatcaggctcggggagaactgaccccaaaggacaaatgggtgcagagattcaggctggccaaggctggcacaaggacattcccagtggcgagagcatgagcaagggtcacggatgtgccaggaggggaggcggagagatgcctgggaccaacctctatggcaggccgcggcccaagggcaggggaggggtggacggagggaagggacagggtctcctccgggaccccagggaggctgggcccaaggaccatggagcctcgcagctgaatggagccccccaggcctgccttctgtcctgggaaccagggcctccctcgagccagagtcctgagcgccgcttgccccccgcccacagcggccccagcgagcgcgctgcagagggcgcgggtgccgtgactcagccgagcaccgcgatgtcagcggacgcgggaccggactggacacgaccgagccacctccccggaggccgcagcgccggcaggcgagggcagggcccggcggggagggggctcgggcccgcgccgcccccagcgcccgccggggtctgcgcgcgcccggccgtccgcacgtgcgcgcggggagcgcgcctctggccgcggtgcgcgcggcctcgggctgagggcgggcgcgtggggtgggctcaccgggctccggcgtttgagcgtcacgttcttccagagcagcagctgcagctggtgcaggaagcccatggcggggccacgctccgccgcctcagcgccgcggcccgctcctctgcgcgccccgccgggccccgcagcccgccgcgccgctgggcatcgcccgcgcgggggcggggcgctcgggcgtccgggacccgatccgcgctggctccgccccggcggccgcggcgacagcgactctgcccgcgccccgcccgcccccgcttaaaggcgccgcgctccgtccgcgcccgccaggaggcgcccgccgcccgcgccgcgcccgggaccgacccgggcccgagaccctgcgcgcgccgccgccgggaagcctccgggccgcccctcgccgggcgtcacgcgacgcgcccacatcgaatccgagaccccggcttagccttcgtaggccgggggaccctcgggcgctgcgctcttctcccagaggcatccggctgcgcccaccgcgctggcgactctgcagaggcgccccaagccttcactgtccccggggcgcgccgagcggacgctggcgaggggccagctcacccccgtaagggtctcctgtgtgctttgtaaaccagcacttggagtccaggtggtgcccacctggaagggaggcagggcggccaggtgggtccgtcccgcgattccgagcagccagcggaaggggggaaactcgaggccccaggaacgctcgccgtgagcggagcaggcaggggaccgaggcggcccctgctgcacgcggctcgtttttctccccatattcgggcgagtctggtctctgcacagggagttcgggatcaggcggttctgcggctgtggcttggcacctgctggggcgccccgggaggtggggcagttcctccgcgtggcctgtagagagcgacagaggacaggctgaccccatgggtggctctgacggcgcttcccagactcagtttcccccctgtgaatggggtggagtagcgctgtgtggtgtccagtgtcagggcgcacatagaaggcgcatcctcaagtgaatgaagacctccgaggccacagctccccactcctcccagctcctttgcagcaggaaggtgaccctgggctagtgagtgagggatcagcttcccaccccagcccgcagcctcaaggcacttgcttttctctgctcagtccacagggctgggtcagggcaggaagctaccagcaggtctttcccacaagccacagccatgggtgaggggggcttcctgccctcaacctgcccacccctacctggggtagggacaagccctgtgccccagccccgggggcttagcctgttggggccctggtcagcaccacccgtgggttggcctctctcctcctcgccccactctccaccgtccactacaggggctccctggctgcagccgcatccccagtgcctccccagcactggccaccagagggagctacaaggcacaggtcagaccctgtcaccccagacaccctccagcctgcgggcctgggagatgggcgatttcagcctggccaggcctctgacgtccgttccctactcttccccaaccttggcctgttttggtttttgttttgagacagggtctcattctgttgcccaggctggagtgctgtggtgtgatcacggctcactgaagcttcaacctcctgggctcaagccatcctctcacctcagtatcccaagtagctgagaccacaagcgtgagccaccacgccctgctaattcttgtatttttggtagagatgagatttcactacactgcccaggctggtctcgaactcctgggctcatcgccttggccttttgggggacacagaaggctctctgataaggggccgtctggcggaggctgtaggaactggggtagccagtgggcagcccggcacagggagggctctcaggcggagggtgagcaaaggcccagaagtcaggcgacaggaccccccgtggggaacaagcagccccatggccgtgggggcgacatgtcaggggagggcagatgcaggctctgtggccctgcacggaggtgacccatgagacactggccagacccacgaggcactgctcagatgtttattgtccaccgccctccctccctgagcccagaacaagctggtttgctccccgtggtctcctgggccccgccccagcctacacacagggacctcagaacta

SEQ ID NO: 588093 - DNA, 4001 bp, Homo sapiens
catgtacctaacccaggctccccgccaaggccaggtgcccaggggaattctgccagccatggtgatgatggccaccccagctgactgcagcctgggtttcctgcagtgcatgttgaaagataaacaggcacggactggtgcagcccaaggggtcccgcccgggccctggctgggcaagaggatgtctgccttaggcccccacctgctctgagccctggcctggacaatcccaagggccttcagaaacctaagctggtccaggcctgtggcctgggaggtgtcccttcccttcccaggctggagccaagctggccagctgggggtatggcaggacacccatatccccaagcccctcgctccacgaaggacttctgtccctgacagccatgtgtcctgcaccctcaggtccactggctgcccaggcagtgctgggaaagccggggttcacagctccaaacagtagacccagcccccagagcaggtggggggaccaggaggcaacagagtggatcaggctcggggagaactgaccccaaaggacaaatgggtgcagagattcaggctggccaaggctggcacaaggacattcccagtggcgagagcatgagcaagggtcacggatgtgccaggaggggaggcggagagatgcctgggaccaacctctatggcaggccgcggcccaagggcaggggaggggtggacggagggaagggacagggtctcctccgggaccccagggaggctgggcccaaggaccatggagcctcgcagctgaatggagccccccaggcctgccttctgtcctgggaaccagggcctccctcgagccagagtcctgagcgccgcttgccccccgcccacagcggccccagcgagcgcgctgcagagggcgcgggtgccgtgactcagccgagcaccgcgatgtcagcggacgcgggaccggactggacacgaccgagccacctccccggaggccgcagcgccggcaggcgagggcagggcccggcggggagggggctcgggcccgcgccgcccccagcgcccgccggggtctgcgcgcgcccggccgtccgcacgtgcgcgcggggagcgcgcctctggccgcggtgcgcgcggcctcgggctgagggcgggcgcgtggggtgggctcaccgggctccggcgtttgagcgtcacgttcttccagagcagcagctgcagctggtgcaggaagcccatggcggggccacgctccgccgcctcagcgccgcggcccgctcctctgcgcgccccgccgggccccgcagcccgccgcgccgctgggcatcgcccgcgcgggggcggggcgctcgggcgtccgggacccgatccgcgctggctccgccccggcggccgcggcgacagcgactctgcccgcgccccgcccgcccccgcttaaaggcgccgcgctccgtccgcgcccgccaggaggcgcccgccgcccgcgccgcgcccgggaccgacccgggcccgagaccctgcgcgcgccgccgccgggaagcctccgggccgcccctcgccgggcgtcacgcgacgcgcccacatcgaatccgagaccccggcttagccttcgtaggccgggggaccctcgggcgctgcgctcttctcccagaggcatccggctgcgcccaccgcgctggcgactctgcagaggcgccccaagccttcactgtccccggggcgcgccgagcggacgctggcgaggggccagctcacccccgtaagggtctcctgtgtgctttgtaaaccagcacttggagtccaggtggtgcccacctggaagggaggcagggcggccaggtgggtccgtcccgcgattccgagcagccagcggaaggggggaaactcgaggccccaggaacgctcgccgtgagcggagcaggcaggggaccgaggcggcccctgctgcacgcggctcgtttttctccccatattcgggcgagtctggtctctgcacagggagttcgggatcaggcggttctgcggctgtggcttggcacctgctggggcgccccgggaggtggggcagttcctccgcgtggcctgtagagagcgacagaggacaggctgaccccatgggtggctctgacggcgcttcccagactcagtttcccccctgtgaatggggtggagtagcgctgtgtggtgtccagtgtcagggcgcacatagaaggcgcatcctcaagtgaatgaagacctccgaggccacagctccccactcctcccagctcctttgcagcaggaaggtgaccctgggctagtgagtgagggatcagcttcccaccccagcccgcagcctcaaggcacttgcttttctctgctcagtccacagggctgggtcagggcaggaagctaccagcaggtctttcccacaagccacagccatgggtgaggggggcttcctgccctcaacctgcccacccctacctggggtagggacaagccctgtgccccagccccgggggcttagcctgttggggccctggtcagcaccacccgtgggttggcctctctcctcctcgccccactctccaccgtccactacaggggctccctggctgcagccgcatccccagtgcctccccagcactggccaccagagggagctacaaggcacaggtcagaccctgtcaccccagacaccctccagcctgcgggcctgggagatgggcgatttcagcctggccaggcctctgacgtccgttccctactcttccccaaccttggcctgttttggtttttgttttgagacagggtctcattctgttgcccaggctggagtgctgtggtgtgatcacggctcactgaagcttcaacctcctgggctcaagccatcctctcacctcagtatcccaagtagctgagaccacaagcgtgagccaccacgccctgctaattcttgtatttttggtagagatgagatttcactacactgcccaggctggtctcgaactcctgggctcatcgccttggccttttgggggacacagaaggctctctgataaggggccgtctggcggaggctgtaggaactggggtagccagtgggcagcccggcacagggagggctctcaggcggagggtgagcaaaggcccagaagtcaggcgacaggaccccccgtggggaacaagcagccccatggccgtgggggcgacatgtcaggggagggcagatgcaggctctgtggccctgcacggaggtgacccatgagacactggccagacccacgaggcactgctcagatgtttattgtccaccgccctccctccctgagcccagaacaagctggtttgctccccgtggtctcctgggccccgccccagcctacacacagggacctcagaactatggacgtggcagggacccgtgcctgtgtctcggggaccacagggcctctgctaccgaggaagctcggggtcccaggtttggcccccacaaacttcaggctggggtgccccccagccccaagggccctgcctttcaccctcttccagccaggccttcacccacccaagatttgttcagggtggggagggtcctcggcagcctttcccctcccgtctgccgcagcaggcacccgttacctccctcccactctcacctcctctgcatgctccagtgcccacctgcaccccccacccctgcttcctgacctctgtgcccagcctcccgttagcccgctgcttgccggtaagggccggatgcctggtggtttgatttcgacacccagcccttccacccacacccacctcccccggccagcggatctcaggcctgaaaccaaccctcaaggtcctcatagacttggctgcggggtaggtgtgggtagcggtcacagatggcacagaaacgttcccgccagtcggtgaacagtcgcacgcggagcctgtcacgccaggcaaagaagcgttggtatcggctctcattcatgccagtgaggaaagccgccagctctcgggctgagccaaagtcatccacatgc

SEQ ID NO: 588094 - DNA, 4001 bp, Homo sapiens
ggagaaaagagaggtcaaaatataggtgaaggtgccattcatttccttctggatttcaaatgatatgacaattactgcacaacagagatttttacctctgctgttccttaagtaacacgacccctattctccaaataaaaacttaccaacaagttgagcagtctcaaattagaatactagcaatcatgacaattttcaaaatactggctatcattagatgtcacccaactgaaattcatgctataaacatatgtagagaaactctttacggaaaaaagttcattttaatgtaaatttccctgttaatctaaacagattaacgttattacaacatgtatctggctttctactccgactcattaggtattatagtttcatatgttggcacaagatctccaaagatttattagaggcataaaaaaattccaaatgaatcatctatagatcaagcatcatatatcacaaaaagtattaaacaggaacacatttcataaacagcgaaatttaaaggtcaccctctgtattccgttattcatccttttgcttaccaaatctacttcacactgacttaaagcatcatttacaaaaaattctcttctggcattggcagagatctcaccaaagatcaaagatctgaactttttttttttttaaacaaaaaccccaggttaaatacactctttccttcacgagagcccccacacagtacaatctaatttgacataactttgtttcggggttaaaaaaaatcccaaacaaaacctttaaattttccaattcaaaaacgattcctgataagcctaccttagagttcgaaaacaaataagattaaagcccaaccatctaaagaaaaagaaccctacgacagccccaccggaatacacaaatcgccaagccccgtgcagattcaatctaaaatcgcgcccgacagagatataaggacattcaggagaaagcttttaggcacccgcgaatctctcagtgcgccagtgaggggaatgggaacctgaccccatcttttcatccactgagagaaaagcaaaggaaatgaaatggaacccttctcttcaccgaggaggaccaaagaccttcttagagtgtcggtcggtcctccctcccccaccccctgactccggccgctccacggaccgcagggactgtcctaccgctccccttcacgcaaccatcagagaatcctctcaaaaacacagacccgatgaggagtggcttccccgcctttcccctgtgccgagaagggatcccggtcgccaacaacaaagacgcttcccgctcccctccccccgccggcccgggctcgtccctcccgcgctgcggctcccggcctagcgccccctccccgagccgggctgcggcgtccccaaaccccgaggccgcacgcacctgcacctgagcggcccgggccgaagcgccgggcagaaggggtcgagagagaaccgcagccgacgcgctgtcctccacaaggcgagatccgcgctccgggcgccgtccgactctctccgcctgcagactggcccgacagaggagcggggaccagggctacagcccccggcgccggggcgaagaaggacggcggcgccccaggggccccgctcacgctcccgagtctcgcctcgcgccggccctgctcctccacaagagctcgcgttctgctgactaacggccccggtgcggggcgctggagcggccgccgctgcccgtcggttgctctcgggcctcacgtcccgcgcggccgtggtcgcagccgccgccgccaccgcctccctttctggcactgcagacgccacccagacctagccaggtcttccttctctttaatcctgctttctttgctcctcctcagcctgccaagcgcgaggctcgttccggtagcgggaggaagactggaggggaacggaggggacgagcacaatccccactgagccaggagttggccactgactggaggaaggtgccaaagctgaccccggctccagcctactagcgggcggggggagagacggagcccagccttgcctcacttccaccaatcagaggccgcccggcagggtgggaggcgctctgagctcaaggagaggctgagctcgctcagcaggaggcggggattgcggaaaagaagaaccaataggaacaaaggttccccgcccctttgatttgatggactacacattcgggccaatgggggaattctcatttcgaagaaagtgggacttgttctccgggtttgagaaagaggctgcgcggagccggaggggtcgaggctgcgccgcgtggagtggcttggcttaacagcagggagggcagagcgatgctctttgacctcccagaagagtcacgtgggctgacccagagccggggcggaaaggctgcgtttgtttcttccgggtcattgacagaagcgtcaattcctgggagtagttcgttggttttctttcccctcatccttttgcctgctcccggcgaggggtggctttgatttcggcgatgagctcccagaaaggcaacgtggctcgttccagacctcagaagcaccagaatacgtttagcttcaaaaatgacaagttcgataaaagtgtgcagaccaaggtaggaacctgcctgttgcaccgtctttgactccaggaaggaatggctcactggagaggggagagaggaaatgagaggagtcggctggggcgagtgtggaccgcagcccagagttagtcttggctgcagtgcaactctttctaaaatgttattctcacgccctttctttgacctggacatgttgtctcctggtaaatatttgatggtcagcacacttaactaattgcacagagtgaacaggaccctaatgaaatctaaggtgcagatggggcagttacgtcgttcagcgttcccatctggatcacattagcagagggaaacgaggattgtggcatgagtggctttttcaaattttacaccaagtttatgcagctacgatttttttttccaaaaaccccaagcccatagaggaaatgtgaatgattaagctgtcttaggctgtcctcactagtattgtgtgaaatttctgttttgtaacaattgttttgaagataaaaatatttggttaatgtaaaaatacttgttttgctgtttatctttagcaggacttctgtaaagtcctgctaaaaaattcagactgtctagatagccagaggacttgggttgtatataagtactaatttgcaggccgggcgccgtggctcaaagtgctgtaatcccagcactttgggaggccgaagcgggtggatcacctgaggtcaggagttcgagaacgacctggtcaacatggcgaaactccatctgtactaaaaatacaaaaattagccgggcgtggtggcgggcgcttgtaatctcagcactttgggaggccgaggtggtgggcggatcacctgaggtcagaagttcgagaacgacctggccaacatggcgaaactcccaatctgctaaaaatacaaaaattagccgacgtggtgacgggtgccggtaatcccagctactcgggaggctgaggcaggggaatcgcttgaaccctggaggcggtggttgcagtgagctgagatcacatcactgcactcctgggcgacagagcaagactccgtctcaaaaaacaaaaacaaaaaactactaatttgctctttgctgtgaatctctctccctgtctccatagctgtatggagagaaaatcattgacaacaggggcatattaggggccagcatcactcagataaacctaatattcacaaaagttatggagctcaaatttactaggtgtgcggcttgagtgagttgtataatatttaatttctctgagccttactttggtctcaaatgcaaatttgtcaggattgttgggaggcgaaactatatgattatgcataaatggcctaggtcatagtaagtgttcaataagtgattaatttcccgacattgattgggaaagcaaagtcatctgtttt

SEQ ID NO: 588095 - DNA, 4001 bp, Homo sapiens
ggaaaaaataagcgatgtattaattgaagatgatttggaatgctcagacatcaacttttagggacaaataaacaatctccaccctccaaatgctaggctctgtgagcccactccacctagatgagccttctctgggccattcagccccctggaatcccagagacagaagaggagtgaggtacacaaactgtggcaagaagggcaaacaggtttcacccacatcactagtgcgatctgcatatgtgactccaagcaggccttcagggtagagtcagaggttaaggaaagaaaaataggttagaaaataaatgaggcctgtttatttctcctgcttttttaaaaagaaaaacatggcattctagcagaaatcctacttgatctaaagtgagcttcacatttctttctactcttttttttttttttttttttttgagaccgagtcttgctgtgtcgcccaggctggagtgcagtggcgcgatcttggctcactgcaacctccccctgccgggttcaagcaattctcctgcctcagcctcccgagtagctgggattacaggcgtgtaccaccacgcccggctaattttttgtatttttagtagaaatagggtttcaccatgttggccaggctggtctcgaaatcctgacctcaaataatccacccgtctcggcctcccaaagtgttgggattacaggcttgagccaccgcgcccggccacatttttactcttatattcttagttgaaaacaacagagaagtccaagtgccactccatctctgaagcacagatagcctttctgctgaaggcaatggtctgggagcaccagtctcaaatcagatcaatttcatacccacctagaagctacgaaagtgaagacccataacccttaatttactttttttccatttataaaactaaagactacaacaggaaagaaaaataaaataaaacagatgtaattagagaaggagagtaggtagaaagaacgcaaaagtgaagccctcctggccctgagcttcacttaaggaaacgaacatgacaccccagtactctgggggactccttggaaacgccttcttaaatgggctcccctcccctgaaaagagagcgaattcctaagacctcttcgtggtctgtagataagatgggggtgggggagatggaaagatcacttgaaattctgtatccataaatggtagagtggtgctccttgtgtacatgatgcttaatggaaatcgcatgttttcacaaacacgggtcgatctttttaacacacagtcccaattaacggtggaaattccacaacgtgggatcccagggatgttaaggcctggcgagttggctttctcaaactttttcgggggagcccgcactgtggggccccggacgccgccgtcaccatccggcgtggctctaccggggctggtgccggggctgggggccacgctccgccggcggcgcctaggggccatcgcgagaaagagaaagagacagagagagagaaaaagagagagacaagagaagagaaaagagacagacacagagagaaagaaagagagacagaatataagagaactgaagagaagagaagagaagagggaagaaagaaaaaaaagacaagacccggggagggcgcaggcgggagcgcgcgggcggcgaggcctaggaagggcccagcagcagcgggagggcgcgcggctactcagcccaacccgtgcggcccgggcttaccttccagataacagctggaggacgaggacagccccttcttggatttgcagcccaccagcttcaggcagatctccaacattttcccgcgccagcacgtcgggggccggaacccctctcccagctcggtccgcgggcccggctcaggcccggctcggcccgcgcgcccccccggcgcccccggccccgccagccgccctcaccgccgccccgcgcgcccgcgcccgcccatggccgcggccgcgtctccgcctggccgggacgcgcctgttaacaaagggcccggagagggcgcccgccaggcccgcccccgccccgccgccgcctgcgccttaaccccctcctggccgcgcccgtccgcacccaggggcccctggcgttcccgaggccgagcccggcccaaagccaccgccgctttccaaagccaacccgggccaatggcgatcctcgcagggggaaggccgcgcgcggcccgcggaggtctttctccgcctggaagcgccgtcccagccccggcggggagggtgcaggcctgctccactccactttagaagccgcgcgcaactccaccgcggcctggggcgtctccaacctgcaccgcttttggcgagtttcccagtacgcggtgccaggcaaaccctctgacccgagaacgctggtgaaaatgcatattcctctgcagttaccaatactaactggtctcatttctactcaacgcgcgtcctgtgattaaggctgaggcagtgggtgtctggggaggaagtcagagctggcacccacaggacaaccacacgtgcgcacgacaccccggtgaggccgcacatccagaccaggatatgaggtcaggctgcgaacagacgggtgtgagttcagagtgagaggacttagtccctacaatgagaattttcggaggcacggtctgggcctcttctctgattcattttctttaacagagaacttttcctcttcctttggccgagtgccacggggtgagggtggggggaccattgtttaaaatccatttcattcaattattttaaactcttgtttggactgaccacagacaatgttataaagcagcaacaatcacagtcgtgttactggcgcacacccagaaatctaggtcagagggaaacaataaggaactcaatggcaccaaataattcaataaaatcaggtaagttcccctcatgacaggaaaaggaatttatttcatttatttctttcataaatggtgttaatcacaaaactgtaaagggggaagtttagtccacatcttctagccatgaagagtaagagctgacgtgtattgtgctcttcctatgtgccatgttaccttcattaactgtattgcatctgcgtaatgattctgtgaggaaacagattatcccaattcttcaggtttaaaaacaaacaaaccccacagatgctcagagaagtcagacaccttgcccacagctggaaacaggcggagatggactcaacccaggtctgcctggctccaaggatcaggctcccgaccagtggatgatgctgacccttcacatcaagaataaattccaagtggattaaagcattggatatctttggtcaaataactagcattgtcattatatgtttcagagaaagccttggttatgagaccctggctactttctagcctatcctgtaatgacaaaaacccgggtatcttcagtacctcaggaatggctaagtaacaagatcttcacttggctctgccaaaaacagcacataaaaactccagttggacaggatgtaaccagtgtatatcacaggggttctcggccaggatgtcattaactttccacatgtgtcctgccaaattctgatcaacatacaacatgtatttttactgccattgaatggacctactgctagagtcgtggtaccagatcaggcctcatgagcatccaagagggcaccatcagggaagtttgcagctcccatcatctggagatgcaggactacagggcccccaggggatgggtgcagtgactctggatgctttctaggatctgggaagcgctgtcattctgctggacagcctgcgtgtggtgactgctaacatgtttagtgttgtcttgaatctgtcaacctctacacgtaatgccaaaaataacactcaaaagggtgccaccagtaccaactagtgaaaaaatacagtatctgtctgttttgttgcccttttggaaagttcaggggccttggatcagactataataaagtctgtcattatatagcatttcatattaa

SEQ ID NO: 588096 - DNA, 4001 bp, Homo sapiens
agagacaagaccttggtactctattaacaagaaaatagttttagcctctcaacccctgaagagatatcagggacacacagggaactacactgctttctctactagcttcccagaatgggattactgggtcattggcacgtacatttcaaattctgataagttccgccaaagctctccaaaaagtctgttccaattttcactatgtaaggtgcatgatcatcactagttaaaatgtaaataattcactttttaaatcctgaatttgggaaccatcataacaacacattaccatatttgcctgcctaaaaacaaagctaaaatagaactaatgtttcaaggcaaagtaaaatccaagcacccggatttatttagatgaagtgaatattttcccgtaagaaagtaaaacttcagctgtcaaatgcaagttcatccaacagaagcctttgttgactgcagtcacccaatgttggggtatttctgaatgaatttcaaagtataagccactggcacacttcatacgtttgcttataggataggtgggctcaactgattttttaatataaaggacacaatccaaaaaatgtcaggctgcaacagtacaaacagtaaccctaattaactggttatagacatcagtgtaagccgacccttagctttaacttcgcacagaattactggacatgaacaacataaaatgtacgggcagcattcaaatgccaaatatgttcataaaaatgtcacagataacctttattggcccaaatatcattctaaacagggagaagacaggatgaaagcttcatcaacgaggaagagattactccttatggaaggtaagacagaagctgtctatctaaaattcacaaggaatgctgcttccccacttgatttttcccacatggctccaaagtgagtattttcaagtcctacttacgaaggaaaaggtcaaggatattagcgtcaaccagtatctatgattcttaactttctcaggaacacaaaccactttgagaatatgataaaagctctctgtagacaaagcagtaaagaatccatgcttgtcagaagagcccacgacttcggttagagcagaatcatagaaccagggaccctaagaaaccactgaagtccagcccctcaggaaactaaagccctggaacagtaaagtggcttgtccaaggtcaacagtgaattagcagaggaatcaggcaagaaataagcaactcaaatagattttgaataaagccgaagtcacgaagtaactttttcttatacaaagaaagttccactaagagataactacagtaacaaatttattaagtggaattggaaggaactgtcgcaagtactgttgttcaaagttccttgaaggcctaagatgaatgcatgaggaaaaccatgagcagaaattttgaaaagcactcaccatgttccacaaaaacattgcagtgtggacccccatgcctcgatgattccttcttccctgctcctttgataaaatgcagggcaggcaagcttggccttctttggtccccaagtacttttccaggctgctgccccataaagtaataataggtacccctttccagaagagggttcaagatcttccagaacggtcagcgagcgtagagggaaatggcatatacgtgggatttcacattcgctgcatctccacaagtcagcaattgaagtcaatcacagaaagacatcttccataacaaaaggaagcactttttttaggttgacacttgcaagcaggagttccaattattttcgcggttatcaatttcatgtaattgcaatgttacccaaaagtttcttgatttgttttaaacgggctgaataacaatttcttttcaagaagaaaaacctaaacagaaatattcacaggggatgctgaaaagggtcaataatgctagtcatttcaattctcacacataaaggaaacgctgatggtctttggctactcctccagaacttttcctgtggaagtcaccaaccccctatcttagcttcttcatcttccaacaaatttcctgccgaactagtggccgctctcgcttctctgctttgctctccggaaaaggacacgggtcacccagatttcagcgagtttgccctcgactctgacgaaaaggaatgcattgccagcaacttttaagtccgctttttaaaaggcctgtggaaccaatccagacttttcctttgcattaaagtttttggctgagctgagactaagggggccgtaggtgacattggaagaagtcagggcattagaggctcgcgggagccaccttgggggaaggggagaccccttgacagcaagggagggatttgaatgggaggctccgtggccaaagttggggccgggatccggaataaggggcggcttggggctgagggaagctgtcggggcgcggcacgggcagcttactccggggcgacgctcttccacgcctcagaaaacggggtgtcccaagctgggggaaacagaccacccgcagtgtcccaaagccggggcggggctgtaagggacgaaggactctcgcggcccagacagcggaaggcgggccccgtgtagaggaggcccggccgcctcagctgccccaagcccgggggtctctgcccgagacaccccctcccccggccccggacgctgacaccaccaccgccctcaggcagtcacatctcccgagctccgccgagggacccagccgccccccgccggtaggggccgtggacagcggaggggctcctcagccgcaggacccgggaaccggctccggctccagcgctgctcaggcacagacaccaaaccccgcggccgccatgatggattacgagccgctccacaacgaggccaggccccgccctcggccccgcccacggcgacgtccggagcccgcctcgaggggacccggatgccccaagagccgctttcccgggacaccgccgcccctcccggctctggtcccactgcctgcgaaagcccggcccggcacgaccttttaaatgtggcttctctgagcgcaaggtgagtggtaaggaagcacccgcctcctctgtattgccattggcctccgagaatccgggtcaggcctctttcctccgtcccattggccggtgggagcagtagggttggatctcccagccaaccgtgttcggcgcagtccgcggtgcgtgccgggagttgtggtcccatggcacgcgcccgagtccgcctgcaccaagactcctggcccgggccccgacttctggggctcggccccgccctcctgggacctggtagattcttgccggcctagcgtaggccggaccgcgtctccccggcgcgagtagtgagacctggaagagccaaagcgagggaaaaattgcggattggattttcctggaagcggagtcggataacctccttcagtctctaagggagaaaatttggctcgctcctagaaaccaaggtttttgatgcctttcaagcccttcaccctccaaaaagcataaatattagaactagcgggccgggcgcggtggctcacgccggtaatcccagcactttgggaggccgagacgggcggatcacctgaggtcgggagttcgagaccagcctgaccaacatggagaaaccccgtctctactaaaaatacaaaattagccaagcgtggtggcacatgcctgtaatcccagctactcaggacgttgaggcaggagactcgcttgaacccgggaggtagaggttgcggtgaggcgagatggcaccattgcactctagcctgggcaacaagagcgaaactccgtctcaaaaagaaaaaaaaaaaaaaactagcgaagaaatatacagacatagggaaaacatccgacatgttgctaacgaattcaactgtttctttgggcattaggaggcttactcattacagaaaaggcatttgttgggtttgccaggcgctatcagatgtttgccccagaacgaacctttaacattataaacatttcacaggtggaca

SEQ ID NO: 588097 - DNA, 4001 bp, Homo sapiens
caccaaccacatcctcaccgtcatctccaaggctctctcatgtcctcttcctgcctttcgggggatcactccctctgactccactaccctgctctcctgcccgccccaacaagcctgactgatttgtggagccgggccttccccatgtgagctcttctccctggcatgcttgtcccccagatttccacacactgggtccctcgccattggtgtccctaaggacaccagctcaccagctcctggctgcaggcaccttctagcacaggcctgcttgttctcatcagtgttcaaccaacattggttggatgactaaatcaacatgcagaatgtgggtaacctgagaatgggcactcatttgccaggtttctcaaagacctaacctcttagtcttcaagacgtttgtcttgggtgcggtcatgggccagagccagtgccagaaccccaggagtatagagaccaactgcccgaccctggtcctccaaggctccctgacatgagaccaactaagacagcataacccgtggggcaggacagactcctggggtggcagctgtgttcatcatcttgactgggtcaagatgtatccagctgtacctttcatgtgcggtttattgtatacatccgttgaaacatattaagacaaaaaagggaaaacaaagaccacaaaggagggacagggaagaacccggaaggcgctggcagcacagggaggaggcaggtgtttgcagtcagacctgagtcccaggccccactcagcccttcctgcctaggaccagagcactgtcccagatctctccaaacctgttttcccgtgggtgaaagaatgacccgggaagtatttaccgttccttcctgagaactcagcgatactgaacacagtgctgcctcacagtaaacactgacaaatggtgagcattactgagggcagggcctcgacctacaccatacccggttttcttcatgaattttccactcctctgcctcccgctcctccagggctgcacctccggggcaggagccctcaccaagtcaggcctcagtatgccttatccgccacctgattccaaatcaaagtaaaacatctctccccagatgtgtacacagcactcctctaaattaaagggctgtgtgctggctctgggtaccccacccggctctccctggcctttggcgttggggttcactggcctgcagcctgcaccccgtggccctgcgttctgcatccctccctctgaagcgacgttgttgtctgggtaaatactcaattcatcttctggcgccaagaaaattaaggacaggtgatccaccctcggcctcccaaagtgctggggttacaggcctgagtcaccgcatctggttgcctcaataatttcttcttaactcctatatcacctgagggcccggggcacagttcccccgtcacgcttggcattgaacttgcccacctcgccttcccgaggcgcctccgcgtttggggtatggaggctgttcccggtcaacccgggcgcctggccgccgtgcccgagggaagggctggggggcgggcagggcagcccagagccttgtcctagtccagggtcgggcggtaggtgctgaaaatagcagctcatggaaggcggggagcgtggaggggcgaggagaggctggagaccgccacggcgtcgagggaccccgctctcaccaggacccggggaccccggagacgagccccccgccaggccgcgccaccgcgcccatcctccctgcgggtcccaggcacccacagcgcggccgagcccacctgcccgccggctccccaggacgcagggtctcggaggctggggcggcggccggcccgaagcctcgcagccctgagcgcccccaccccggcccggctgtcgggtgcaccccgcattccctgcggtagcggctccctcgcgggcacccggggccgaggcctgcactcaccggccagcgtccgcaacacctcggccatggctccgcgtctggtctcggcctccgccttccgcccggcggccctggggcggggtgagcccgaggcgccccctcccggcccgcgccgcccgccgccccgacttcccgaggccgaacacgggaggggacagaggggcgcgggaggcggccgcgggtccccagggacccctgctaggaagggacggcgcctcctcgcgcgcatccccaagggacccgcgcgcccctcgtggccctggtaccttggggccctgtccccgcatcccgccctggggccgagcggctccgggtgcccctgaagccccgtccccgggggccccttgacaccctgtctcccgggcgggggcgaccccctgacatcctgctcccccggggaggcgggggagacgaacccgtgaagctgcggccccagaacccacgatccccggccttccggctcgcgcgcgccgcagcctgtagccctccagccccgcaggaccctgtgccccgcgcccgcgacgtccccctaggcagagtcgcttccccggccccggctcgcggccccacggagctctgcgtcccgcagactgaggaaccttcgcgttccccctgcgagcgagtccccctccggcgcccgcgccgggccctgaggcctcttcgcgcggtccgtggacaaagccccgctccgccccgctacgacccccgcccttgcctggcgtccgctcgaggaagctcaggagagggcggcggcggctgcagggactgggagagcgcgccccgctgcgaagaggagttacctcccgaagggtcccagaggcttcttcctgcttttcctgatatctctcagaggagtttacactgataccccgttcacaggaccctgatcccgtcccgccctcccggggcaccgttctcatctccgtgaaagctgggggcatctttaatgcttcctttccctcccaccccaagtccagttcgccagctccgagacgtgtccctaaacatcacacagaattaccgtacgaggccgggcgcggtggctcatgcctacaatcctagcactttcagaggccgaggcgggcggatcacttgaggtcagaagttcgagaccagcctggccaacatggtgaatcctccatctccactaaaaatacaaaaattagccggtcgtggtggctcgagtctgtaaccccagctacttgggacgctgaggcaggagaatcgcttgaacttgggaggtggaggttgcagtgaaccaaaatcgcaccactgcactccagcctgggcaacatagcaagactccttctcaaaaaataaaaataaaaataaaaatattattaccgtatgagctggcaatcctgcttttgtgtatacacccaaggaattgaaagggggtctggaagagacatgtgcacatctgtgttcctagcaacggaactcaccatagccaaaagctggaagcagccgtggtgttcaccaaggcgtcatggctgcacggagtgagtctgtctctagatggaatgtttctcagccctagaaagggaggagacgctgacacctgctacagcgtgggtgagccttgatgccttatgctaagtaaaatccagtccaacaaggaaaaatgccatgcgattctattaactttttttttttttttttggcagagtctcgctctctctcccaggctggagtgcagtggtgagatctcagctcactgcaacctctgcctcccaggttcaagcgattctcccgcctcagcctcctgagtagctggcaccacagatgtgtgccaccatgcccggcttatttttgtatttttagtagagactgggtttcaccatgttggccaggctgttctagaactcctgacctaaggtgatttgcctgccttggcctctgaaagtgctgggattacagatgtgaaccaccgcgcccagccacaattccacatatctgagggactggagtcatcaaattcgtagaaatagagaggagaatggtgggcgcctggggaaggcgggaatggggagctgtgaacggtgttgagtttc

SEQ ID NO: 588098 - DNA, 4001 bp, Homo sapiens
tggtgaaatccttactctttcactatattctttatttacaaaaggacagcttgtgttaccactggtgtttctccttattgaaagtacccagaactactccagcccatcctctgtgtgcaactatttacccctgacagcatgctctgggaggttatgcaatacataagtcatggccacttccactgtctttcacagtatctgtggtcagcagagggccaggttttctttgagaccctgttgcccaggctggagtggagtggcgcgatctcagttcattgcagccttcaactcccaggctcaggtgatcctcccacctcagcttcccaagtagctgggacgacaagtgtgtgccacatgtccagctaatttttgtatttttttgtagagatgaggtttcgccatgttgcccaggttggtctcgaactcctggattcaagcgatccacctgccttggcctcccaaagtgctaggaatacaggtgtgagccacaacgcccagccttaggttttcttaaggaaccaacctaatcataaaaaaaggagcaggagtgtttgtgtggaagccagccatggatttcagcactgagggaaggaagggcccagacttctggattgtggccccagccatgccagaaatgtgagcatgacagctccctcctcaagagcccagttttctcatcagatgaataaaaggacagggactagatcatctgagattcctgcaggcagtaagcacctgactcctgctgaagacattctctctagcaaatccaaaaggaaaagtcctaaacaacaacctcaaattcacaatgacccaaaccaggagttcctgtttcccttgtttgggcggtgaaaagataagccacagaaatgaccacgcaaagtctcacattctgtaccaggattctgagccatggacatacacaaaataagaggcatttcctctcccagctgcaacccttccctaccacaagaactaaaatcacacaggattctgcaatggggaagtttctgctcacccttatctagggacctaggcaaatccaaaacccgcacattatcactcccaaactttcctttcatccctcagacttcagaactggagaaagcacagtcctgggggagttgaattagcggcttgcacaagacaggacactaaaggcaagaaaaaaaaacaagtagtaattaacttgattctgaccaaaaataactcgaccattataggcatgttcttgggggtggggcaagtctgcctggtgggagtgaccccagccgcggggacctgcggggggcgtgctcttcccagcactccgagagcaggtattcagggcaaaaaagcacaatgcgacccaagtgcgtcacgccacagagatcccaggggaggaagagacttgtcccggcaggttcaccgcccccagctgacccaaacaaggagaatgggctgacacagacccctggttcctggacgcgtgggggccaaacaagacaataggaccatcacaaaacaaatgacagcaggaggaagatgagcccagctgtcgggaatggggacaggagaggaggacagatggagaactgaaaggagcgcgccgaggagggggtgtggactgactcagcccctggagagaatgcccccagatgcgcgcagagacccacgtccagcttccagacgctgcggcgcgggaacagccccctcccgctggcccgcctgccttccccgctcccgcgccccgcaccgtgttgtagaactcggcgatagcaggcacgatggtgtagttgtcctcgcaccagtccacctccgagctaccagcctgcagctggtcccaccagtgcggggcgcccatggccactccggggcattggagcagctgctcgcgcagctgagaagagcccagagctgctgcggaggcaaaacgcggcgacagccagcggcgaaagcggctttatgaagcaccgggtaaccgccggatgtgcgcctcccaactggcctcccgcgctccgccccgcctcgcctcgcctgcgggaggttactcgttcgcagaccctccccggcccctccccctggaagccacgcccaccgtggggcgggacccgcgtggaggaggggtccagggtggggcgcctggaggcggagaccgggctccagactcttccagactacccagcacccggcaggtggccagggcctcgatggtgctacccacgcctgcccacgcccatctcctggctcagactcgcagcctcccccgattgaaggagcgccagaactctccctggaaaaaaatttaaaataaaaagaaacccgggaggacctggacctctctggacccagagtttgcagcgattttgctgcgtccggcgttggacgccagtgcttacaccagagaagtgccctcagtccctccgaggccggacgccactcgctgcggtcactgtggcaggaagaccttcccggctgctggagcaggttgggccgcccagtccccgggggagcacttctatttagagtacgttcctgccctccctccccttggctccagcgttaaggcttaatctagccttcgatatggggacttaggcaaagggtcaaacgtcagccatcccaaactgcagaggatgtagtgtggcagttatgacatctccaagatatcgaggttcaagaggtgatagataacatacacatgccaggtgctgtctgaagagtttccatgtatcactcatttagtgtgcccagcagagaccctgtgaggggcttctattagcaagtgacagagctggaaattcaattcaggcaagatgtcctcagatccagtcataactaccttcttttgcttctgtaactgttctgcggtttgtaaatgaaagccaatctggttcccaggatccctagaggaaagccaccctctgtgtgtatgtggtggctcccgttctccttccttgaaaggttgtaggattctaggtcaggacagcggcagaagaggccctgggcagcagcccattggtgactgtcattaggacgtcttgctcggacccgcagggtatcctaaaggccagcaactccccagggtctgccctctctctgggcctgactgcccagcaggaccctgggtggtgcttcagtgtcctctgcaccaagtgtttgtctgcccaccagtacccacacagccatgtgcaagtccccagagatctccatcactgacaaaaactgcaagccccgccgcctctcctagtctctagaaaatccaggtttgtcccccaggggccaaaccacactcctcctttcatctttgtcccaacctctatcccttcctcctgctttacgggcaattccactgccctccagaacccaagtagaagatacactcttaccttcccctagggttgatttacccagacctacaggatacccggagtgagctggccacctaagaaaggcggttgagggccgggcgcggtggctcatgcctgtaatcccagcactttgggaggccgaggcaggcggatcacgaggtcaggagatggagaccatcctggctaacatggtgaaaccccgtctctacttaaaaaaagaatacaaaaaattacccgggcgtcgtggcgggcgcctgtagtcccagctacgcaggaggctgaggcaggagaattgcgtgaacccgggaagcggagcttgcagtgagccgagatcgcgccactgcactccagcctgggtgacagagcgagattccatctcaaaaacgaagggcggttggggtggatgtttcccacagccacagaagaaagatacatcagttaatttctgtgtctcaaaatgctacaccaactgttcagcaatagaattttccctgtagtcaatattttacttcttccaacaacagtttacttggaaatatatccatattcatcaaaatataatggtatttttaaaaaaccattattttatatgccagagattctcaaagtgtggttcctccctttcttttcattttcattctcttaccagtg

SEQ ID NO: 588099 - DNA, 4001 bp, Homo sapiens
aaactgatccatcagagcacaagaggctctatggatgaaggaacaaaagggaggatggagttagaaaatttcttcctcccaaatatatacacataacatctgtcttgaacttgttctgacaaggcacgaagctaaggaaagagtcccgtgaaggacctcacctaccacactccaggatggtggaaactgctttttgacaggggctgaggaagcaccactcagagtgacaccctctgaaagtggaaagtgaaagaacgtcaagactggaaatcattattccaataaactcaaggctaataaccatgcaactgcaaacagaaatgaacacgtgcaagggaaggcaaaagcatgcctccttgttcttttggaaataacttcctgactacttggtaactctcacaggaacccctacacacttggcatggtctccccactggcacttttgtgagcctacaggtcctgtttgccacatcactgttgtaatcctgatgcacagacaggtcagctctgcaagcacagagacaaccaaaggcatgtgcgaagccttgctgacttttcaggaggctggcaaggttcatcacagcctcacgtggggacctagtacatggtttccaaagtgagatcaaacttggttccagataccagaggttaatactgtccatggcatgaggtggtgtgtgttcccaatcagaggaaggatcacaaacaagaagcaggcccaatgaatgaagcctctgaagcatttcctacaccagcatcctcaaagtgtggtgcagagaactcctagggatctccaaagtcaaaaccattttcctagtaataaaatgttacttgctttttttcattcacacattttcaggagtatacagtggaggtctcaagaggctacatgatatgtgatattgcaacagactgcagaagcagctatcagaatccagctgtcttcaattacgcttgacatcaaagagatttgcaaaaatgtaaaacaatgccactcttctcaatcattttctgttttgggaaatatagttctttttcataaaaataggcaatgttaagatataattagttcactattctttttaaatgaattattatagtacaaatttctcagtcttacttacatattataaatatggatagatataacacacataaaagctccttaagatactaatttttaagagtgtaaaggagtactgagtaccagaaaagtttggggacttctgtcctagaggttgtcccccagggaagagagttacatgtgttgcaagaaggaagatgccattatgatgtgctagctgaatctagaaaaaaatgacttggtcataactgcagcccaagctcctttctagatctctgaatctatcatggtgggctctgtgttcaagcctcccacgaagggtctcttccccctcatcccattttccctttaccccttggagtggattcccggatctgcccgcacaactttagcaagggtttccctatccagccagccgggcctgggcgaggactcccagtgcgggcctcacaccctcggggttaggactcccaggactggccgcacaccctaggcaaggactttcaggacagcacgcacagccaaggctaagaagggtctaggaaagccacttccaatccctggtttctctccccggcatgacatagactggggacagggtggagacgtcagtcgccagaaacacgtccccgattctcctctcagcctccccaagctcgcctccgtgtcccccgtgccgccactgcctcgggcacctcggtaaaggcccgcaccgactctcgagggatacagggtggacggcgctcccgcctggggacgtgggtcgggccgcgtcggtactcacctccgactgcacggcggggctcccgcgaccggcgaacctgacccaagcagcgggacgcgttcccgtgcgctgcgcggttccagctgccgcctccacgctccgccccctctcgcccccggggccgccgcgcgatgggcggagcaggggcgggaagggcggagcaggggcgggacggacgggcagctagccgaagaaggggcggagcctgcgggcgcccccgcgggcctggaggacttcgccccgggctggaggctagggttgcgaagggctcctccgctggaagtgggagggctgatccctcggcccgggtccgcttctgccagcatgggacctgggacgagggtgtctgttgctcactttggagcttagcatgtgactccccagccggcgttaggaagtgaccaaagggtggggaagaaatggaattatttttaaaaaatgatttggccataactggagaggcttcatgtacgtgtggtcacttggcccgcctcccttctcactttgtccgtccccaccctacccaccctctccaccctcgccttaattctttgcgcaaagcctgccaagtggacatcggagtcacgctgtcagaataggacttcagcatttccgtggcaaaagttctatatgtagatttccttggacatgtaacaacactttctaatgcacgatgttcaccggtctgaagtcggagaaatggctgggagatggcagcaagtgggctttcacaagatctgcttttcatgttggtaggagttgtgccctcttgggtgaatggcgttcaaagaagtgattagatctttctagatgaaaggtggtgaggttttcctgcccaaattatttggaaagttactgtagttttctgaataagcagcttataggatgagtaaacaatagccagtactaatagcccccctgctactttatactgccctcctattctgcacaaagccctgtgatcgactctttccacgttattcagttcagctcttccaaccaccttacaagtaaagaatattacccgtctttgcaggtgtgcaatgcgcaacagctgagactcagtccttaggttggtttgacaccaaagcctacaccttccctgtcatactgcactatagggtacaactatcgtctagttatatttaactttgaaatataaatacttatatttattttgaaaggggaagtaactgtatttccaatatgagaggagactgttttcccacccacttcctaaatcctttccattcacattagtaattaaattttctttgaatgtccaccatatggcagaggtgcaccacaatccctgaaaaatcatgctccagtccccttgggaggtagggagagtaggggcaaggtgagagtgagtagaaggctggggaagtccgatgaggacacatccagctaaattgcgattcttaatgaggcagccattcggaaagcaaagtatctaatgttcaatgataacatccgtgtaactgagaatccttcgcagaaaacaatcaaatcagagctatgaagggaattgagatttattagtaagcacgctggtcaaaaccgtgaaggaaatagttccacatccccccagtctgttgctcttggacgttgtcaccagtgacgtgcagatcgtgaatcccagggcctgtcctctgttcctgtccttactcactactctgtggtatttgacactggcgattcgttttcctagaaatgttaacctccttttggcttttcagccctccgctcttaggagtcacctcttccctcttttgtccctcttttttaaggtctttccctacactctctcctcttgctttatatgtttctccatttgctgagtttttcttcatctattttctcagtatgcagactgcctgccacttctagctgaagcctgctatgtctctgtcattggtcttagttaactttctgaccttcacactcttgatttgcagccatatgtggcaaccccacctggatattccaaaggtgtctgtattagaccgttctcacgctgctgtaaagaaccctgagactgggtaattcatagggaaggaggtttaattggctcacagttctgcatgctggggaggcttcaggaagcttacaattatggcagaaggggaa

SEQ ID NO: 588100 - DNA, 4001 bp, Homo sapiens
aagaactggtactgagacataaatgactgttggaactaaaagaaactcctgttaaagcagggctcagacagctttgccagctctttccagtccctcagggttgttgatgaagtatgaaatggacactgatgctttgtgggagtttgcactgttacagcatacttcctattggcatttatggaaagggaactgcttatatgccccaacagcatttaccctctaatcttcattgcactcccccttccaagcagagtttaaccgtaaagtagttcctaaagcggggaatgcacaaaataaggggcagcataattttagaacaagtgaatgtttaagcaatccacatacaatgcatgcccttttttgttcatcctccccctactcctgcttttgttttgggaaatgtatattttaaggcagacgctgcacgtgtgaagttgtttcttatgaagtcaggaagtagagaaacacactgtggaggggcatatgaggggtgtttaatgctacaggaataagcgccggctccaccccctgtgtgtaggagtgcgctcaccctgtcgagggtaggcactgccagtgcagtgtccatcctcgtcgctgttcagaagcaccttctgtagaggaagaaaggcccgtgttcctcgtactcaaagcggtggacccacaatggttggaaaccctgaagtgaggccaggatggagccaccggtccacacggcactgtctctttcaggcagcacgtttacctgcggggtgtcattgggacacatgctgcttagctccttctgcagacggttagggaagccactgagcatcgtgctgcccccgcagagcaggatgttccccatgaggtcccgtttgagggcgatgtcacacttgttaaggcaggacacggtttgggtgtggaggcccagctgcatggacttgatgagagatggcttgaagaacatctccgagcagaggaaccgttcctggcacagctgaatctccttcccatccggcagcacgtagcggatcgtatgctcactgagagggactttcttctcctcaatgggatccagggccacaaagcagcatttcttcttgatgtcctccacgatgcccatctggtcctgggtgaattcgttccccgcactgttcagcaggcccagcaggtaggctgtcaggtcagagcccgcgtagtccagccttccggtgatgctgggcaaaggataaccctcgtagatggggaccacgtaggacacgccatggcccacctccaccaccaggccggaggtccttccataggagtacatggacaggcgcgactggtaggcgatgtgcattgcaggggtgttgaaggcttcaaacagcatttcagcatatttctctctgttggtgtgtgggctcagtggcgggtctgaaaccaagaccgcatgctcctccggggcgatcttcatctcttgtcggaagagatattcccagatatcctgcactgtatcccagtccacgatgatgccatgtcgcagagggttaaccagcttgagatgaacgtttgtgttgttgagttcctgccccacgaatgtctccttgcgattatccccagtcttggcggtctccatgtagggcttgcccaccgttgttgagatcttgtgggtgggtcttggcaggccggcaaagccacatttacagtagccagtgcccaggtccacgaccactgctttggtcacctcctgcttgggcctctccttggctgcctttgattcagtaggttcttgtggctctgaactcgtatggcggacccacacggcccgcttcgccgggccatcccttaaagaggcagtctggagggcctgtgtctgcaggggggcctggttgcccaccttcttggtgggcccatcccccatgattgctgctggtggagcccacatgttgtcaagagccgcaccactcttagaaagttctcaatcccactggattcaaggcctgaaaggcctacatcagaggataccctgagaattttcccaacagtgacatcactaattatgatgtaatctggtgacctgggctttctagatattgcaaacccttatcctgtgttagggtacatttgggatattgtttttgaaatggctccccttttcctaaatttcgtaacaagactgatttattcaattaattaatatttcttgaatgtctgctatatacaaggcagctgggaattcgctggtgaaaaaaacagacaaaatcccttattctagtcggtggcgggtgggggtgacagacaataaccaaaatgagcgttaagagcaaaagcagggtggcagtgctagtgtggcctgggcagggcttcctgagagggtgacatttgaatgaagacctgcaggaggtgagggagagagccatgtgtatgtcaggggagcagcaggtgcagaggactggaggcagatgtgtgactgaagagttagatcaggggtcagcaggctgcagtccaatccggtccccggcttgttggataggaatacagccgtgctcattcatgtacgtattgtccgtgactgccattgcagtacaacagtagagctgagtcacagcattgaagactgcattgcccaaaaagctgaaagaaagtaaatactgactgacccttaaaaagtttgccgacctctcgagttaaaggaggagcaggaagaaaagtgtggctggcatagaaggagtaaggaaaagtagatgagatggggtgggggaaggcaagcagctcatggtaggcctcataggccaatgcaaggatcgtgggtaaggtcagaaagcactagaggatttggcacagagcactgacaccatctgatttagatgttagtgggaatcctttgctgctatggtgactaagggcactaagggtgacccttagaacaaccttaaggggaattatttttggatatacatgtgtacacttactgtgccttcatcagggtcattggctagacagtgaaattagactctacaaaatcccactgacaacactgaggcttttaggtgcatagctcacccaaggatatccaaccaggagtagccaagctctcctgactgtggcttcctccccaggatgtgctgggacacagcttgatgggacctagcgtgcaactcttaggctgtttggccaccatcttgcatgccatttctgaagctggacacattggtgtggatgcctgccacactcagggcagaatccaaccttatgttatgccacaccctgaacctgatcccagcccttcataaaagaggcagtcaccacaataatgggctttctcctttagagaggctacgggagttgctctcagttccttgttgggtatgagagaagaaaaggaccaagtccagtctcatgaggtttgtggtgactatctgatgggggcagcaaggtgtcatcccaaggacaaaatctcagtttcttgcttcattggttagtgggtgagataatagcatggaattttaaaggaaaaataggaaagtacttttgatgcctggctgcctgaaaaacagtttaattgcctctgccgttcagggatttgcgtgggcaactcagattgtttgactttatttcaaaagtgctgtatatggtaaccaaaggcatatgtaatttaaaaccctccatttttttcttcccaaaccctacttgaatgttgcgaaatctatagctgcttggtgccttttcactaacctggactcctagaagagcctgtattagcttcctgtttctgctgtaacaaattaccatggatttagtggcttaaagcaattcacagttattatcttactattttggaggtcagaagttcgtaattcttcttagtgggctacaattaaggttctttcagggctgtattccttctggaggtgtaggagacaatacttcctcttgcctccagctcctagaggccacctgtgttccttggctcatagtcccttcctccatcttggaagactctcagactagagctgtcattgtcacatctgcttctctgc

SEQ ID NO: 588101 - DNA, 4001 bp, Homo sapiens
tctggttcctctgacatcctctggaatcagtggctctgctttgtgactctggaaaaatagctgcaattttggctgtggttgaaaggggtacgcccacagatgggttgaaatggcacttcacactctggagatgcactggcacagccttaggctcccatattgagggtggcaggcactagggggaggttagggaacctggagtgatcaggcagtgttaaggttgggagcacttgtgaacagcagaaacaggagactggagtcggacacccagctgtgcatctcctccaacctaccgctaggtgacccaagctagtcccttcatcagagccaacccccttagttgagccagcgatgaggagtgtctttggatcaggttttgaacctggaggtactaataaaacaggaggccactttctaggccctgagatgatgtcactatcatgaggcaggcagagggggtgggatcagtatggtagcccccttccttacagcccccacctccagtgcaaaaggtgctgccgcttctaagcccgactcccccctaccctctgctatcagatagaagcaagaaacccagactagacaagagccatttcagagtaaacctttatgtgaaattctgtaaatgtgtatagagaggcctgtggccatctgtgctggaggccttgtctgtggaaatgccgaggctcagcacttgctgtagatggccacgctgccccgctcctcaaactcttccttgctgacccagagctgttggaaggcctgcagggaggccaggatggaaccgccggtccacacggaggtcttcctctcaggagcggcagccactgcagggctgtccccggggcagaggaggctcagctccctctggaagcgctcggggaagccatccagcatagtgcagccgccacacagtagcacgttggcggccatctcctccttgaagcccgtgtcctggcagcggcccaggcaggcagctgtgagctccgggaggcccggctgggtgctgcctgccagggagggctggaagagcatctcagagcaacggaagcgctcctggccaatagtgatgagtttgccgtccgggagctcgtagtccacgcgcagctcctccgggaccaggcccagctcctcctcgggcaggaaggccgcatagcagcacttcttcttgatgtgctctatgatgtgcaggtggtcgtccgtgaatgcgtggcccgcctcattgagcagctgcatcaggtagttggtgaggtcacccccagcgtagtcggcgcggctggtcaggcccggcagcacgtcgccctcggatatgggcaccacgtgcgagacgccgtgcccgctctccaccaccagccccgaggtcttgccgtaggagtagatggacagcaacgactgggacgtcacgtgcatggctgggatgccgaaggtctcaaacatgagctccgcgtacttctcccggttgctgctggggctgagcggagggtcggagaccagcacagcgtgctcctcggggaggatcttcatggcggtgcggaagatgtactcccagatgtcctgcacgcagtcccagtccaccacgatgccgtgcttcagcgggttcaccagcttgagaggcgcctccgtgttgagcagctcatggcccactaaagtccacttgcgggtgtcgccagcgtcggccgcctcggggcagcgtttgcccacggtggaggagatgaagtaggtgggcctcggctctcccgcgtagccgcacttgcagtactgggagcccaggtcgatgatgaccgccttgatcttgtgcaccttcctgggcttcatcttgagctgagtggccgcacctgtgtcccggaggctggcgtcagggccgggccgtgttcctgcctctccagggtcaccctgagccgtgcccaggggcatggggctgttccttgtcgccatctgcctcccttgctccccttctcacatccacagcctagagccccctggggagaaatgagatcccccacctccagcagtgccatgacaaccacccgggattgtgatgtcactcggggctggtccattcaggcagcaggggagggcctggctttggtcggttcttggtgtgtcacccccacctctctaactcaagtttgctcccggacagagcaggtggccggcagttttagaaatccaagcacactagggtctcagaggtttctgctcagcccccttgcatttccatgcctaacctgttcactactggacacctttcctcttctgcttcttggtggagagggcctatttgagcccctccagtaaggcaggcactgtactagttacttcacttatgttgttctgcaggtaggcagagctgaggaaatgaggctcagaattctaaggacttgcccaagagcaaacagcacttggggtgtttgtaccttaacccaaattcatcaaactccaatgcaccaggcctccttaaccgccccaagagttctttcctcccttcactccacatttactggagtatatagtaggtcccgcccagtgcagcctgccagtgatagatgattaaaaacccaggccaccagcagtgcccagtctagacaagaaaatggaatgggtgccgatgggtttgcaggaagaagtctacttggagaactcatttgagacaggcagtcagaaggtgctctagagaggaggtgatgcttaagttgaatcctggaagaggtgtaggtatttgtcaagtagttaagaggaggggaagacatcccaggcagagagcacagcttgagcaaaggctcaaatggaggcacggtgaagaacttcccacagtcaaagtgtttggaaaaacagatgaagctagagaagtcacagagccaaatagaaagggcatcaaatggcaggagtaggtttagactaaactgaggagagccagggaagctatgaagactttaagcaggggaatgatcagatttgccctctagaaaaatgttagaaagggccgggcgtggtggctcatgcctgtaatcccaccagcactttgggaggctgaggcaggtggatcatgaggtcaggagttcaagaccagcctggccaagatggtgaaaccccatctctactaaaaatacaaaaattagctgggcatggtggcgggtgcctgtaatcccagctacttggggggctgaggcagagaattgcttcaacctgggaggcaaaggttgcagtgagctgagatcgcaccactgcactccagcctgggagacagagtgagactccatctcaaaaaaaaagaaaagaaaaataaaaatgttagaaagatctgcattgggctgtaatgtagagaatggatgggaggggcaagactagaaactgagacccgaaacgaggccattggagaacttctgataagacttgaaggtggcctgacctagggctgtgagagtgtggaaacaaggaagagcctagttctagagaaacttagaaagtagaatagaatccaatctgttttttccccaaccatccctcactttaatccaagctcttactctgacatttcagggcttccctcatgggctcctgtgatgtgggatgtgaggcagagggaaggatgaatcgcttacttgtacccgggcaaagaaagatggcctgtcatccagaaaggacaaattcacgagagtgccagagggacctgcaacttaagctgccccctcccactccaaaaatcaaaaaggcagtttagggctttggtggtgaagagtcaacagaaaaaggggaagagcggcaactgggcctgaggaagttttctgggagaattaagatgagcagaggtgcctgaggaattgattaggcaacatgcatgggggaaaaagagttaagaaatactgccatggagcatgtaagaatgctaatgaggaatgtgtggggatttttgtttgccaaatttttgtttgtttgtttgtttctgagacagagtttcgctctttcgcccagtctggagtgcagtggcgcgatctcagctc

SEQ ID NO: 588102 - DNA, 4001 bp, Homo sapiens
atcatggaccccgacaggaaactgaacacgagtggagcccagtggtctcttgggaagcaggggcccaggccagccctcactgtcctctcccaagggagcccttagagggtcagggaccctgggcaatgatctcccagcctttcaggagcggcagcgctggaaggacccaggctatgggatacccagacagcgtcggctgcatccagcccccagcgtggccccaggcactggtcagtgtgcctctggcctagaccacaaagaaccaggtcacaaagtgggccttgccctcctgttgcccctgaccactagcccacctgcctctggcccccatcagccattagtcaagttgccaatggccctactgggaagggggctcgcaccggagaaggtcacagacatgggcctgtgggcaatggggacaggcctttatcataaggaaatccatggccttaggaggtagcctgagccagtacctatcttgtttcccacagaaggaataaatatttacatccacggtcagaaaccacaagagctcctgaaaatcagccagctcagcagaggccatggggcaggaggggccagccaatcggtgaccgttcccttgtgatatttaacagaagctagggtgagaaccctggcctggctggaacacccagaccagcttatatcaacttggcaggaagtaacagagttaattaacagggttgacagcagcttctctgaccttctccttccagatccaccaaaaatcccagaccactgactcagtggtgagataccccttgaaagtcctgagaaactccccccgggagagaagacaccaggacaagtaccttttaagggagcaccagggctcaagtaagaagacacggcctgtggctccaaagcctgaagacaactctgcaagacaaaaagagatggatggggccgggcatagtggctctggcctgtaatcctaacacttggggagaccgaggtgggaggatcacttgagtccaggagtttgagaccagctggggcaacataacaagaccccatgtcttaaaaaaaaaaaaaaaaaaaaaaagagagagagagaaagaaaaaagaacaaaaagagatggatgaagagggagacaggaggcaggaggtgggtgaggccaaccaagaaggagagggggaaatcagagacagggagaggaagggagaggcagagaagagcaacctacacagtttgggacaaactagtatctgtctgttcagcttcaccgaatgagcaggtcgtactgagacaccaactccctcttcagtgagcacacttcatcccccaaagccccaagtacagactcccctgcccagcgcaaaccccaaagctgatgtagtcagctatttggcactcccctcgccccaggtagctcagaataccccacccagaggctcccagaatacccccgctcctgcaaatgagcccacctgctggaaatgggagggtccccagcagcccaggagaaagccacaggcaaggattccggccacacagaggggagggcatcttgcccgggggtgacgctggtgcatcctcaggagagccagcccgaggagtggagcggagtgagagggggccttggtgactgggaatctggtcagtatggaatgggacaggcctgctcactactgggcgggacgattaggcagtgtttactcttggaagcttcctgccagggcaggggccgtggctagggtgggcggcctgcagctcctcctgctgcaagctgggccttgctctaagatggttgcagttcagggtaacctgcagcccagtcctgcacaccagacagctctccggatgtgcacgcccacccccttagaggaggcctaagccatctaatctggagaagggacactggaccagaaacccacagacgggggttcacaaggaatgccaggacctcggctgactccctctccggggtccccgctcccatctgacagatgagaggctgtgccaaagacatcgtggttctggctcaactctccacctactctgtgcctgcgcctgatgaggagagtcgcagaagcaggctgcacggcaccagatctcagcatcatcacaaacggcctggcaatccccttcatctcctggaagactcacttcacatgctccaaaccactcttttacacccacagagccgcacaagctgatgaccagcagggggattcaccttgtctttccacccctcaaagtgcagcctctctcctcctctgcgatcagggaggacacacctacacttcctgccaggccctggctctggatcccttcccagctctctcctcctgcatcgttagtttctgcccctctgctagagccattcattcattccttcagccaacaaatgtttcactgagcccctgaaacaggccaggctctgtgctagacaccaggaaagcagccccaagccaggcagacagcagcctcggcctctcacagcttaaattctagggaagagagccagacagcaaagttgctagacagacacatgttgtatatgtagtatgttcaaaggtggtaagtgttatggagaaaaatacagcagaataaaggaatgggggactggagggaagggtgtgctttcatgcaggaaggtaaggaggctgttggagaagggggcatgcttagatatcgagatcctggtacctggctcactccatcagcatgaatgactctcctgtctctttttggtttttgtttgttttttgagacagagtcttgctgtgtcacccaggctggagtgcagtggcacgatctcggctcactgcaacctccgccacccaggttcaagtgattctcctgcctcagcctcccttgtggctgggattacaggcacccgccatcacgcctggctagtttttgtatttttagtagaggtggggtttcgccatgttggccaagctggtctcaaactcctgacctcaggtgagctgactgcctcggcctcccaaagtgctgggattacaggcatgagccaccaagcccagacactctggtgtctcttgattacaatcaacaaccttcccttgacccacactgtcctcctgccatagccctgtttctggctgtctttaagaacttagaaacattattttcagtggctatctccacttccttgccttcaattcccacataccattgaaattgatctttaaaaggtcaccaataactttgtgaaccctgaaagagccaatccttcttgatggatcccaagttactaactgggcctaaattcaaagtaggacctagcagccatttgctgactagggtcacacacacattctgcgttcctggaaagcccccactctcacttaactctgggatggtttcacagctatctgttcctgtttatgccgccagaatcaacccatcgactgtgacctgcatcgaccaatctgaactcagcaagtattaaccaatcagaactaagcaagtgtgccttcctcatttgcataagtggaccaaagtgggaacctgggcaggaagttctctacaaaagacgacctctttctttgttctctttgttccctggaatgcacctttgtacagaaggctgcattgccctggtttacaaactgctggaacaaagtttttttccttttttaaaaagaaaacctgggccaggtgtggtggctcacgcctttaatcccagcactttgggaggccgaggcaggtggatcacgaggcacgcggatcatgaggtcaggagttcgagatcagcctggccagcatagtgaaaccccgtctcttttcaaaaatacaaaaattaggctaggtgcggtggctcacgcctgtaatcccaacactttgggaggctgaggcgagaggatcacctgatgtctggagatccataccagcctggccaacatggagaaaccccatctctactaaaagtacaaaattagccgggcgtggtggcacatgcctgtaatcccagctactcgggaggctgaggcagaagaatcacttgaac

SEQ ID NO: 588103 - DNA, 4001 bp, Homo sapiens
cctaggtttgttttaattttatctttataatacaattattgtaatttaaatatgatatgttttaagtccttctgaaataagcatacataccttttcattccacataagtcaaattatatgctctaatacatatatgaatattcaagatatcacagagggatataatgcgtttaccaaatggatagcaaaacaatctattcctgaatgggaaagttttactaaagtataatgagatcatacttccatatgaaaatatcaaaaaagtaatgtatactggtaatttgctttatgatgcaatataatgggaaaataacacacacttaaaaaaatcacaaagaaggaaagatgagacaaactaatggtgtatacaagtaacacatcccatatggaaaaaatgagacacctttcataaatcgcttgctccacaagtcataaagcatacctaaacattctgttctttgtatttttcagaacagctaaaacttatagttcattcatgcttgaaatgtagtttacctttaaatttctatgaaaaattaaaaatttatttctatatttatagcacttgcaatgcagcattataatttcttagctacaatgatgcaaatcattaagaagtgggaatgtataaaatattgaatcactgtctgattactctatttgatgaatctcctggactttttcagtttgtaccaaatggctttcttccctacttcaaaattatagcgcagatcagatttgtcagaatataatcagaacaaacattccttccccatcaaggaatcaatgcaacctattcatttgctacatttttaccttgttctcttcctgccttgttaccttctgaggaagttctggcatgttataaatgtgacaggaaaaactacaatcacatttgtttggatcagtgtgtgcaaattttggaatcaaaccttcagatgaggtttactaagctgcctgcccagaacactctggtttaaaaaatgtgcattgctattaatattttgagtgtagatttattttggacagtaaatgttcattttctgcccataaaaccaagtatgagtcacaacggaacatttacttcgagtcaaaaatgcaatgtgtactgacgttcaagagcagagcatcttatcactatgactgtggcaatcagccgtactaaaagtcaccattcctttttcttctttaaaagtaaatttgagatcaaaggccataatcctcaattcataaatcctagcattaacttctatccataaatgacttgcagtaattaagagccataatctgggttggctgcaaagaggctctcattcccctctttacctggttccatagtacatgtgcatagatggaaagtaattcattaaaggcggtacgggcaagctctgcaaagcctatccatcaaaaaattccaggaacaccacagtgagtgagtttaatttcaggatgtctgttatccaaattccaagcatacacaccaccatatatacagtcctcagctcccaaactccatgcagtatgtcccaaagttcatgtctcagtatcagtattactgtatagcagtaactaattccagaaagtcttgcagactttatcttgcttgggaagttgaggttaaaagttctagaaggagtattctctctttgtaatcgtgtaaattattttacctggagttttaagataaagacacacacacacacacaaacacacatacacacacacacccccaacagcacccagactcaatggcaatagcaatgcattgaaatgaaaaggcatttaccaggagcaggaaagccagaaagaggagcagtgtgccaggagttgcccgacggcagcattccatgcttggatccttgccggaatcagaatcggacactgaataagctgctaagtgctcctctgcctgctgtcacatccagtactggtgctaacactccagtcctgcctatcagcttccatcagcccctctcacatttcctgaccgaggggtgggtgggtggatgggtggggggtaagctgaatggaatctctctcggagcaggcagccagccaatcaggctcctgctaatcagacatgctgaataacaaagccaggaggacagagaaagtgtaacggtgcgagcaaaaaagggggaaaaggacgaaaaagaaaggcgagcgagcagcagagcgagaagggaaatgcaaaagatgcagaattgcaaaagatgaagccaagcactgtgcttcccatggacctggttagttctttgtgagatgcatttctatttgccatttgcctgtgctgatgtctgttgctttgtaaagtacagtagctccctgtgactgtgtattgttccattcaggagagaaacttaatccctgtcaatatataacatatgccataaagggaaagaaccatagacaaaaaccgacttaatgtgccctgtaaatgtgttctgtacaactgttttatttcgcctccataaagttcctctttactttctctcttgacttgcaaaataaatactctatacattttctgaaggttcctcactaagcctaaacagtggcataagttattttgtgttattaaggacttaatttggggggaaaaaaacaaagcaagttgcttctctgtaaagtgacaattgaaggcatttaagatttgctaattgtaaaggcacaattagaaacttagatcccccagtttaaaaagaaaccctcaacaaagactccaggatgagtggggctgaaatttggggttgaggagcagcctggttttgatgcactgccaactctcaactatctattttagccacgggagagaaagaaaggatgaattaaatcctcagttaatccccaaaccttcttttaaccaagtttcagcttcctccgcacctcacccacgtcctttatcagagctgttataatgcagaaaaggctgaactgagttttacctcatttttccatccactattgcaagagggttggatgggatgaccttggaggccagtccagccctgaaggaagtgctaatgagcagtgaaatgacgacaaggccagcaacagcaacgagaaggtcaggaagcttctgaagctgcttaatccaccagcaagggagatttgactctactagaggaaggttttattacagttttagaaaagtgtcaaatgtcaaacaaggatgtatttccccttatctgcaaaggaaatcattgagttttgaaagaataaaagagcagccctggccttacattgccataggtgtgtcatcaggacgttttcccttttcagatctcctgatagcccagaaatatatgcagtggaggtacaagacatttagaattaatgttctttcctttcattattaaaaaatactgacaagaggtatgaaacacacgaatatggaaaacctgatcaagccataatgggcatgtgaatacaggcaggtctgcctatgtacatacctgctgcgttgcttttcaaaaaggtgaagaaaagcaggttgttcaactttaggttacctacttcatatggtatatcaattaaagagagagaaactttaaaaatcctattttcatgctgttaggaaagtcaaggtcatacaaagattatcctttgttctcaatattaagtatgtggacctagaaaaatggacagtacaaatccataacaaagagagcccattcttgaaatatgcttttcccttttagaaagatttgttttacaaatctctcaaaaactagctaatgctcataagctaaagcgtattcacaagtagatgtaaaaatgcttaactttgtctttccactattgtttttgtctgaaatcctcatcacattaaagaaaggtgattgattgaaataaactttcattcataaagctatgttacatgtgtctctctgttacacaccagagctttctgctaaagggtttatttttttccctcctatcacagtcattaactgaagagtttcagctagttctattaatggaacattttacctaatacc

SEQ ID NO: 588104 - DNA, 4001 bp, Homo sapiens
ccagggaggagacagatgtgcccgtggcctgctgaccagatggctagagcagccagggccagggcagagaggctcagggattctgcagatgtccagcaccaacttggcagcccctggcaggccaggcctggagctcaagcctctgttcctgctgagtcagggcacagaggggagcgagagtgggtggagcagcagagcccccctgggaaactcccggcgggccccagactttgtgaggctttcctaaagcaaggctgggcacctagcctctgcacaccagcttccccagagcccatcctcggcaaacagaggcacctccaaaaaggggaggaggaggaagctggggcaccattccatcaggtcatctgtgtcttttcatccatgcccctgcctccatgcagcagatgtcctgggcccacagcagtgccgggaagacacttctccttccctctgtcctccctgctggaagaaacttgtgagttccttcagctgccttcatgagaaagttctgccctgtgtctgaccacccaccagaaaggctgggaaggaaagccaccagtaatagtagtgaaagcgataataccgtctgccctctgtccagcttgtcctacgggcccagagctgtgaggccagatccacctttatgatctgcatttcacaggtggaagaactgaggttcggggaccaagtcacctctccagtaggcaaggctgggatgccagcgctcctgagtgtcgggttctctcctctgccgggttgtttaagtttctctccccgggaccctcgggcaggcaagtcttattcatctcattctcctgctggggcaactgggatgcaaggtggctgctcctagtcacagggccacctgcggtgtggaaccaggactaaccctaaccctaacccaggcccacactgccccctggggtcgctgtgctgaatcacagacatggtggcacctgtcacccagcacacacacacacacacacacacacacacacacaggcacacacacacccagtccctctcacatgaccggattacactcgctctgggtgcctctgccatccccttcctctctcttctggtgaccgccaggcctcgcaccccttggcacagtccccgagctctcctggcgtttgtggcctcacatccagccagcgccagggtgactaacggtttcccttgggagggaccccacagccgaccaacacaaacacccccagtgtcttctcttggctcagcaggacggcacaggctgcaggctggccacctgggagacgggtctgtggggccagccatcccctggctctgtgacctcctgcaggtgtgtgaccctccaggccccagctcccctggccagccacacttccacaccacccccaccccttaccccagagcctgcagacttgaggcccacagggagccatgactggcacgtagcaggtgctctggtagctcctgatgccaggggctccttaccccttagagagtgctgttgaggtgagtcccccactctccaggatccctcttcggcctgcaaattcccggcctctcagggccttccccatgtaggatggtctcagcccacacctaccggcacttgtaggggtgttgcagccgtatggccctggtgctggagacaccacctgcctttagaaggggattgttggccaggcgcagtggctcatgcctataatcccagcagtttgagaggctgaagcagggggatcacacgaggtcaggagtttgagaccagcatggccaacatggtaaaatcctgtctctactaaaaatacaaaaattagctgggcgtggtggcgggcacctgtaatcccagctactcggaaggctgaggcaggagaattgcttgaacctgggaggtggaggttgcagtgagccgagatctcgccgctgccctccagtctgggtgaaagagtgagattccgtctcaaaaagaaaaaaagagagagaaaaaaaagaaggggattttctccgccagtgttttccagatatctgaggagcttagaaataggacagcaggaatatgtgtgggggatgcccgggagggtggggttccagggaaaacacggcggggatagagaagcaggcttgaggcagaggggctggtgggccgtggctgaccactttggaggttccctggggaggatgttaggctgccgcagtgggagcagggcctgtcctcacagcaaagtggccacagcaggctcgggagtttaaggacgtggcccgagctgtcgaggtgggtcccctctctgtcacccagaggcctagcaggcctggcaaatgtatgtgtgtagtgtggttcacctagccgatagggctggccggccacagcctcaagagtggcccaccaataccaccttccctggcatcctgcggttcttctctgttgccagcccaggacccagaacatcctaggagcctcctgggcagacccagccagagttctcacacctgactgggacggggccaccaagggaccatgtggccagctgggaggtggctggcagccccggaagaggaccaggactcagaaggcagccccagggaaagagcgagggggcctcagcaaccccaagagccgtccctgtccccgagcttccttcctggcccaggatagaagccagctgtccctgagacccccctggggctggatatacgggaagagcctcccccgccttccctggctggtcccaggtccatgcacgaccactggctggccaggtcacttcaggccacttgtccctgacaggccgagtttcctggtctgttgcacaaggtcaaggtccttttttagccccagacatctcacaggcacactcaagagacaactgagacaaaagcagaggtgggggctcctgcttcccctcttctccccagcagccctgaggccccttctgggcaccaggactcctggaagcatcatctgaaagctggcggaccggaagaaccccagcccccagcagcccctcgggctctgctcgcacacggccatgacctccagagatgccccgtgtcagggatatctgctgggggcaggaggacatcaccaagccagtgagctctttcttccatgccacccacagtgaccaggggcgggcagccactggtgtcacagccaggtgaagcaggaaacccaggaccttggatcccgacactcagaagggccccgtctcagaggcttagcgtggaggctcagcataggaagcagcagctcttccaatagcacagcaacagcagcctcacgcgtgagtgcctggaaccggactctttgggttcaaatcctgactccgtctctctccagctgggtgactttgggcgagggcagaagcttctctgtgcctcagcttcctcacctgtaaagtggcggtgataaggcactccccatgctggactcttgtgaggctgaaatgagtccatatgggagaagggcctgggatggtggtggagaaaggaagggctgcacgtgctttgctctgagcccaaagggtagcccggggccagtgtctactctgctgtcatcctccatcctgacaatgccacatcaggtaacactgccacgcccagacagagaaggaagctgaggccaaggcttggaccccgcctgagtccaagtggactttctcagcctggccaactttctcacattgtctctcgagtgtgcctgtgagatgtctggggctaggatggggtgcctgtcattggtccaggatggggtgcacctgggtcccaggagagcccagagcagcaggacgtgctcagcctccccaccaggaccagcagcgggaccctccccgatggcctccactgctgttcctggagcccagggccttgcgagccctgactcagcttctcctttccctgcaagcccagggatgtggtgcccaagaggggcaagtttccacgtagagaggcaagctggggcagacaagaggctgggaccaacagggacgcagggcctgcaaaggggtcaggagcag

SEQ ID NO: 588105 - DNA, 4001 bp, Homo sapiens
cacctgggtaggggactggcatgggccctcagaccacaacaccccactcaccgtggacccggttgacactgtgtccccagctacaactgccagaaccagcaggaaccaggcccagcaggaacattgccatctgccatccatcctaggaagcaaggccactgtcaccaccaggccagctccgatcctcttccagatgaccagggtacgctttgggaagagccctcggggcccagccagtgcccaggcctcaaggttatctgggactagttggtcgtggttgtctggcagaccctgttgggaaggatgaaccccccgcctcagtctaggcttagcaagaaggagcttggtgaatgattagtaatgcctgcttcaggcaagacacccagcggcggtgtgcgtgctaagcctgtgccacccttgatccaagggcatgcagggaagcatgccatgctttgcctccaagtcctcaagccccctagagaagggctgtggagacagccagcctcggctgagggggctggggacccaggcggggggaaaggctctggttcgaagggatgggcctgggctcagtccagcgccttggcaggagcaccttgggattttaactggctcagctcttgctggcctcgcaggagaatggcctctgccactggctgctagggtcagtgcatggggatgggcttggccaggtcccgggggaatgtgcagcctcgccctagaccagcagctccacagtcagcatccagcaacagccggcactcaggtgaggcagaacccaggtacctatgccgcctcccgatccccggagagaagatggaattgggggaggggcagggcaggaggaggtgcagtttgtgccagcatgtcagcagtccagggccacaaggctgacttcctcccaacagccagcacccttggctcaaaacacctgccaggggtcaaagcaagcccattggaagggactgtccagcctccaggccctcagctctccccaccccctcctcagcgtcgaccctgccctgtggaagggaagaccagagatccaccatgacctctgtccaggccttgctcaggtgctgagggtcacttgccagcgagttagagaagggatttcagaaaccacgcagcctgcactcataacctggagcccagagaggggagccaacctgctcaaagccacacagcaaggtagcacactagcaaactcagggactcgacccccacgcctggccaattccaggggaagaaggcatggaggtcacccctcacccctgccaggccagaggccaactcgggctctgcccctccctcctcagcagcctccatccaacttgaagagtttccttgcaggcccggcacctgcagattttcaggggccactccaaggacaccactgcagcccggacgacgcagcagtgcaccctggagtggggagcctgagtctgacctcccctgcccccgccgcctgccccccacctccctcccctgcagacctccatctgcactctcagcctcacacccacaggagccccctccactgtgccattggctaacgggtgccccagcctctgcctgccggctgaagacaggtgccagccggcctcacacttgcttttttcattaaggcttccagacaccactggcttctggccaggcctcgctcacggggatccatccctccctggggtccaaaagcagcggctggcggcagcagagaggtctgccgtgcacacagagctccgggcgcacaaggctaggtgctgggaggccaccctgccccgtgctctgcggcccgacccctccccacaagcctccccacgttatgtaacggctccagagggcgcggggtgctcctacccccagccccactctgagcagtgggctggcctggtggacgctgcaacgtgagggggacggggacgaggtggcctacctggcttcgggtcagcaggttgtcctcccagagaaaggggcgagcgctgcggagggcagacggcgccaggtgcgctgtgcgtgcgggggcggcgtgagtgcagaggctgcggcccggcctccctctccccttcccctcctcccccgcgccgcctccctctcccacttcaaagagcatccaagagagggggttcccgggaggggcgcagcccagtggcggctctgcgccggcggccgcctttatagctgtcaggcagacggggaggaacactcacacttcccaccaggccgctcccccgcccgcgccggccggcctggcgcacactttaacccgctctgcgcctctggagcccggccaggccggcccagctgcctgttggctgctgccggcggcggcggcccaggagcggcgagcagggaggccttcttcccgggtccagaactgggggccacatgtcgggtgtccagacggagcagccgctggcctgaggttaccggggaggctggcggtggcaaagccccagccccgcctgtccggcttctgcctccagagcgggccctgtccctggggctcctgagaatggggtctgggatgtatgaggtgtcccgtctgatggctccgttgtacggagggaaaggctgaacttccgggacgaccgtgccccaggtcacgagcctcagaaagctcccgagatgcaggggcctaagcaggtggagggacgcagggagacccagcgagaatgaaccaagggctccagggaggagacagatgtgcccgtggcctgctgaccagatggctagagcagccagggccagggcagagaggctcagggattctgcagatgtccagcaccaacttggcagcccctggcaggccaggcctggagctcaagcctctgttcctgctgagtcagggcacagaggggagcgagagtgggtggagcagcagagcccccctgggaaactcccggcgggccccagactttgtgaggctttcctaaagcaaggctgggcacctagcctctgcacaccagcttccccagagcccatcctcggcaaacagaggcacctccaaaaaggggaggaggaggaagctggggcaccattccatcaggtcatctgtgtcttttcatccatgcccctgcctccatgcagcagatgtcctgggcccacagcagtgccgggaagacacttctccttccctctgtcctccctgctggaagaaacttgtgagttccttcagctgccttcatgagaaagttctgccctgtgtctgaccacccaccagaaaggctgggaaggaaagccaccagtaatagtagtgaaagcgataataccgtctgccctctgtccagcttgtcctacgggcccagagctgtgaggccagatccacctttatgatctgcatttcacaggtggaagaactgaggttcggggaccaagtcacctctccagtaggcaaggctgggatgccagcgctcctgagtgtcgggttctctcctctgccgggttgtttaagtttctctccccgggaccctcgggcaggcaagtcttattcatctcattctcctgctggggcaactgggatgcaaggtggctgctcctagtcacagggccacctgcggtgtggaaccaggactaaccctaaccctaacccaggcccacactgccccctggggtcgctgtgctgaatcacagacatggtggcacctgtcacccagcacacacacacacacacacacacacacacacacaggcacacacacacccagtccctctcacatgaccggattacactcgctctgggtgcctctgccatccccttcctctctcttctggtgaccgccaggcctcgcaccccttggcacagtccccgagctctcctggcgtttgtggcctcacatccagccagcgccagggtgactaacggtttcccttgggagggaccccacagccgaccaacacaaacacccccagtgtcttctcttggctcagcaggacggcacaggctgcaggctggccacctgggagacgggtctgtggggccagccatcccctggctctgt

SEQ ID NO: 588106 - DNA, 4001 bp, Homo sapiens
cccctgcagaacaagccaggctttctcacacgaggaggccgccgatgaagaggcccgtggcctgtggcctggctcagtagtggggtctgctccagggtctcctaagtcaggtgccccatcatttctgccaaaagaacaggaccccgtcccctgtccacaccccaggacacgcccagcacaggatgccctgcaggcatcagaaccacacaagccatttcctcggggtggggggcaccccaaggaacccacagactggcccctcctcagctgggaaagccgcaccctcgcccctactctgaagcaccccaggggctgaggggggcccctcacagagacccctgcctacaggggatcccagggccagaaccacaggtgaggccttcacagattccagcacaggtgcccagagcccagcccccaggaactccctgtttctgcaaactgccttcctcgctgaagggtgctccactggggacgtcagcgccagtcaccacctgggccagccctggagtgtgcgctccccgggaccccggcctgggccacctggcccacatcaccactggtcacacacgtctggctgagcagccagcaggcccttctcggactctccatgctcaccatcaggcccagggtcctccttcatattcctggagcttctggggctccgttggaagccatgactgtaggcccgttccagcagcctcagtgccctcccagggctggcaaggacagcgagtgcagggagctagcaaaccctcacccactgcccctggaaccacggggaagggggcctctggggccacaatgcccccaccccaggccattgcaaaagccactggctgggcagtccaaacagggcagggagaaatgtagcaacagcctggggacggctaacagggagagggggcaggcaagagccttctccagcagccaccccgcccaggagcaggcagcccccgccgtctttggcagcccagtctgacctctggcccccaaccccagcctggcaaaaccaagctcccaccttctggaaggcgtccaggggaaaatttcagccccgccgaaccctagtcctaactcttccttcccttcgcttggaagctgggcccccggagctgtaggccaggggcgcgctccccagcacggaagcaggtcccctccgggtcccccacctccctgcgaagaggaaagggagagaaaggggaacccgccccacaggtgcgcccatcaccgggcggacagtcaggagggggtcggagggaggccgaggggtgcccccacgccgtcgtgcgccctgatcaatagccctggggcaagtccccgccgccccggcctcggtttccccgctcaggaagcagggctgagcctctcccagcgcggaccggccccctttctctccgaaagctgctccacccccggaaccccacgccgggctgcagggacgcggcggaggccgaaaccggtgtagacgcccggggccagggcggggggtggggtgctgggcactgtgacgccggctccttgaccccgtgactccgggaccccctgactccgggaccccctcctgtgcctgccgccggcccaggcgcgctctccccggagccccggagcggggcgggacgggcggggcaggaaggagggaagcccagaagaaagttagggaagcggaagcggcgcggcggttccccggcccctcccggcggcccccggccttgcctcatgttctccaccgtccggccgccgtggcgcagcaggcagacgagcgaggccacggcggacaccgtgaagcacagcgcgcagtacagggcgaccttggcgtagaactcggccgcgcggctcagctgcaccagcagcagcagcaacagcagcgccgcggccagacacggccacagctccatggcccggcccggcgcccgacggcgccgccagctcgctcccgctcccgctcccgcttctcccccgcgcgctcaggccccttattgcgagggcggcggggctgggcggggcggggcgcggcgtgggggaggagcgcgcggcagggaagggctaggtgcggcgccccgccccgacactgtccccaacaacgccccgacacggtcccctcaccaggccccgccccgccactgtccccaaccccgccccgacacggcccccccttcccgccctgggtcacccggcccggacctcccctccacgctccctccccacagccttctgccaggttaccgaggctctggcgctctgctcccaccctcccggtcccaggggacccccccatcatggcttgccggtggctcgggctctggcgctgccccccatggtctgggcctcctgccccgcccggtgccccctccccccgctgccggggcagccacaggctcccgcgcgcagaaccacagctccccaagggcgtaaaaccagcggggatgcgcccgtgccaggccggtggccacgcaaagggccgccggaaccgcccccgagtgaccagtggccacctggcagaaagcctggctcttagggtgttctcggtcccctgcggggagactcgtgggggcgcgcaggccaactggggcgtgtgtctgggcggggctgggttgccccaccctgggtgccagaagtagccttgtcaccagggacgctccgggggcaggcgaggtgggtgtcaggtggcggcgttcacatccgcttggcagcacggccagcgtggcagggcaaggtgcagctgggacaagggcagcagtcacctggcccggcccccacccggcgtcccacctcagggagcagatggagattgaaaagcagtttcctggggtccctcctcatagggactcttgggtttgctgcagttgcgggagtgctggccgccctgcgctctaacgggtcagcaggggagcacggcccctcttttttcagatgcagagttgagctgttaaaacatttccctgaacattgtaaccaccccccaaactgtactgagagaatgacaaatacagaaactgctcttcaaatgaatggggaactgcggtcctgaaggacgtggggtctcgctgcctgggctcagcagcccctgcccaggcggtcccagcttttcttgaaagtggagacacatccttttgccttaggcctgtaggcatcttacagcgaaacccaggagagcattttccagcccagtctccttccagatccatatgggcttcatctggaatcagcttggagggcctggcttgacctctttccacgcttggagccggaactgcacaccccgcagccgggaggtctgagagctgcactgctgtgcctctgagaggctgagaggtggctgctgacggctgcggggttttcatcttccagggcagatgaggtgggtgcaccctgcagacaggagtgccgctgccgggagctgggggatgcgggggtgtgggctggggtcccaggtggacttcctggaggagtggggcttcacagcaccttcagctggaggctctgtgcacccaggtcccgagcaggttgtaccctggctgtggaatccagtcctcacaaccatcaggcctgtccaggggctttacatgccagcccccttcttgtcctttacctcccagcccaccgacctttccagggtggccaccatcttcctgcacccctaggtgactgtgtgtgtgttggacacctctccctcctctcctccccccggaatggagcccgtggggcctcatctgttttgtgcaccatgtgcgaccagcactcaggccaatgtctggcacatagcaggtgctcagcacacactttccatagtagcaaaggcatccccattttacagagggaaaactgaggctctcaagggtgaacaccagacagccgggacgtgacagaggaaaagaggctgactctgagccggaagactcctgccagggctggcaggaacagtgccagggcagcacacggtgaccctgttgcctccccagacaaggtggggttttgcccactgctctcctgaagagggt

SEQ ID NO: 588107 - DNA, 4001 bp, Homo sapiens
attacaaaatttcataactgttggacctcttttccttctgctaatggaagtaaaaccattattatatagcagcctagccagacttttctaaagagaagaatgcctcaattcggaaaagctttataaaaattgcttctacaaaagtttaattaatagatttaaatgctttgcaatgttggccaaatacgagggtagttttaagcctatccacttcatttccgagttcagagtgagtctgcagttgtaattatgtgattaatcaattcaaggcagagttttgtgatcattaaaaatgaacctgtaacttcaccatagaatttaacttaagagaagtggaatgggaaaaagagcaagtcatattagaactctgcctgcatgatgagaaacagtgggtaaggcacgacttattatttcgcagtaattctacataggaaatacagatctttcagagttttgtttggttttgacatttggcacatgttttaaaataagcaccatttaaagttccttaaataaatcatttcttttttggcctactgaactaaaaacattccacaatacaattacaaaaataactttccggttttctcagacaaccagtttataagaataattcagaagttcacaaaggataatttgatttacataaagcttaaaaaacggacataaaaggtaagtgaaaatgaccgattaagaagactgttaaggtcctttctaactacaaattgtcatgcattgtaattaaacacaactacaatgttaaacacctgaaggaaaaaacccacatagaattaatactgccaaagaaaatttccgctatcttcaggcacttgagtaagctatgttaaaacgggaaatgggctttaaattatcaacattcacatcgattacactatgatgcatgaaaactccattctacaatgagtaaacgcccaagaaaggaacccaaccaactccaattgccctggtgctcgtaagaggtttataccgcacaaggggtaaaacaacggtagagtcgagcaagcctttgggttacaacagtccttgaacacttgcaattgagaacccgcaattcaggaaggaagacactaaggaaactctgcactgtcatccagggtgatctgattcaggttcaaaccaaacgctcaaggcgacaagttgtaaacagaagacacacttcagctcaaaccacccagcgagaggaagcaaacgtgcccatcgccgatgtcacagcaaatcccaccttgctggcgctcagtcgggaacgctagaattctcgaagcacaggggcccgcgattcagcggcccgctaccactggggcgggggagagcggggctgggcgcgcccgcccccggccctgcagcccctcggctggactccccgcggcgccgcgagctcgggcccgagagaaagggctgagcagaaagggcggcctccgcccagagaccgcgcccgataccctccgcaaggtctgggacggggatccaccgagggtccggggactggggaaggcgttttccagacccagtcaaagccccaccccgtcagggctttccctcaagaccgagtgcgttcccctcacgcgtcacatgtgtaacatgcgttacacaacccgtcaggtaaggggcgcagggatccggggtcgcccctcctacccccgggcgccgtcgctcgcatctcccgcggcccggggagagcagagggacggccggccgggacatgaggactgcagcagggcgctcaccggctcaggatggggcgctggcggggaccgcgcagagccgcagcacccggctcagcacctggatcacggcggatccctcgccgcccgccgcccggtgttttcatacaaaccccggtggcaggcgaggcggaggcggcggcggcggcagctgcggcggcggcgctggaggcggcggaacctgtccgcatcccgggcaacgtcagcgcggcgccccgcccaccgcacgccttgccagccggctcccagcacgcgcagggagtgggggcggggcgtgcgaggccgcgaaaggggcggggcggagcgcacgccctcttcccgccgcgtcccttgttacctccgtgcgcgctgcgccccgcctctctgcgcgcctgacgggagggagcgcgcgcgtgggggcggagcgcgcacgggagcgggaattaggggcgggtgttccgcgcgctgccggtcccttgtacccagcagccccggccaccgcccctccgtaccgaactgcgagcgactccccacgttcttcaagtcatctttctgtacactcccaacgagggccccagccttttcccggaactaagcccgcgcccaccccctcccccgccatcaatcagtcactttcttaggaagggttcttaaagctccccacgtgatcccggggtcgcatcaaacgctggggactgcggtaaagcttagacctttcctgacctcaaggagggtccataataagaggctggaagggacatgctgttactacaatcgggctcccagaaaacaacaggattgcaccttgtggccaaatctcagtaaattagatgcctagtgctgcagcgaacaaaatagcatgctgatttactgttttttgaaaaagtgcctgcatataatcaaaacggtaatgctaagttggctactgaaggcaaaggcggaatgttttatctgagccaaagtaatgtgtcagagaaattactaatacacccccttctgttttgactgtacttcagtgtactgcaatgtattgcaaataaatactgacatcatttactttttcacgttgcacaagaacatgtttgctactgtttatggtaaggaatgtaatatcacaactagataagggaatgcattgagaactgtgagatttttgttttgttttatgatcttgttcaaataaaattaagcaggtgtgaaagcaattcaaaaagtaacccaaggtacaccacagtgcttcttacagtttgcccttggtagatgtctttattcagatgaacaagaaactgccattttataaacatcgtagtttccctcatcgtgagcactaaaagataggttacggtatttaaaataattttgaaacaaccaccaccccaaaccacccaatcagaaacgtattatctgaaaatacccaataataatgtaataattttacaataatgctaaatatgtatgtaatatacctgaaacttttcttaaagaacatgtttctaaatgagtcaacctgcaatataggaagatattatgtggatgtgtgtgtttgtggaatttgaatcccactttcacaagcactgttagcatagtttgatgaccacaacacagacccaggagattaacccacacaagataaatagcagcattacatagctttgaaatgattccaatcacatagtttgccacaagagtgagtgatttatgttttgcggtaattaagaacttagagctactcccccaccccctgggaatgtgacatcactcttcatcagatcccacgtgtatgaagttgaaataaacttcacctctcctagctaatgtgacgttacaccttatcaaacaccatatatatgttactgacctcaactacaggatttcgaaatacatataaactcaagaatttgcaagatactttgagagctcagcgggtggcagatcgcgtgctctgtcagccacttccctgaacgctaccagctcaggctgcaacagggccacaccctgttagcctttaagctttgaagcctgtccaccaacactggcacagccctctagcatcgtgggaccttgcatatcctcaccgatctcctgtatgttggacaccatctctcccgagaacctcagcctccaaaaggtaaaggtacacctcagttgtttttctttttctttttctttttctttcttttttttttttttttgagacaagactctcactctgttgccaaggctgtaatacagtagtgcaatcatggctcactgcagccttgacctcccaggcttaatgaa

SEQ ID NO: 588108 - DNA, 4001 bp, Homo sapiens
gacccagggggctatatgaggtcggggttccagccttctgtccagagggctagagcagccaagccccaggctgggcaggcacacagtgatctgggaaggagcccagcagggatccgagacccctgagcaccccagccagatgtccgggcaaccttccagttgtgctcaagatgcccccaggaagcagggtgagggtggcggtgaggaggccggagcttacctggagggggaaccctgaggtccccagagccctgtagctggggaccgaatgggagtcctgtagccagcggatggaaaacagacaggctgcctacatccaagcagtccaagaaaaccaagggggaatcaaggctgcacactgctggcaagaggcaataccacaacctggccccaggctcggacccgcctcccacagccttctcgggctctgctgacctcaccagcggcccacttccagactgtcagctgggcttagaccctgggtgtccaggggaccagaggagcctgcagggggaatgccaagccttgtttcagcgggcgtgcctctgccaccagttaagaaggaaactgggagacatccacctcaggaaataatgctagttctgtgagtgcttcctgaatgctgggtgctgggccatgcaggccacgggccttccctctctgagcctgcacaatgccctgcttggagatgagaggccctttgctgaggaccacagagctggcacacagtggaggccagatctgagcccaggtcttgcagaactttaaagccactggctgtgctgcctttgagctttggccaacccagacaggtcctgatatctttccttatcttctagaatctatgtaaatttatggagctctcactggatgcctggcaacaacaggaaagatttcttttgagaaatccaccaggaccagcaagaaaagcattgaatcccttaaggcaatctttcctgaaagttggagtgaagaggagtggtgtgtttgagggaggcgggaggctggagaccacggggaagtgccaggatctctacgcccatcagagtcttctatttgtacttttgaatcccttataacaacaatagctaaggccaggcgtgggggcacatgcctgtagtcccagctactcgggaggatgaggagggaggaccgtttgaatcccaaaggtggaggctgcaatgagctgagattgggccaccgaactccagcctgggcgacagaccagcaaatgacccggagcctgtgttctgagctggagagatcactggcctagggcccttcccgcgccaaatccttgggctgctcccaagcgggcttgcggggagccacgagccggctggcatccgagctcctgacccggccccacctccccagtccccagttgcaagagtaacaacttgcaacccgagaccggaggcgggaggcggaggcggacctacctggagtcggaggcgacggggctgggggcggagggaggcacctgagggaagcccaggggaagggaaggaagagggtagatctggaggcgggcacggcctcgcggaaggagaggtggcacccgcgcagcgcgcggctcgggactcgcgtgctgccctgggcgcggggcttacccggttgatctcggccagcctcctctcctgccgggctttgagcaagccgaacgccttccctcctggaggagacaaagaggcggcctgggaagcggggtcctcttcgggccacgcgcccccgtccccgcccgcttcccgcgcgcggtggaccccgcggtccgcccggcgcgcacaggtggctgctcggggacggcggcgcctaccttggaacctgttgctgagctcgcccgacatggcgagcgcggggctcccgccggctccaggcttcgcggacgcggcgagggacgaggaggaggcacaggcgcctggtccgggctccggctagctgcgtgtggccgcgggaccgaggggcggaggaacggcgcgggcggccgacacacccctccctccgctgccggcccctccctccctccctcccgcctcgcccctcccctcccgcctctcccctcccctcccgcctctcccctcccctcccgccacccgctccgcgggcttcaaagcggctattatgcgggacgctgagcccgccggccgacccctctgctggaggacgcggaaagtgcaaagcgcggggcggccgcacccctcctctctgcccctccccggacctcagcaagtccctgccacacaaatgaaatgcgaggatcttagcatgaactccatggggtggttgtgaggaccaagtgccgtcggggagtcggcgctcaaacatcactgctgcctttggggcagtgcggctgctgtgacaacagtggcccgtcaaatcaattggaatgaattcgtgtcttgttaataaaagagatttcttgggcactcacaggcactttgcaccgtacaccagtcatttcattctcaaaactccatgaaataggacttggcattcccatttccagaagagaaaagtcaggaagctggagctggggcgcaaggccaccaggaggaaagaccagcccatgactccaggaagagcggagctcaggatgcaggatagggtacctgtggccagggtgaccatgaagtctagtgtccaaatcaggacagccagagtcaagggagcactcctcataatgatgctgggccacaggcatagacaggcgctgtccagggcaggcagcgctaggaatggccccaccgtgcatctgactcctagggtagggaccctgagatcatctttcttatttatttatttttttcgaggcagagtcttgctctgttgcccagagctggagtgcagcggcttgatctcggctcactgcaaccttcgcctccgggttcaagtgattctcctgcctcagcctcccaagtagccgggactacaggcacacaccaccacgcccagctaatgtttgtatttttagtagagacggggtttcatcatgttggcaaggtttgtctcgaactcctgacctaaggtgatccacctgcctcggcctcccaaagtgctgggattacaggcgtgagccaccacgcccagccgagatcatcatttttctgtggctgtccctggggagggaagtgcccagcaaggggctaggcagaatgggatggggctgaggtcagggcagcagtccagggggcaggcccctcctccccagtaagaccagcgcccacctctcctagctgacgctcctctgtccactcacccaagggtttggatttggccaagctgcatgaccttaggcgaggcacttgatctggctgagcttcagtcccctgatcttcacaatgaagtaacccagaacgcactaagcaggggcttttgtaactttgatgacttgctggatggtttaagcagagagtaaaagcttagcgttaccacccttggtggatgggagctgacttaggacagagccctcataatgcacttccctctccaggctccaacagcctattgccctggccggttgggctggttggctccagtcagccatcctacagggcaggggccaccccaccttctgctcagctgctggactgcattgctagccagatgttcaacagctgccgcattccacccggcagcggccccacctctggggccagagaatagatcagcacatgcaccaggcatgatcagactgcgtgagtcacaacatgtcaggcccgagttctccacccgtcggggatgctgggactgagctgagctggatcccacggcttgagtggataaaggctgagtgccaagagcaggcaccaggacgactgtgtgccatcggctgagaaactggagggaggcgggagggggacatcagaccctatcccagaggtcttggaagaactccatattctcgacatcacttacaccagacgccaatcaccaaactcactgtgcagcagcagctcccccatcttcggcctctccacctctgcccagacatctagggacca

SEQ ID NO: 588109 - DNA, 4001 bp, Homo sapiens
caagccacaggctgagtcagtgtgaaggctcctctctcctctccacagccctgcacacccactgcccaaccctcccctccccaggctctctccgtctgtctcctcaccactatgtcctgtgctaagtaaggggcctgggccactgcccccgcctccacatgggccttgaagcctccacaccctgccacgcaatttgcaggattttctctggcaagtatcagaccacatcacacacccgcttacaaccttgcatgtgtggccctctcggctcccagacaaagcctgggccccttgacatagtggataggtcccggtgagctgacctctgctgccctctgcaaccctatcagctgccactggcagatgttgtacccaatgcctggatgcctttccccaccttgctattgtgtgggactcagctcaggtgccacctccttcaggaagccttcctggactctgccctccactcccacactggcaggtgcctcctggaaacctgccctgcactgcacaaccacgctgtactgggcccctcttctgtgctgcgggcctgggatcccattgactgggcctggcatgggctgagcacagggctggggagcctcgttccatcctcactgccatcttgggaggaaactgaggcatggggaggaggacagactggttcgagggccagctagggtccaactcggccctgagtttctgctacgctgggcctggcacccagtagcagctgaagtggctttgctgatgcccctgctgccccaggcaggagtggcagccacttttcctgctgagtgtgcttcagcgggggtaggagctgccaagtgcccctcagcagctgcccatgggagggggagcgtcctgggccagggacaaccacagtgaagccctgagaagtggcctcgaccccgccctgccccgcccccctcctggtaatctaagccccctccgccctgatggcacctgccacttccttgatccaaaataacttgggtcgtgaggaggcctcacagaggacaggggtctaggatggagttgggttacgggctaagcacccaggccttataaggcccctgggtcaaggccccagcgactcctaatatgactggatggtctgctaaggggcctgtggggccgaagcccagagggacggtgacttaaccccaatcacaagacaaggccaaggcaagcccaggtctcccagcttctgacccaacgtagtcggttcccagtgggtggcaactgactagggttcgaatcccagctccatcactcagctgtgtgaccttgggcagttggtgtcccctctctgggcctgtcctgctgctgctgaggagtaccaggcggccactgagcagtgctgtgggaaggccccaagcgctggccctggtcaggaggctagggcaagctctgagcatccagggggtgttctccaatgcacccagcactagaagtggagtgacacgatagccctacggagcacagaggctgcccctgtccaggtcctctggggcagggagccaggccacagctctccctctctgggcccaagctgggacatgccaagggcagtgacctggagccccgggagtgccagccagaacaaaggggtgactatctcggaggctggaaggggctgcaacacacacaaacacacacgcacacacacgcacggatccacaaaggcacaggcagcgaggcacagatccccagcgcccggggaacacagccacgcaaacacacacggatcacaaccacggatacacagccgcacagcccccagggagccccgcaccagcacgcccccgccctcccccggtgccgctgcccctccccgcagaggcgcccccccagacacgcgcgggcacgcactgacctggggaggggtgcgggtgggcgccggggccagtgcgtgccctgcccgtcctcgcggcggccggcaaaggcgactatttataaggctgtcagcgcgcggcatgccgggagccggcgttcccgaaggcagggagggcgggaaggagggagggagagcggaccagggaccgggaagcggggcgggaccgagcccgagcccgggtgcgcggcgacaccgcacccggcaccgtgtgccccgcaccgtggacccccaggtggctgtgcccacacacgcgaactacactttacagtttgccaagagttttccattgcgataccccgactgtgctcaaggtacactccagggtacaaggccaggctttccctatgatagctggagaaactgaggctcagagaagagcggctctttccgcaaaatcccacagcgcattggtgccagagagaggccagaccagggagcgagagggctgaggcatcgactcaggggctttgctggccacagtccccaagcccgccctcagagcctgcccagaggccctggccgagacccacctgggactcctcttcccctgttgggagggacccttcgagctcctctgggactggaacccgccaggaccccaaagaccacccagtaaggtagaagattatagaaaaccagccctgctcccctggagttgcccgggacattcagaaggctgtggatagccagagaggggatttgcggtcttgataagaagaatagctcccataatgagcactcactgtgctaagcagcagactccagccgcatctgtgaatccttagacacagcagagaacgggaggcgagcatgtcaaataccttgcgggaggttccctggtagaaagccacgtgtttatccagcgttttgcagggagactggcacatagtagtaggtgctcagtgatgtagccgggcagggatgggagcccaggcagcagccccagatggtgaggtgggttgaacttggaatttgtattataggccctagggagccataggaggtatttgagcaagagagtgagactaccaggagattgagaccaccttcagtggtggtgcctcagcaaccacagcagccaggagaccaggaggcctgggtctctgctacctgtgatgtcagataagtccttacttcttgggaccttagtttccccatctgtgggggggcaggtgcagtggggtcagaggtgttgcattagaagctgtttgaaaggccctctcaagggtgtgtgcattggcacctttggggaaagcaattgacaaagtaaatcaaaatttcaaatggaccgggcataatggtcactcctgttaaccccaccacttcaggaggacgaggtgggaggatcacttgagctcacttgagcccaggaattctaacaccagcctgggaaacataacgagatcccgtctctaaaaataaaacacacacacacacacacacacacacacacacacagtcttcaaatgcgcccttctactttaagaaatttgtttcaaggaaacatgtgggcacaaatttgcataggaaagttttaaagtgccagcagggactcactgggatgatggcacagccacggtgggtgaggagttagcaactttcccatagggtctgagtgagaaaggaagtccaagttgtttgtggttaatgggacaagaggcttcagacacccatagcattggtaagaaataggcaaaaaggctgggcgcggtggctcacacctgtaatcccagcattttgggagcctgaggcgggtagatcacctgaggtcaggagttcgagaccagcctggtcaacatggtgaaaccccgtctctactaaaaataaaaattagctggacatggtggtgcgcccctgtaatcccacctacttgggaggctgaggcagaagaatagcttgaacccaggaggcagaggttgcggtgagccgagatcacgccattgcactccagactgggcaacaaggcaagaagagcgaaactctgtctcaaaaaaaaaaaaaaaaaaaaaaaaaaagaaataggcaaaaagccccactgcactcttctgatcccacctgcataaaaatgactggaggctgggagcagtggctcacgcctgta

SEQ ID NO: 588110 - DNA, 4001 bp, Homo sapiens
cctcccgagtagctaggatcacaggtgcctgccactgcgcctcgctaattgtttttgaattttttatagagacgcagtttcaccaagtagcccaggctggtctagaactgctaaggtcaagtgatccgcccgccttgacctcacaaagtgctgggattacaagtgtgaactggttaaataaatcatactagattcagaaaatacatactacaaaaacagaatgaaatggatttgtccgttttcatgtgaaatatatcccagacacaaagtgaaaccacactagtgcagagtatatacacatagtatgctcacatattacatacaagaaaagatacacgttggccgggcgcggtggctcacgcctgtaatccgagcactttggaaggccgagccgggtggatcacgaggtcaggagatggggaccagcctggctaacacagtgaaaccccatcgctactaaaaatacaaaaaattagcccggcgtggtggcatgcgcctgtagtcccagctactagggaggctgagacaggagaattgcttgaacccaggaggcagacagagcaagactccgtctcaaaaaacaaacaaaccaaaaagaaaaaaagaaaaaaggtacacgtatctgcgcttaaaaagtaaacctttctagaaggaaaactctgttcccctccgaagaatgggactgaggtagggaacgaaagagggcgttgttttttatgctatgcacgtctatcctgtttgctatccttacaaaaaaaaaaaaaaaaagaaggaaaacaaaagaaaaaggccttgtggaagcattatttctatgtaaatgggtttcaaaatgagtttcaaaacgggttctattttgaaaagtaaggtcaacattttttgagaaaaaaactcctgcgattggcttttcaaaaacaaccctcttaagagagaatttacataccacaaattcacccattgtatagtgtagattgttaactgcctttcgtgccgagctgtaagaatttatttggcatgagaaacaaaatattttatagaaccatgcacaagaatagccttcgtgtctacgaaatctaaggatatcaaaatgagataattttatgactgcaacaagggtaaataatacttggccttgggaatatgggggaaaggtcagaactacaagatctcatagagcttaaccacaccaaaaaagaaagagaaaagaaagaaacaaagaaaacaaaacagaacgagcagactctagcagggctaatgacagtcttccaaaggcaccagcacgttgaacaagctgcggctcagctcgatggacccccaagagtggctgccactgggaggacttgggcctctgaaacaaagcccggtggtttcctttcatctctgaacttcgagctcgacctaactttccagtcccttcccccaccgccaccccataacccgcccgaagcggcccacggaggccggaggttttggggcgcagtcgctcagcagcccgaggtctctgtcccgggcggcgggagggaaatgccgcgcccgcagccagggacccgcgtgcccagcttcggcccctcgcccgcgaagtccgacccgggtgacagcgcacggccggccctgggcccagagctcccacctgtgccccgcagcatgttgtcccggagcaggtccccgctggagaggtgcttcagctcgaagtgtgtagtgatgcgcgacgacacggtgcccttgcccgagcccggggcccccatgatcaccgctcgcagcagccgcgcggacgcccccatggccgcagactgaggcccgcaccgcgcgggtaccagggctttggcctggcctgcgcgctcacccgctcggcagcctgcgccggccggctagcagcgccactagcaggcggctactgcggttccccggcgttcccggaagtgagccgacagcccctggggccgcccagacagcgcgggaccccgctgttgcgtccgcctctcggctaccccggcgcaccccccgcccccgaccgagcgcctgttcccgcccagccgcgcaagccgcgcaagccgcgccccctctgcgctcgctcggccgcccagctcccacctgcgcctctccgcggcccctctccaccggccgctgggcccggatcccttcggcgcccctctgcacccacccccacgcgccctccactcggctcagatctacctccgcgcctctccgcgaccccggaaccccgcgccctgtccggcccattcccagccggatagaccgcgctcccctctgtccgaccttggcaactcctgcgcgccccctccccacctctagtcgcccctcggagccgcttggtttcgggatccacccgcatccacccctccaacaaccctttcgtagccctcgcccctagtccatagcaggcgctgccctacccagtccttgccggacacaccgcgacccctttcgtgctcccttgacaaccctggccccacctccacctggcgcccactcgaatccgcccctcccttctacccccctggaccgccagaccccccgcttctgcacccactcccgccttcgcccttccctccttcctcctcctcctctgctgccgagcgccctctcttcccactccctctctgtgtagaatcacagggagtgaccttgagccgagagggcctacctcattttacaggagaggaaatccagcttccattgagtgagactcttttataaataacgtaaaagagtgtgtgaaactgtggaggcaggctgttgtagataggcggtcggaaaagctttgaagagatggcatgtgtgctgagtgcttaattagaatatggaagagagagacatgggcccttcctatgtccagttttaggaaaaggccctaaaactggaggtttggcatgtttcaagaatggaaacagaggacaaaaacgttcgagtgagtatcattttgcctgtaaaatgggcatagaggagtagaatggaggagttaaaataatgtagtacttagtgcaatgccagctacggggtcaatgttcaataatggttgtccatttatcatcattgctttgtcccggacactatgctaaggcagaaagaaggctctctgaaaataaaacacagttaccattctcctcagaggtccagaactgatttcaaagaagatagaaatgacttcagggtgagacagtcagtgaatcgtagctgagtgaatggatgggggatttcaataggtagacagcctggtacttagaaaaggcattagcctttatactttctggtgtggaaaagaaagaaagaaaatacataccttgtacatttttttttctttgagacagagttttgctcttgttgcccaggctggagtgcaatcggctcacggcaacctctgcctcccgggttcaagtgattctcctgcctcagcctcccgagtagctgggattacaggcacacgctaccgcacccggctaattttatatttttagcagagacagggttccttcatgttgcttagactggtctgaaactcccgacgtcaggtgatccacccgccttggccttccaaagtgctgggattacagatgtgagccaccgcgcccggcctcgttttgtttctttgagacggggtcttgttttgttgcccaggctggagtgctgtgatgcgatctcagctcactgcaacctctacttcccaggttcaggtgattcttatacctcagcttcccgagtagctggaattacaggcacccgccaccacgcccagctgatttttatatttttcgtagagatgggatttcaccatgttggccaggctgatctcaaactcctgacctcaaatgatctgcccgccttgacctctccaagtgctgggattacaggcttgagccaccccactgtgcccagcagggctcatacatactcattactaagcaagaaagaatgaaaagaatgaaaataaatgaattaaacattgaattcatgtaattgggaaaaggacatcaaaataacccatg

SEQ ID NO: 588111 - DNA, 4001 bp, Homo sapiens
ctgtttgctatccttacaaaaaaaaaaaaaaaaagaaggaaaacaaaagaaaaaggccttgtggaagcattatttctatgtaaatgggtttcaaaatgagtttcaaaacgggttctattttgaaaagtaaggtcaacattttttgagaaaaaaactcctgcgattggcttttcaaaaacaaccctcttaagagagaatttacataccacaaattcacccattgtatagtgtagattgttaactgcctttcgtgccgagctgtaagaatttatttggcatgagaaacaaaatattttatagaaccatgcacaagaatagccttcgtgtctacgaaatctaaggatatcaaaatgagataattttatgactgcaacaagggtaaataatacttggccttgggaatatgggggaaaggtcagaactacaagatctcatagagcttaaccacaccaaaaaagaaagagaaaagaaagaaacaaagaaaacaaaacagaacgagcagactctagcagggctaatgacagtcttccaaaggcaccagcacgttgaacaagctgcggctcagctcgatggacccccaagagtggctgccactgggaggacttgggcctctgaaacaaagcccggtggtttcctttcatctctgaacttcgagctcgacctaactttccagtcccttcccccaccgccaccccataacccgcccgaagcggcccacggaggccggaggttttggggcgcagtcgctcagcagcccgaggtctctgtcccgggcggcgggagggaaatgccgcgcccgcagccagggacccgcgtgcccagcttcggcccctcgcccgcgaagtccgacccgggtgacagcgcacggccggccctgggcccagagctcccacctgtgccccgcagcatgttgtcccggagcaggtccccgctggagaggtgcttcagctcgaagtgtgtagtgatgcgcgacgacacggtgcccttgcccgagcccggggcccccatgatcaccgctcgcagcagccgcgcggacgcccccatggccgcagactgaggcccgcaccgcgcgggtaccagggctttggcctggcctgcgcgctcacccgctcggcagcctgcgccggccggctagcagcgccactagcaggcggctactgcggttccccggcgttcccggaagtgagccgacagcccctggggccgcccagacagcgcgggaccccgctgttgcgtccgcctctcggctaccccggcgcaccccccgcccccgaccgagcgcctgttcccgcccagccgcgcaagccgcgcaagccgcgccccctctgcgctcgctcggccgcccagctcccacctgcgcctctccgcggcccctctccaccggccgctgggcccggatcccttcggcgcccctctgcacccacccccacgcgccctccactcggctcagatctacctccgcgcctctccgcgaccccggaaccccgcgccctgtccggcccattcccagccggatagaccgcgctcccctctgtccgaccttggcaactcctgcgcgccccctccccacctctagtcgcccctcggagccgcttggtttcgggatccacccgcatccacccctccaacaaccctttcgtagccctcgcccctagtccatagcaggcgctgccctacccagtccttgccggacacaccgcgacccctttcgtgctcccttgacaaccctggccccacctccacctggcgcccactcgaatccgcccctcccttctacccccctggaccgccagaccccccgcttctgcacccactcccgccttcgcccttccctccttcctcctcctcctctgctgccgagcgccctctcttcccactccctctctgtgtagaatcacagggagtgaccttgagccgagagggcctacctcattttacaggagaggaaatccagcttccattgagtgagactcttttataaataacgtaaaagagtgtgtgaaactgtggaggcaggctgttgtagataggcggtcggaaaagctttgaagagatggcatgtgtgctgagtgcttaattagaatatggaagagagagacatgggcccttcctatgtccagttttaggaaaaggccctaaaactggaggtttggcatgtttcaagaatggaaacagaggacaaaaacgttcgagtgagtatcattttgcctgtaaaatgggcatagaggagtagaatggaggagttaaaataatgtagtacttagtgcaatgccagctacggggtcaatgttcaataatggttgtccatttatcatcattgctttgtcccggacactatgctaaggcagaaagaaggctctctgaaaataaaacacagttaccattctcctcagaggtccagaactgatttcaaagaagatagaaatgacttcagggtgagacagtcagtgaatcgtagctgagtgaatggatgggggatttcaataggtagacagcctggtacttagaaaaggcattagcctttatactttctggtgtggaaaagaaagaaagaaaatacataccttgtacatttttttttctttgagacagagttttgctcttgttgcccaggctggagtgcaatcggctcacggcaacctctgcctcccgggttcaagtgattctcctgcctcagcctcccgagtagctgggattacaggcacacgctaccgcacccggctaattttatatttttagcagagacagggttccttcatgttgcttagactggtctgaaactcccgacgtcaggtgatccacccgccttggccttccaaagtgctgggattacagatgtgagccaccgcgcccggcctcgttttgtttctttgagacggggtcttgttttgttgcccaggctggagtgctgtgatgcgatctcagctcactgcaacctctacttcccaggttcaggtgattcttatacctcagcttcccgagtagctggaattacaggcacccgccaccacgcccagctgatttttatatttttcgtagagatgggatttcaccatgttggccaggctgatctcaaactcctgacctcaaatgatctgcccgccttgacctctccaagtgctgggattacaggcttgagccaccccactgtgcccagcagggctcatacatactcattactaagcaagaaagaatgaaaagaatgaaaataaatgaattaaacattgaattcatgtaattgggaaaaggacatcaaaataacccatggaaagcagaggaagggatgaagtaaacaacataaatgaaaggatgagaaaacttgaacagaactaactaaagaatgagcaagtctggacaagtacaacttatgcaatactagaaaatctgaaggtgtggagaaagtacttctaatctccaaagctgggaacataggaggtttcagctccaaaagaaaccagaaagaaaatcctggggaaatttggtttagaaaaaaaaaatgttcaaacaaacaaaaatagctgaggaatcatcctgtcattgcggggatgaaaagctgagtgtcgtggtcatattaacaggcccgcaaaacaccaatcaactttggctttgcaaaaggttgttgattacaaatgagtaactgccagtctgtgaaatctcctggcaactgtgcctggcatagtcttttcgccattcacaggcctttgtatggatctgttcctcactgcctaccttgttccaactgaaaaacactgaggtcaaattcattcaaattctaatttaatgaccaagtgtttatacagattagtttgaagcaaataaagcccagatgagtgctttgcacatagtaggcactcagtagggttttgttgattaaatactaagaattactgttttgtcacttttgtttgtttgtttttgagacggagtctctctgtcacccaggctggtgcagtggcgagatattggctcactgcaacctctgcctcctggattcaagagat

SEQ ID NO: 588112 - DNA, 4001 bp, Homo sapiens
atgcgcctgtagtcccagctactagggaggctgagacaggagaattgcttgaacccaggaggcagacagagcaagactccgtctcaaaaaacaaacaaaccaaaaagaaaaaaagaaaaaaggtacacgtatctgcgcttaaaaagtaaacctttctagaaggaaaactctgttcccctccgaagaatgggactgaggtagggaacgaaagagggcgttgttttttatgctatgcacgtctatcctgtttgctatccttacaaaaaaaaaaaaaaaaagaaggaaaacaaaagaaaaaggccttgtggaagcattatttctatgtaaatgggtttcaaaatgagtttcaaaacgggttctattttgaaaagtaaggtcaacattttttgagaaaaaaactcctgcgattggcttttcaaaaacaaccctcttaagagagaatttacataccacaaattcacccattgtatagtgtagattgttaactgcctttcgtgccgagctgtaagaatttatttggcatgagaaacaaaatattttatagaaccatgcacaagaatagccttcgtgtctacgaaatctaaggatatcaaaatgagataattttatgactgcaacaagggtaaataatacttggccttgggaatatgggggaaaggtcagaactacaagatctcatagagcttaaccacaccaaaaaagaaagagaaaagaaagaaacaaagaaaacaaaacagaacgagcagactctagcagggctaatgacagtcttccaaaggcaccagcacgttgaacaagctgcggctcagctcgatggacccccaagagtggctgccactgggaggacttgggcctctgaaacaaagcccggtggtttcctttcatctctgaacttcgagctcgacctaactttccagtcccttcccccaccgccaccccataacccgcccgaagcggcccacggaggccggaggttttggggcgcagtcgctcagcagcccgaggtctctgtcccgggcggcgggagggaaatgccgcgcccgcagccagggacccgcgtgcccagcttcggcccctcgcccgcgaagtccgacccgggtgacagcgcacggccggccctgggcccagagctcccacctgtgccccgcagcatgttgtcccggagcaggtccccgctggagaggtgcttcagctcgaagtgtgtagtgatgcgcgacgacacggtgcccttgcccgagcccggggcccccatgatcaccgctcgcagcagccgcgcggacgcccccatggccgcagactgaggcccgcaccgcgcgggtaccagggctttggcctggcctgcgcgctcacccgctcggcagcctgcgccggccggctagcagcgccactagcaggcggctactgcggttccccggcgttcccggaagtgagccgacagcccctggggccgcccagacagcgcgggaccccgctgttgcgtccgcctctcggctaccccggcgcaccccccgcccccgaccgagcgcctgttcccgcccagccgcgcaagccgcgcaagccgcgccccctctgcgctcgctcggccgcccagctcccacctgcgcctctccgcggcccctctccaccggccgctgggcccggatcccttcggcgcccctctgcacccacccccacgcgccctccactcggctcagatctacctccgcgcctctccgcgaccccggaaccccgcgccctgtccggcccattcccagccggatagaccgcgctcccctctgtccgaccttggcaactcctgcgcgccccctccccacctctagtcgcccctcggagccgcttggtttcgggatccacccgcatccacccctccaacaaccctttcgtagccctcgcccctagtccatagcaggcgctgccctacccagtccttgccggacacaccgcgacccctttcgtgctcccttgacaaccctggccccacctccacctggcgcccactcgaatccgcccctcccttctacccccctggaccgccagaccccccgcttctgcacccactcccgccttcgcccttccctccttcctcctcctcctctgctgccgagcgccctctcttcccactccctctctgtgtagaatcacagggagtgaccttgagccgagagggcctacctcattttacaggagaggaaatccagcttccattgagtgagactcttttataaataacgtaaaagagtgtgtgaaactgtggaggcaggctgttgtagataggcggtcggaaaagctttgaagagatggcatgtgtgctgagtgcttaattagaatatggaagagagagacatgggcccttcctatgtccagttttaggaaaaggccctaaaactggaggtttggcatgtttcaagaatggaaacagaggacaaaaacgttcgagtgagtatcattttgcctgtaaaatgggcatagaggagtagaatggaggagttaaaataatgtagtacttagtgcaatgccagctacggggtcaatgttcaataatggttgtccatttatcatcattgctttgtcccggacactatgctaaggcagaaagaaggctctctgaaaataaaacacagttaccattctcctcagaggtccagaactgatttcaaagaagatagaaatgacttcagggtgagacagtcagtgaatcgtagctgagtgaatggatgggggatttcaataggtagacagcctggtacttagaaaaggcattagcctttatactttctggtgtggaaaagaaagaaagaaaatacataccttgtacatttttttttctttgagacagagttttgctcttgttgcccaggctggagtgcaatcggctcacggcaacctctgcctcccgggttcaagtgattctcctgcctcagcctcccgagtagctgggattacaggcacacgctaccgcacccggctaattttatatttttagcagagacagggttccttcatgttgcttagactggtctgaaactcccgacgtcaggtgatccacccgccttggccttccaaagtgctgggattacagatgtgagccaccgcgcccggcctcgttttgtttctttgagacggggtcttgttttgttgcccaggctggagtgctgtgatgcgatctcagctcactgcaacctctacttcccaggttcaggtgattcttatacctcagcttcccgagtagctggaattacaggcacccgccaccacgcccagctgatttttatatttttcgtagagatgggatttcaccatgttggccaggctgatctcaaactcctgacctcaaatgatctgcccgccttgacctctccaagtgctgggattacaggcttgagccaccccactgtgcccagcagggctcatacatactcattactaagcaagaaagaatgaaaagaatgaaaataaatgaattaaacattgaattcatgtaattgggaaaaggacatcaaaataacccatggaaagcagaggaagggatgaagtaaacaacataaatgaaaggatgagaaaacttgaacagaactaactaaagaatgagcaagtctggacaagtacaacttatgcaatactagaaaatctgaaggtgtggagaaagtacttctaatctccaaagctgggaacataggaggtttcagctccaaaagaaaccagaaagaaaatcctggggaaatttggtttagaaaaaaaaaatgttcaaacaaacaaaaatagctgaggaatcatcctgtcattgcggggatgaaaagctgagtgtcgtggtcatattaacaggcccgcaaaacaccaatcaactttggctttgcaaaaggttgttgattacaaatgagtaactgccagtctgtgaaatctcctggcaactgtgcctggcatagtcttttcgccattcacaggcctttgtatggatctgttcctcactgcctaccttgttccaactgaaaaacactgaggtc

SEQ ID NO: 588113 - DNA, 4001 bp, Homo sapiens
gggacagcttcaacctcatcaacagcatttggaaaaaaaaatgtaaaaacacgcaattctctagggccaagtcccaaaaacacctgttattggcctctcccctcacctctcactcttcaggccaagccctcttctaaatccgaaccagctgcagcagatgggttagaagatggggttaattaataaagtacttaattttatcagtatatgaatagctgtaagaaaagattgtctgcccttgccacttctatacaatattagagattctagccaaggcaattagtccagaaaaagaaatagaaagcatccagaaaaaaagaagtaaaactatgtctaaagccaacggtttgagaccagcttaggcaacatggtgagaccccatctctacaaaagattaaaaaattagctgggtgtggtggctcatggctgtagtctcagctactcaggagactgaggtgggaagattgcttgagcccaagaggtcaaggctacagtgagccatgatcatgctactgcactcccgcctgggcaacggagtgagaccctgtttcaaaaagaaaaaaaaaaaaatcatagaattgaaagtccagaaataacctttcaaatttatagtaaactgatttttaataggatgccaaaataaatgaatgaagaaaaagtagtctttttaacaaatgctcctgggacaaataaatatccagatgaaaaggaatgaagttagacctctaccatgcataaaaattaactcaatataggtcataaacctaaatgtaagtgctaaagctactaaactcttttttttttttttttttgagatggagtctcactcttgtcacccaggctaaagtgcaatgatgtaatcttggctcactgcaacctcccccctcccaggttcaagtgattctcctgcctcagcctcccaagtagctgggattacaggtgcccaccaccatgcccagctaatttttgtatttttagtagagacagggtttcaccatgttggccaggctcgaaatcctgacctcgtgatctgcccgcctcggcctcccaaagtgctgggattacaggtgtgagccactgcgtccagcctaaaaactcttaatagaaaacacaggtataaatcttcatcactatgcattaggcaatggtttctagataaaaaaccaagagcacaactaacaaaggaaaaaaatagatacattagacttcattaaaattaaaaactttttgtgcttcaaagaacatcattaagaaagtgaggccgggtgcagtggctcctgcctgtaatcccagcactttgggaggctgaggtgggcagatcacctgaggtcaggagttcgagaccagcctggccaacatggtgaaaccccatctcttaaaaaagaaacgaaaagaaaagaagtgaaaagacaatgcatagcatgggatggaagaaaaattttgcaaatcatgtagctggtaaggaatttgtatctagaatatctaaagaactcttacaactcaattttaaaaaaatgttaaacgggcataggatctgaatacacatttcttcaacgatatacaaatggccaataagcccatgaacacatgatcaacgtccttaatcattagggaagtcaaatgaaaaccacaaggagatactacttcacattcacgaacatggttatagtcaaaaagacacatacaggcctaccctggagatattgtgggtttggttccagactaccacaataaagtgaatatgtgagtcacacaaattttttggtttctcggtgcatataaaagttatatatttacattacattgtagtctattaagtgcaatagcattatgtctaaaataacaatgtacctaccttaatttaaaatagttttattgctaaaaaatgttaatgatcatctgagccttcagagagtcttaatctttttgctgatggagggtcttgcctccatggctgatggctgctgactgatcaggatggaggttgctaaatgatgaggtggctgtgcaattgcataaaataagacaacagtaaagtctgtctcatcaactgactcttcttttcaccaaaaacttctctgtagcatgcagtgttgtgtgatagtattttatccacagtagaacttctttcaaaactgtagtctatcctctcagacccgctgctcctttttcaactaagtttaagtcatattctaaatccctcgttgccagttgaataatgctcacagcatcttcaccaggactagattctacctcaagaaaccacgttctttgctcattcattaaaagcaactcctcatccattcaagttttatgagattgcagcaatccagttacatcttcaggctgcacttctaattctagttctcttgctatttccaccatatgtgtagttacttcctacactgaaggcttgaaccccttaaagtcatccatgagggttggaatcaacttcttccaaactcctgttaatgttgacactttgaccttcttcctgaatcatgagtgttcttcctggcatctagaatggcgcatcctttccctaagtttttctatttactttgcccaaatccatcagaggaatcactatctatatagcagctgaaccttatgaaatgtgttttttaaataacaaaacttgagagttgaaattactccttgatgcgtgggctacagaatggatgttgtgtcagcaggcatgaaaacaacatgaatttccgtgtacatctccagcagagcttttgggtgaccaggtgcattgtcaatgagcagtaatactttcaaacgaatctttttctctcaacaatagttctcaacagtgggcttcaaatagtcagtaaaccatgctataaaccgatgtgctgtcatccaggctttgtcattccatttacagagcacaggcagggtagatttagataattctcaagaccctcggatttttggaatggtaaatgagcattggcttcaacttaaagtcaccagctgcattagtccctagcaagagagtcagcctgtcctttgaagctttgaagtcaagcattgacttctcttctccagcaatggaagtcctagatggcatctttttccaatagaaggctgtttcgtttacattgaaaatctgttagtgtagacaccttcatcaatgatcttagctagattttctggataccttgctgcagcttctacatcagcacttgcactttcctgttatagagacggcttctttccttaaacctcatgaaccaacctctgctagcttcaaatttttattctgcagcttcaacacatctctcagccttcactgaaatgaagagaattagggccttgctctggactgggctttggcttaatggatgatgtggctggtctgatcttctttctagaccactcaagctttctccatatcaacaacaaggttgttttgctttcttgtgctccagtgtttactggagcagcacttttaatttccttcaaggtcttcctttgcacttacaacttggctaactggtgcaagaagcctggtttcagcctgtcttggttttcagcatgccttcctcactaagcttaatcatttctagcttttgatttaaagtgagagatgtgccactctcttcctttaacttgaacacttagaggccactgtagggttattagttggcctaatttcaatattgttgtgtctcagggaatagggaagctcgaggagagagagacaagggaatggctggttagtggaacagtcagaacacacataacatttatcaattaagtttgccatcttatatgggtatagttcatggcaccccaaaacaattataatagtaacatcaaagatcactgatcacagatcactttaacagatataataataatgaaaatattttaaatattgcaaaagttactaaaaatgtaaaatagaaatgggaagtgcgtacttgttgggaaaatggggccaatagccttgcttgacacagagttgccacaaaacttagatttgtaaa

SEQ ID NO: 588114 - DNA, 4001 bp, Homo sapiens
ttgttgggaggccgaggcagaaggactgtttgagcccaggagttcaagaccagtccgggcaacatagcaagacctcgtctgtactaaaattaaaaaaaaaacattagccaggtatggtggcctgcacctgtagtctcggctactctggagggactaaggcagaaggattgcttgagcccaggagttcaaggctgcagtaagccatgattgtatcactgcactccagcctgggcagcagtgcaagaccctgtttcaaaatcaataaaagctttcctgggcaattcctccaacaatcaatgtggaaaacacaccaggttctctagagcagacaacagggctccagatgatcccccatcctgccctgacctgctgacttctaacccagctagctatttgatttgtgattggccactcaagcagttttaggaatctcttgctctccctctatcagttaacactttccgagggaaatgtgtttgatggaggtgcagacacgggtttcttcgtctgggctcagctgtctagtgtgcagggcagaacctcaaatgaccacagacaccactatgccctccatgccatgcccctggggatggggtgtaccctgggaagcagacaaatgatctgaaaactgagctccagcttccccttgcctctcagaacctttgagtggctgagagttcttcccctccagctcctgaaagccttgacctccaccacgtgcaaaagggaaaactggggccctggcggggacggggcctcgcccaaagtcacacggtgagctgggggcccagtcaggcctggagccagaatgagagcttcggagctgccggggacgtctggccctgaggaggagggaccaaggtgggagatgctgctgtcccagaggcggccctctctgaggatggagatgccagcttgaactcggacaatgcccacctcagaaacctgggccgagaggctccccacaaattcgacagatggtaattgtcagcgccgggagagcccctgggagaccacctcttgcaacctggcatttcacaggtggggaaaccgagaaaaggaaaggactggttccagaccataaggcccgctggcggcacagccaggaccaaatcccggctcgagtggcccccttcctccccctgggtccgcctgaggcaaacccgggcaggaccaggagcgtccccagctcgagggccccctcggggtcacggcgacacacgaatcgtacatcccgagttgggctgcttcgtgggcgcgcgactcggccccagctgcgggtcccggccgcgcacccgacgtcgcagtggaggctcccgagccgccgccagcgtcgcgacgggcaggggtgtccggtcacctgcatcaactcgaagatgtggttctcctccccgtactggggcatctcgggggggatacggtgcggggcgatagtggcgtccatgtagccgtctcggctcgccgctccctagtaaccgcgtcgctagggccgccgcgccgactgcgtcatcagcacgcgccgcggccccgccctgcaggctccgcgccgggcccagatacccgatcctcggtcgcgcgggtcgcccccgccccgacctccccggctgacgcgctctgcggctcgggcaagttctttccccaaccccggcctcgcttttcccatttgcgcatcttagcgggggacaccctcaggtggcttccagctgggcctcctcgtatctgagacccccgacgaaacccagaaggggcaagtcggccctccgaggggacgggaggcagaacctgcttctggttctgtcagtgctccccggcccggctccctgtgcctcagtttacccatctttaaaacagacgcgggaataaatgtgggggagggtgtttgaagggggaggggcgtccatgagatgggccggaggttcgaggatcgggtggaaatcctcagcccaactcctagagtcgagccccggtagacccctcccagctccccggctctggccaagccgccaagtgacccgattgctatggcaccggcggtaacaatcacgcccgcggccccgccccttctcgcccgacgtccccacccaccctcgcctcccaagtcctggaacgggcctccccaccctccggggcaccgacactcacggagtcactccaacttctctgggtgctccgtggagcgaagagcgctctaggacaagcaagggtaaacagggatgagtgtgggtgggcccactcggaccccaccccggcctctgggtcagaaactggaagctggggtggaggatggaaagatggaggggtccggaggatggaggggcctgcacagctgtctcggggtgggggcgaggggaaggttcgcgctggagacggagctttttaagtcgtatgaattcccagtggtacggggcagcttgatattttattagtcgcaacactgaattgggatctctagctcttgtctgttgccgttaatcgtaggagctgtaagagtttgttgaactctttgtgctctcggcaaaattctgttgtctctgtaccttatggagagggaaaatggcacagtcaatgcagacagccccagcttcaagttctggctccgcttcttactgtgtgagcttggcaaactctctgcttgctccgtgcctcactttcctgccctgtgaagagggaactgctgaaggatttcaggagctaatgtattggagagtaattggcatgcagtaagcacacaatatatggggctactattagtagtagtatctcatttaatcgttccaacaatcctgtgaaataggcaccttcattcccattttacagatgagaagttggaggattagaacaatgaggagtggttggctgggtaactttgggtgagtcacttcccctttctgggcttcttttctcatcagttgttgatcatacagccttagaaccagaaggcctcttgaagaagaggctaatccaaactctctcatttgacagatggataaactgaggcccagaaaagggggaaatcttggctagggccactggttagattgggcagagccagggcatgaactctgcatccaggctccagctaaagcccttttctaccagccatcagcccagagacatgccctcccaacgtaaaagccagcactgttgcctcttcccctccaaaccgcttcctcaaagtgtgtacaccttggtaggcttgtcaaacccaactgtaaagatagctggggaagaaaaggaagctgcctccccctgagcaaagaacacaacagccatgcctgccatttgcactggagaggtttgttttgcttcctggacatttctgaaatgacttgcctttctcctcatttattttaagccctaggcgcttttcctaccatgattcaatcttctttagcagcctggaaaaatacaaatcaattaaagcctaaaacctatgggtaatcatttttttcctccctcctcccccagatcgagaagtgcccgtcccctgtgcccttcatccacactaatttggctgcagtggctctcgttcaagggacgatcacttcggatagcttattacagctcctctcatgacattcctggcgtgcatgtcacaagttgctaggatcaagaacagagtcagttcctctcaaccactaccaaccacagctcccaccatgatgagggaaaagccaggccgaaagggcacacgccctttctccctggaactccacctatgtgctctctctcacttttctggagcttcacctttgagtcatttgtaagccctgggccaacattagggcaaggcaagtgatgcaccctcagcacaaaacttaagggagtgccggcaattcaatcattgaggtggatgtttttcacgttttaatgcaatatattttaaaaatcaaaaataatgctgcctaaaatccatttagaataacatgtcaaaaatttaagtaaaggtaggctcagtgttactgatttctccttttgcctcaggcctcagtatggcaagg

SEQ ID NO: 588115 - DNA, 4001 bp, Homo sapiens
ccaagggtcaaaactggggaggagacaaccggcagcggagcattgcttaaaacactctttaggccaagtctttatgtttaaagaaacagagtaaaactccttgctggatactcctcatttctagacatattattatgaaattgtattcatgaatgttggggaagctgccagactggaagaaagggaagcttagttaaatttaaattaagaacatttccagaaagaaaagtgtgatgcttaaatgaactctaatcagaacaaaagacaaggaagcaaattccctgggatcccaatggtgagaggagtttgtattcatgcagtctccaggagcctgtgaaacgggagttgggatagaagagcgcttcccgggagacatgggcttgttcacagattccaagatgcaatacagagagaggtgtatagacgtatgagtaggtgaagtttcttttcaaaaagaaatattatacatttaggaagtcttcccaaatcacctgtgctgcatttaaaactgctacggggaagggtagtgatatgtcaaagtctgatctgaccacgcagcctatcagagccaaacccatgctaccccacacgggaaacgggctttcctgggtctggaaagggaatccaccatctctctaaacgagtcacctcccagacgccctctttgtgggtcaggagggatccctcaggctggcgagcgcctggcatccgcgttggagagctcggcagcccggctgcacgccgcctcgccctttgccttcagtcctcacccggccaccagcgccacagctccctgctgcgggcttccggctctcccgggctccgttttactcccctcctatccactccgtttctctgggatttcttggggccaccagtgtctccttgctctggttcttgcaggcgcgtcgcctccacggacattacaggtacggcttgcccagtgctctcccccacggtctgctcttcccataccccagagtgtccccaagaagggcccacagagacgcaaactccggctttatctcggataagataccacattctaactgctgaggtcccagcctcaggccaaacttctggctcagctcggacccggaccgcgttctccctcccagggcagaagaggctgctggctcctcctgcatcatctcctgagttcagctccctggaccctatcccgaaagactctggctggggccgggaccggggccggggcccggccctccctgacttcagtctctctgaaaagttcaggacttgcgaaaatgcccccggctctgccacccaaaaggcaggacccgcgccttcctcgcgagctagaaggaacggctgcacctcccggtgctcccggggcaggagatgcggccacgaccacatttgatttcactgcttttcctgaaaaggacacacagcccagctctgtgtgtatacagggagaagcggagtcctgcgtttagtttttaaagcatatataaatgataagcattgaacaaagcagccaaaggcttggccctcccacaaacctaggaattcaaatccacatggccacagcccctccacccgggccctctcccagcacacgctccgctcgacaaggaccacaaaaagccctttaaaagcccgcggtgcttccgaggactcccagatttccagcccttcctcggcaaccccttcctcggccaccccttcctcacactcgaggacactccagcccctcccctccccagcttggacacccacctctgggcgcccgctcccgggggcgcagtcctggggttctgctccagtccagcgccgcgcggccgctgcctcccgctccgggggtccaggagactccgggggtccaggagactccgggggaaggcgagcggcagccccgggctggggccagcgcatctgcagggagtggtagcctccgggcgcgctggagggcggggagccccgcccgcctgctcctggggcccgccccttccccgcctcctcgcttcccctccagtagcccagcgcccacggaccgcccctccctcccctcccctccccatctacccacaccttctcctctcagtggcttcggcggaatcgatgcacaaacgaagaaatgaatgaatgcagagactggagagagggaaagacggagggatggatggggcgggcaaagctgagtgtttcctaactcaggggagcgctgtgtctgggtatatggatacttgttagcgcacggggctttggagcggggtggcgtgtcgctgtgtgtgcatgtggacgtgtgtgttggtgtacacatatgtgcgcatgagcgtatgtggaagtgtgtgagtgcctgtgtgcgctcaaatgccaggagccgctgagttcccactcaggcggggaaacagcccctcgtcccttacctagcaccacgactgtcctcagggtcagagcgactcccggaactggttgcgaagtgcgtctttgtggcagtaatggtgtctccgcgtgtttgaggactcccccgatggggttcagaggctgaggtgtggacagagatgcttccagctcactggctcgccagagccttcctgctgccctccgtgtagtggcagccggtggcccggtgtcagagcgcgtgtgctaacaaagccagcggaggggaaggaggcagctgatccgcagactggggctgtattaggcgggtggccagccatccctcactcttgagatgtctgaaatttcagtctctcatcccctcctccaccatgaatatttaaataatgttaatgaccctttgaaaatgaaccgtctagaaatcctgagagaggacaggcacacacaaacaaacaccccacctagagagcaacactttcaaaagcaagctgtggtcttactctgctgtaggtggccgcattcattctcagcagaggaagatcacaaaagtcagatttcttgaattcagctttgccctaggcacgattttcccagtaattctctctccccagctttgcaagtcgcccttgcactctcagttaggtttccaccctagggcagtctgctattttccccactccttgacaaggccctgggatgctcttctgggagtcaattttacatgtgaaacacagcagggaaagacaatagccatggcctgattctactttcctaacccacaaaggtccctgatttccaatacaaagaaatgatacccttgggaactacccagaaagcccatccaggccaagggcaccataaatagcaccttcagagaaaagacttcttccctgccttgagcgctattcacactttcacccaaggaagaggatgaagtctacaatgggacatcagctgttctcagggttcctgaatgtcaatagcctcctttatcttggtatttggaaatggtttcacgatcctttttgcctgtttgtctcttatactattgaatttcaatagaatttactgaccagtggttagagatgccagagcttcagccttgactcaactttttcttccttccttccttttccttcttttctttcttccttttcatttttttctcctcatgtctccgatttaaggaattaaatgcttggatgccctacatactgatctatttttaacattttaatatcatgtgaaaaactcacattaaaatgagtgtgcttggatatcacttatttatttatatggaccatagactctctaaggaagaattttagaattacatcagatgtgagatgttataaacaatatcatggcaggtacttcatcactcccttctcatattttcctaaattagaataagtgtaaaatttacaaacaaaattagtttcattattagaaacagtaaagcaaggccgggtgaagtggctcacgcctgtaatcccagcactttgggaggccgaggtgggcggatcatctgaggtcgggagtttgagaccagcctgaccaacatagagaaacctcgtctctactaaaaatacaaaattagccaagcgtggtggcgcatgccttcaatcccagct

SEQ ID NO: 588116 - DNA, 4001 bp, Homo sapiens
ctttcctcttccatcccccgagcagagcttcttccggcctgtggaactaggggcccgtgttgattgtgggaaactgggaactaagccactccctaaagaggctagagcctcccctcctggctgatggaagacagccggccagactccagacctcaagcactcctggggcaaacgcaggctaaatttggacccggcaggctcgggtcaatgctgtgggccttaaaaggggcagatactaaaaacacttcttggtttgcctccatggatctcctgccatgaagccattacagctcaatgtgactagggcagttctaaaaagaaaactcaaccctttggaggccaggagtcctgttcctgctcctgcaggtccagcctttttttctgagagcttctacggtattggtcaaaagagtaatcactgttctgctattctctctgtcttatgcctcaggtacaggtctgaagacgggatgaaaatacttctggaactccccaccccttcactggaaacaaggcttccctgtgtcttgacccacattcctagtgaaggagactggtcaatttctcatagaacggagtctcccccagcaccatagcttagcctatgaacaatcctcctcttagccctgctgaaaagtcagtggctccaatcacatctggaaaatgttaaggtgttatttgatgaatatatttacagcttgggctttctgtgaaagaaactgaagacagtgtgtgtggtgggggtcagcagcggggaggggaggaaaggaaggaagctgctgttgccttttctgcagcagctgatgaaagggttgtttctttccgttacttggagacccacttcttacaggagtgactgagaggcttccgggtttcccgtgaataaggagagatgtgagtttcatgttttcctcaatgagggatactgagcgccctatcaaggagccctcggaggctcttctcaccaaaggcccttttcactggagattattttgcaaggtagtccctaccccagaataaaccaagctcaaggccacagagggaactctggctcctgcaaggtgagatttctagggtaaccgattctgctaaagacaaaagcaagcctagtttttcagttctttataaatttgctgtgtccctcttggtttaaaaatagttccagatcttgggttcacgcctggtgagcaggtcatggcagagatcaaaagccaaacaccactgtggaccagcagaatccactatattgaggcagagccccaagaaaagagaaaacagtgccagatgcatttgtggttaaccctctgtctacagatgattctgtgcctatgaacaaagctggcgagggtctccttccatacccatgggacctccaagagacaagcaccacacattccccccaaaaccatattcccccaggccaccctgtgaatgtggtgagttccacagcatggaaacagaaggctagctgtagaccacaagactgagtctcttgaacaaatgctagatggctaagaaacgaggcgacagaatcaccgagtcacttggttttgttctggaaaagggcacacagattctcacagacacacttgcaccatcttcaaagcgtgatctgccacagacgactcatatagctttgcactatatgtgcaggactgagcgtcctctttgcctcttagcacaaaagctgagagttttacaagatttgcaaaaaaaaaaaaaagagagagagaagcaagacaccagtctgagctcggctgcctactctccagcaagaaaggactccacagcacatgacacactcagaaaacctcctccataaagacactggcctcaaaaaaagacccctgtcctttcaaattagaaagaaaaggacacgaagataagtcagcagacttggcttaccctgcccagagcgcgcgcctcaaacctcctcagtgagaactgcctttttccagacagattcctgcgtgcaccctggctcaagctggacaaattcctcctgagcctcctgacggaagactgtgatgtcaccgtgggccctccctctgctccctaaaaggccattcacacaaagaaggactttaacctccttcggagaggcctggcccctccctggctggccggagctggagggcagcggcattcccagccagagcaggcccggcctgctcctgtcacgctcaaggctgagcagggaggcaggagctggcggcgttgaggtgaatcagttagcattgatgtgaatcagctaccactgtcttctcggcaattcagaggtgggccctgggacaagcagggaattgatatcccaggggtattgaggcagcaaaaaatctgaaagaccctggagaaatctccagttagacagacttttcaggacagcctgtggtgtgtgcttgtgcgtgtgtacatgcatgtggtatgtgcatgtgtgcgtgtgtctgtgtgtgataacaaatgctcaccacagaacatttagaaaataaaaaatattcattacccctccaatcagaaaaaaagttaatattttatttcattccattgtcatcttctcagaaatacatatttaatatcattgagaccagacagtaaatgcaattctgtgccaactttttttttactcatatcatttcacaagcactttttatgttatttaatggcccttgtaagatatgttttaagtggctacattatagtccatgccaaagtggacagatgcatctgaagtctgagatgagtgctctaatttcaaggaatatctggaggaagtggctgcaccatcccatggctaacaacagtcctctgccatcaagaaaacagatgtgcatttgccttgagtagagacatcagtgtcacctcagaatagggcccccagcactacactaagtctaacagggagttggcgtgtttatcagtgccccctgcctgataacacccactggctcaactctgcctccagattccgtccacctcgttccctggaactctacattgacctggaaaatttagggcataacttacgggcagaactagaaagtcagtcagaattccaggtcagttcagtaccatgaagtactcactttttcagtaagattttagaggtcaaagagaactgagatttacagtaaactgggggaaagatgacaaacgctacacatggttctgtggggccagctcatttggggtcagttttagagcagtttgtcctggtgagcagctgaaagatgcaacagggttcacctgtggtctgcacaccagccagcatagcagtcctcctgggaccctcccaagcacacgagtcaaggaagggataatcagagtagatggagcccaggaaggctcttttgaaaaggaggctaaaagtagactttacaactatttacagcatctaaacaacattttccatatgctaaaaacattttccaaatttatttagaaatattggggagttcctcaatgactgacttggtggtatcaagtcaccagggagctccaagggaactccgaatttatgctgccctgtggaataattggaatgttctgttgtgtagccaaaggcacttcaagatgctacttagtcatctgaagtaaaatgaggcagaaatcacatgccaatggcattgctctgcttgagaatgaagaaccagggaaggactttccattatgaagtgccctcgaccagcgatgcaagaggggcacccgggacccactccattaccacacctgcccctccacacccatgggaagatttgttttagaaaaaggttttaaatctgccctattcacaagagacaactgtatgtgctcttaaagtactattttccaaggagtaggtttgcaaatgacctggtgtctcagagacgccagagtccactacacacacaaacacacatatgctccacccacacacaggcacactgttgtgtgttgacttgagtcatctccacaagttcttatgttgaactcctaacaccaaggacctcagaatgtgaccttat

SEQ ID NO: 588117 - DNA, 4001 bp, Homo sapiens
taaggcacatgggctttgtgggcaaacagagaactccatgttctcccttggaagctgtgtggccttgggcaagctgcttaacctctctgaatcccagattccacatctgtaacatggaccaataattattttactgggttcttgggatgacggatgagactatgtgccaaaagttcttggccccagtgcccagctggcacagaatgactgttcacaaataaatggccttgccttttccgtgaaacgccctacaacctgctccctgcaggactgagtttaattttcctcatccacagcttccacaatatcaaccccaggtctagcgatgagtcctggacacaaaaagggagaagcagttttcccaagtggagggaggtgctgacatttccctgtgaccctcttccctgcgacccttaaaccagttccagggctcactgacccagctagaaactctgtcctcactctgagtagttaaggagcagaacaaacagccccttctcagccaactgagataagggttatgaggagggtgtggccatattgaggaaaacacatacataaattcaaattcatgctcttttcaaagagtcaaacaaaccgtgcacgtgccaggaagggactgctaacagcaaaactatactgaacacctattatgtgtcaaataccttataaaagcctttccatggactcagatctcattatttaatcctcatactaatccaaggagggaaaaattatgatgcccattttattttataggtgaggaagctggtttgaaccaagctgtttgaatctggacagtataatctttttttttttttttttttggagatggagtctcgctctgttgcccaggctggagggcagtggcgcgatctcagctcactgcaagctccgcctcccgggttcatgccattctcctgcctcagcctcctgagtagctgcaattacaggcacctgccaccacgcccagctaattttttttttttttttgtatttttagtagagacagggtttcactgtgttagccaggatggtctcgatctcctgacctcgtgatccacccgcctcggcctcccaaagtgctgggattacaggcgtgagccaccgtgcccggccctggacagtgtgatcttaatcactttgcaactgaaacttgcaataggtaaaatggttggaaacaatagcagtgtcccgtaacaggtgatcattgaaagaaattgtgatagttccactcaaaggaataatattagctgccgttaacagtcatgctattgaagaatatcaaataatgtaaaaattttgttatgttaagtggacaagccagttataaaataatatatatctagtttgagtccacttaaaaaaaaaaacagtaaaatatggaggaagaggaggaggaagaaaggaaggagacaggataggaaaaagaaagagagagaaagcaaaagaaagagaaagacatgctttaaaatgtttacaacaggccatgcgccgtggctcacacctgtaatcccagcattttgggaggctgaggcgggaggatcacctgaggtcaggagttcgagaccagcctggtcaacatggcgaaaccccgtctctactaaaaatacaaaaattagctgggtgtggtgacgtgcacctgtaatcccagctactcgggagactgaggcaggagaactgcctcaacctgggaggcagaggttgcagtgagccaagatcgtgccaccccactccagcctaggcgatgacagtgaaactgtctcaattaaaaaaaaaaaaagtttacaatcattatcactaggtagtagaattataggcaagtttttttgatagggaagtttaccatttttccttttgggtatttttcaaatataacagttgctttaaaaataagaatgaaatgaacatgtactattcttaaaaacaaaacaaacgaataccacctcacctctgtgtggtgcttccttctgaccttgggcacctccgtcttcagttgcccctcctgtgaaaggcgaaatgtatcgttgggttctttgaggccctttacagctctgacatcctataacattctgtaacccccacaccttctcctcctctgtttaaactctaatacaatatgttgttttctgcaatacagccattatgcaacatgtgggaacacatgaaaatcactaaaaggaaaggaagcaatcagcgcccagcctcagccactttttgcatttggaggcatggcatgtgttgctggattggatcctcataaataattaggcatttaacagatgaagaaaggttcagagaggttacacaacttgcccaaagtcacacagcatgttaaggcacagttgggtctgtacccacaaataaagcattatcctccagatgaatccttagtgggggactgagtgtgcctcttagaccctgagacctcccctcctcagtcctggtccttggctgtggtcccaagaccccgaggagactgacagctggacatcccactctggccctgatcccaggctccttccccagaaaaagctgagctggcagtgggggggctggggggagaatgctggcaaggacctaggggctggtgtgggagcggcactgggcgcagaaggtctcactcggcaatggagctggagttcgcctgacatttggcaaggaagcccagagccaagatggaacagcaagctggggtgcaggagggagggaggagtgagaatgtgagactttgggggcaggaagcctgggtagatcagccctttgctgttttgtttcagaacttctctgatatcctcatctacagacagaggcttctccttccctcaggcatgcatgtgtaaagtaacaagataatgtgtttgtacgcaggacacactcagaaaatgaggagcttctgttagcctcctggctcccctggccaactgccgcacctcttccctatcacccaccctgacttaccccccaatcccttggcacaatgacaaatcttagggcaccatcctgtcaggtttttcccctgcttaacgaccatccgtggctcctgtcactttcaggttaaaggccagacattttggcctggaattcaggctcataccaacctgttcccaagtcaggggctgctgcactgcataactcacaccgtacactacaaaagccatctcataaagggtttcttcccaaatcgcatactttaggggagctgcagtggggcgcaggccttctggcctggctccacttggctctgccaaaaagcccccaactccaggctgccaagcagaagcaaggctggtcttccatcccccaacacccttcacctgcagctgtctttaaaaaaaaaaaaaaaaaaaaaaaagtaagaaaaagccctgatttgtggtggttactaattttgatggtgttaaatacccttactgaaattggccatgccaatttcaagctattgatatcactgaatgctgcactgggaagagatgggcacaatccactctcccgagctgacaccagcacaccctgcacaccccaaagtaaggatgcgctaacaccagtgagaagctgtgtgactctcgtcaagtggctttacctctctgaacctcaggctttctatctgtacaagagggacaacaataacacccacttcgacaacatcacgtaactgatataatctagatgatcaacaacaatgttttgagcacctactctgtgtagggctctgtactaggtagacactagggaataacaatggtgacaaaacagataagagctcctgccctcccaaacctcacttcttgcagtaaaagccctggcacagcggctagaatgtcgcactcaataaatattacctatgatattagctaataataccaatggtattattgttgtcattattccttcctttctttgagcctcagtttcctcatttatttagaatgtggactgagcaaaagtttcttatgatgccacctcactcaagccttaaaatggtggtaaagtagatgggc

SEQ ID NO: 588118 - DNA, 4001 bp, Homo sapiens
ggttggaacgagatgtcctggcacagctctgtgccttctgcacctcaccagatgggaatatgagctcaaacccttgtgggccacagggttttccaagatttctgaagtggagtccctgccttccagcaggttatgtggtggaggaaaaacaaaataatcaccaccgggctgccagagtagaggggtggaccaggtgctgtcagagggactgtgtctctgagtcaagggtggtttcatggaagaggggacagtgaaggataagaagtgtttcagatttaatatgaaagtatctcctcccatggaaggcaacatccccaaactgggagtaactgaagttgggccctgagcactgctaccaggaggggctatgagcttcatgtgccaccccccacccctgcaagttgtactatgctgaggattccagaggctgtgggtcttcgcacagaggcttaggacctgctgccagccctggcaggctctgccactggccagggaggaggcagtcaggagagccagctagatagaaggtggccagaactgagaaatccaaagccccacaaaggcccaggagagcagctgtcatgcagttctgaaaagagatgaagtgtttattcagccaacccacatttcttgaatatctactatgggcctgctgaagtgctagacacagggattaaagagaagaatgagaccccagccttgccctggggctttgaagagcctgatcgcctctggggttagccatttagacgtaggagaagctgccattcccagaatcctagaatatcttggctaagagtcttcttaaagtttgctgattgtatcactgaaacaagggtgaaactgggctcagagaggggtagacacaggcccaggatcacgcagtgggtcagcggcagatctgggggaaggtctccagcagcccagtcctcagtgcccaccatgacacctccatactttaaggatagatatcaaatctgtttcccagcaggttgggcttgtggagagctttgggtgagccagactctgggcctggctgctgttggtagcaggatggttaagtatgtgggctctggagtctgatagatgtgggtacaaatcctagttctgtagctttctagttgtgtgacctcagtttcttcgtttagtaaatggggactagaaccgacctcaatgggttgttgtaagaaatgaatgggtcaggccgggcgtggtggctcacgcctgtaatcccagcactttgggaggccgaggtgggcgaatcacctgagctcgggagttcgagactagcctgaccaacagggagaaaccccatctctactaaaaatacaaaaattagcaggcgtggtggcacacgcctgtaatcccagctagttggcaggctgaggcaggagaatcgcttgaacccgggaggcggaggttgcagtgagctgagatcgcgccattgcactccagcctgggcaacaagagcgaaactccgtctcaaaaataaataaataaataaaataaatgaatggtcaatgcacgcaacgcttagtacaaaacggctgttattgttttcacctccctacccccccaccaaccaccacccgcacctcgggttctgcatcgatggagtctgcccaggcggtatccgagagggtgaaccccagagaagaggtgcggagccccgaacccgggcccccaacctcggctgcagcgggataatccagcccaaacaaacgctccacgggactccgtgcacggctgcaccgccagggcttcaggcgcacagcacaatctggggacgcaggactcttggtgccacagtccccgcctcgccctggagccgccctccaggcccgctatctccccgcatccagcccccgctcacctgcctccctaagggctcccggccgctgctcctgtcaccgctgtctcccgctccggtctcccacagaccgcgtaagagcggggggggctcacccggaagcagcttccccacggtccgccccctccacagtccaggccacgccccctgaaggcggtcttctggggggctcctccgctccagccgcggccccgcccacacgcaacgaggcctggccaattgggtgtgtcgagggcctggagggcccgcccgtccccgctccgggccctgcgcttgtgcagcgaactgcaggagggaggccacgagggggcgcaggaaccgcttgggagggtccctgggtgtgagccggcctcggaggcggttacagcccaggtttcacttcacagcattcctttgcccagcctagggcaaacttggctctggttaatggcttggtgaaagaataattggatgtcaaagccgttaaaacagcaccattatgcctaacacagtattagctaagtccatttttgcggactaagctaaagttgttgagttcagcgccaggcttccaagttttcagagaaaatttgtaccagcttcatttatttctcagggtacggcaatgctatgagttgagagatgtgatgtgaaagacatgggcgtttaggaaaactccaagtcttgataggggcatcagacctatgataggtacaatgatagatccgatcaaaggtctttatggagattggagatgtgcagaggcaagagggatctggtgaggcttatggggcctgggtaaaccagtaggattggatgagtaaaatggcgatcgggcatcatcgccctagcgaagcaatgcctttcaggtggttcttcagggattattgaaaagttgactttcaaatgtagaggacactagtgggttacattacacttattctcagattttatttctcagcccggttcggtggctcacgcctgtaatcccagcactttgggaggccaaggcgggcggatctcttgaggtcaggagttcaagaccagcctgaccaacatggtgaaaccctgtctctactaaaaatacaaaaaattagccgggcgtggtggcgggctcctgtaatcccagctactcgggaggctgaggcaggagaatcgcttgaacccgggaggcggaggttgtaatgggctgagatcatgccactgcattccagcctgggtgacagagggagactctgtctcaaaaaaaaatttttttttaaatttctcaaaatctgtaccccaaacctgttgtatactttatattttaaatttaaggggcctagcggcgtaaggctagggaaatatgacactgcttagtttccagctactggagttctgatctgtattcaacaaggaaggggatagaaagcaaataatgtttgctgtgcattaaagagtcagggacagtaccatgcattttacattcatttatctaatcttgacagcaacgatgttactattctcactttacggattgggaaaacaattgccagctagattaaataatttgccccatgttacactgggctctctctgcaatgcctgctaataaccacactccataggggcaattattatttgttttttcctagattccctgcccgacatttctttcctgacactcattccttccctgaggttattggtaactaaaaataattagaaccatctaagaacccaaatagaacgggaaattttaaaatgttgctgtttggtgtagcttatttcccccatgtcttttcttcttcttgactgaaagacctgttcccactctccccccagcctccaccttttgaaacattttaccttaatctttcagtattgtgaatgcaataatatgaataaatcttaaacatattgttgagtaaaagaagtgagacacaaaatagtatataatatgatttcatttatattaactacacaatcaagcaaaattaagctgtgttgttaggactcagaatagtgatttccactggggagatggggaggattgaaagggagattaggctgggtgtggtggctcacacctgtaatcctagcactttgggaggccaaggctggtggatcgcttgagcccaggagttcaagaccaaccttggcaacatggcga

SEQ ID NO: 588119 - DNA, 4001 bp, Homo sapiens
ttgtctagtaccgcttcttacatgcttagttaatgactactaagtgaagcttaatttagcaggaaggttatttacattagagcttccttgaaatacacacacaaggaagactttgcaaacttctgcaaagccaaaggagtggggagacaggggcatccagactaccaaaatatcttcctaggtagtattattaaaaaaaaaatcccattaataatagtaatacaataatctgagcattgtcgacaattttgagcttcatgaaatgtatttttaaatgtacccactttcaattgaaatttcttgtgaatgacaaacttggaataagaaaatgagggagactggactcttgcaaccttttggacatacctttgccaaatgtaaattgtttgacggtatggatttactgcatttttcatgctaccatttgtagtaaaactaaatggaaaaaatctttcctctttaacaaaacctcgtgataacaataccttaaaatacacttcatagctgctggtcaaccatgttaaaggcacaatctgatctctgctgctactttcctgaggaaaagagccaatcagctgagcaacttcctcatttgttgtgctttatgaaaatgaaaatgcaacagaccttgggatttcaaagccatccatggttacaagtgaggaaataaatatataacagtggggacttttactttatcattaaattataatgccctttgtttttctgttggctaattcagacagcaaaatggctctctcttgatttgcaagagttaatttcttaccatactttctgcatcacaccataaagataacttcaagtaattttggttagattgtgttttattcatttgtttgttttggagttctaggatctgacaggaaagcagtgtgaaacaggcaaagttcagagttactctcagaacgactcaagcaggatccatttcctagttccccccagctgcggattttaaagtctggatctagctcctgctcttgtttctctaaatatttatcagttaacaattacacatctgctccaatggcaacaaacttggctgaagaaataatgcttttcttcctcccaccaaaatatgcaaaataatgcaagtccatctgaagattttcgaatccaattatcagacttaagtccccctattttaacactcattttattaaacatattggaaagttatgttatttcagtatgctctctttctccttgtttgctttctattgttcctactcgtttggttctttccagtaagcttctctagtgagtattttgctctcttatcatacatgccggctatagtgaagttaatagaagtgcttagtaaagtcctctgaatcctggtataagaatcctttcacacagaagagaattcctttcgcttggaaatattttaagaaataaatttatgaaagattgtctgatatgatttagatcatatttgatcaggacactaaactgagacctgcattttgcatgccttttatttttatatttgcaaagggctctttacacaagtttacttaaattgacctttaatgctttacataaatgcagtttttgcaaacccgagtcaaagcagaaaatagaagttttactcaccttagtatattgaatcttcaaatcggtgagtaggacaggtaagtctggcgtgcctgaggatgacatttctgattcggctcctggaacacaggtgactggctcagcaatttggttctgatagagcacttggctttatttgttccttttttatctgcacgggctaaagtttatttgcatactcggatacgattggatgaacaaactcagagcaaaaaaagaaaacgacactacttatttgtaacacctagggcaggaagcctttgactttaaacttaaatccttaagaaaccagtgctccagcatcgaatttgtacctggagacagtgcactatttgcagatgaattaatttacaaagccgaaacctgtgataagtgtatgcagcagctgctctggccactaaggccagttattatttttttgacttctcatgctttttaatgctactatgtaactttctgttctctgacagacttggaatcagagaatttgaggattgaaaagagtctaaaagggcacttgttctcagtagaagctggccaggtgtcttcaggacaaggctttcaggaaatcagtccatctcccagaaaatcaaggtgctgtttggggaagaaaggccctttatctacaccctaccctaagttagttttaaaatatcgtatcagtcttgtgtattttcagtgctgggtaagtagacctactgtgatctcagaagccctaaattatctttattttctatatgtgaacagaaaagccagcaggacttttagggaattcggaacacactgtcacacacaatcaccacaattagaaatatggcaatatcatctattaatactcatttaaaatgaaagtaatcctggttttggaagttgtctgtatttatcaacataggcagtgtacaaagactaaatttaagcagggcttccaaacaattcaagttcttaaattaatatttagctgaaggacaattttttaaacagtgttactcccattttaagtacaatactttattgtattgtagctctagcaaacgttacaataggaacaagataaaatactctggatgctctgattgtggagaatcaaccaatttttttttttctagtgaaacttgccaattcccctgaatatgggacttacatagggaaactaaaaatttctgaattgtttgcccaaatcaggtgcagcacttgtttccctttctaccctcatttcatatccccattttagagacatacagagggtgagtagcttacttatggtcacagatctattagtgcaggaccagaatttcatttcaggccagtctgactcccaaacctggactcttatttctgtttactatttctaccctattctccacaagagaactcctacatgggttcaagcatcaactgctttggttttctcagtgaatagtcacccttacaggcatttaaacataactttttattcatctaagacaagaatttgcaaaactttttctgtaaatattttcagcctctgggctggatggtttctgatataatttacttgactctatttaaaagaaactgtagatgataggtaaattaatgggtgtagttgttttcctatagaactttatttaaaaagacagaaggcaggccagatttggtgcacgggccaactccctagattctaaggcaatatcattcccaatgcctttgactcccccgtgtcttatgtttgatgaccagatagaaacttctgtgttctttcaacatttctctgtttctttctttttggaaagtctaattgttttctctctcaaaaatgtgttttgagttaaatgcacaattacacaacagctgttacataacttgagagtggcgctctggccatgcccaaacagctgtgttttgctgctttcttctcccagagtcacagttgtttgtggattcaaatactggtttatttgatgtccaggcgatgaaagctcaaggcttcataacatacttggcttgtcatctcacttcttatatgatcattctcaattgtattttattggataattatgtaagaacagtccctttataccaggcattcctgaatgtaggcaaaaggagttgctttggagacaggttaccacacctgcccatttaatttcagcaaatatttactaagtatcatttatgcatccataattctttagccctaacctcacttaagcagatcttttctgcctagaaaccacagggcctgagacctatatttttgaggtaaacatcatcctgccctgagagcttattttgtagaatagcatatttctgggaattgctgcatatgaggaaaagatttcatcagactacttctattccttacagaggaaataatggcttttgtgagaacctagggaccaagg

SEQ ID NO: 588120 - DNA, 4001 bp, Homo sapiens
cctgggcagggagaggaacaaaaaactcaatcaggaaagcaaggctccatgtaggtccccggccccataaaaatcaatgtgatgggcgtggtggcttacgctggtaacgctttggtaggccgaagtggaaggactgcttgaggccaggagtttgagaccagcctgagcacatagcaagaaccgtgtctctacaaaaaaacaaaaataaatttgccgagcatagtggtgcatgcctgtagttctagctgcttgggaggctgaggtgggggcaatcacctgagcccaggaggttgaggctgcagtgagccatgattgtgccactgcactccagcctgggtaacagaacaagactgtatctaaaaaaaataataataatcaatgctgaccaagaaagtttcccttccccttgcgggtgttaggaataatgctcaaaatcctaaggaaattgaacactcgaacacaggattcttagcaaagcaattttacttctgcgcagagggatgcctccttggccagttgccatgagagcacacctgaacaaaggggcacgagagcctttattcctgatgcaagtcctgcccctgtaccctttccccattggctggggtcaggtcgtacaatctaaactaatcccggttggctaaacatttgatttattttagatagagtgggcacgtaaaagaaagtggagagaaaggggaaagggtgtctgtaatgagctagaaagttagtcttctttccaaataagcaaaggaatgtgagctggtactgataacgcttggtactgtggcatgcctgggcatctaacaaaggcaaaaaggagaaaaatgaaaaaaaaaaagggggggatactaagaattaaagaataaaagattgatcagattatttgaagagaaacctcatcatatcccacagggggaagctgagtcagcagatctgccaggggtgcccagggttccatttagctcaggactttgccatatgctgggacacagcccccttgccaccaacaggcctggctctgagggtgaggagaccaaaaggaggtaggggaaaggggagtcaccaacccatggggtaaggattggaggggtgaagcagtcaggagaggtggtcataggccaaggctggcaaacctttgcagccacaccaaggccgttcctactcttggggcctatatggggttcttgctggggcctccacttgctgataggaagatcacagctcacagagcatcatgctttacagtttgcaggctgtcttctcacgggaaatttgccaagcctctctgcagtccctgggtggtcagggttgatgatgacccccattctggaagaaggctgggcatcagagaggttcagggactcaccgaggacacacagcaagaaagtataggagcctcaccccagacttccacaaacctagctttgcatatcctcctgaatacaggcaattttttacagttcacccacagcgggaaggaccggaccttctctatccgcgggaactgcagcggcgcccacctcaccccttctgcgggggaaagggcgcaacctttgggcttgtccaagcctctgggctatggtcaggggccctctgttgaagtgggccgagtgggcaggagtgttgaggtcgagctaacgtggtaaggtctgggggcgtctgtgtcctcggggctcctgtagcgtcacccagaggcgggggatgggattaggggacgtggagagagtcctacagtgcaacggcggaaaggccagcccccagatgcggacgccgcggcccagagaggaaagcccccacgcggagccaggagctgcggcttcccgagggagccgaggggagaccagcgttagttacctgcagcaggctcgggctccggttcaggatcacgcttgggttctggttccggccctcccagctctgtccacatggccgcccagggctggccgcaggtcccgcctccgcgcagcccggggctcagcggccaatgaggctccgcctgcgcctggggcgctgcctacgtcctgtcgccggccaaggccgctcctccctcgccccgcccggtctttcccggtccccgcccctctacccccggcagcccgcaccgcttcagcgctccctccctcgggtctccgcaagcccagtgtccacgttgctcagatctaggctcctaaggcactggtttgggagcggaaacagagatacccagagaggggcaggggcttccccaggtcacacagcaaagttttcggagaccgaaccccaactacactttgcatttctccccgctgcaagacgctgcttaatcgactgccatccttgagactccccttaaccccttctctgcctcgcctctccctcactttttttgtccaggattcactaatttctgtcctccactttcactgctcctttcttcagttccttcaagaagattttatatttgggcatttttcaaagtacatttttgtcctaaggacaaaaagaatgtatgcacagtgtagaaagcttggaaaacacaggaaaggatgaaaaaagaagaaaaatatcacctgtaatctcttcacctacggtagccattattacggtgttcgtcctgctagtattgtttcctctgcatctttcaaaattattttaataaaaataaaatcatatagtaacctctgttgtgctgctttaaaaaaaatttaaaaacttagcgctgtattttgaagttttctcctatcactaattacagatgacatcatcctctccaaggtggcatagaattctgttgtaggggtaaactgttggacatttaattgtctccattttgttgctataaaggttgccaagatggaccactgaacatgcatctcactcgctccaccctcgctgcaccttccttctggctagggaggtcccaaagctaaccgccatgtttcccagcctcatttgcagttagagttctggatgtggactaggtgctgccaattagtagtactctgccggatgtggaaggcgggcacgcattggagggtattgtcctgcccctgtagggtggcactagcaggatagcagaaatgggagatgttctgcggcagcattccttgtcccttctccagctttctggctgtggaccggccgctgtggctgtagccgctccttgacctggcttcctgctctttgaatggaggctgcaggagggtgtctgaagtagcctcagacaggcacgaggctggtgggccacgtccatattgtcctgagagttggtcctggtctggctaaggcttgcttctgcctccggcacttgcagcaggtctgtaagcacccagttccttgtattaaatccctgcctctccactgatctagggtgctcacatgcgactgcttggacctaattcacttagttctttccttaagctacatctctatggaatcttttgctaccatatcatccttagcatgttcacagcccttgctgcaaaagttagccatccatgaaggcactatgattggcatcttatcaccttgatgcccatgctttcctcgggtttctccagcaacggcatgagccccttgccaaggccctcctgcctcccccacagcacgtggacagcctagctccccttgggcacttggcatagcactccaggactgattgacttaatgattaactgaccaatccttaagaggcctcattgatagagggagtgagtttatggcaaaatgagtatcagtcctcgtgttagagtgcattggaaactgtggcaggtctgagaggccagctgcagacaggaagtgacccccatgcggcaaggttggaggctgtgccccttgaggagcagctgaaggaactgggatgttcaccctttagaacttgaaagacaaggctgtgccgtccaaatctctgaagggcaaaaccagataggatctgtggggtcctagaaggcagagccagaccagtgaagaatacagaggaataactcccagaaaaagcagaactggctaaggctgggagg

SEQ ID NO: 588121 - DNA, 4001 bp, Homo sapiens
attttctgagacagagtcttgctctgttgcctagcctggagtgcactggcacaatcatgactcactgaagcctcgtcctcctgggctcaagtgatcttcccacctcagacaccaagcagctgaaactacaggcgcctgccaccatgcccagctatttttttttttatttttggtataaacaaagtcttgctatgttgcccaggcttgtcttgaactcctgagttcacgcgatcctcccaccttggcctcgcaaagtgctgggattacaggcatgagccactgcacccggccacatttcattttatacattctttatcacgcactttattacatatgtgtaacaagtaatatgtatataaatctggaggaaagttgtattaacaacagaaggtaaccacagaaaaacagagctacaaatgacctcagagatacctgcgtcaaccctgtcactttagagatgaggaaactaaagccagagagactatgtctgatgtgccttctaagttgtgatgttctaggattgcaagttacatcctattggcttatgacttagaattctatttctaatccttcagcaaaatagcaggtagaatcctatggtatggttctttctgccttccttgaagatgttctgtgaaaacataattatttgtaacatggatatttaattcctggagaaatagaaggcagcagaaagttcatttgcttctctatgtacaagacaaatggatttttaaggcaaatatgaggaggcttatttattgatagcccatgatttctaggcactgcatgcagcacttttgtacatgatgcttaaagctgccaatagcttcattatccaccccaatgtcccagtgacaagtgcagtgggatgatctagggcagtcctaggacagcctgatttccagtgccctttaacacacgcggagcagcccagaacgagtcctgaatggtgctctttcctctaaacttggaatgaagccaaaggacctcttagatattcaacatttccccattccctgccccagtatctctggctctaacctgggcctgggtgctacccagatgtgccttagctaaagtgatgaatagcagggtagcagagttcaagctctggtgcatccaaattgtctaatggagccctaggtaactatttaaagagaagttattttttaaaaaggcaacatattctcacaatgcctatttttcagatagtagagcaaatgtatcaaaatacacaaccttttgattcctactatcttaagctgtagggtcttcacagtgtctggggccagcaggaaatgttctagaaagtgtcaaacatgaagggtttggaaattcataatcaaatgatgactatgctctgtgaagtttccaaccctgttgcatttcctcatttgagcagtgggtgaaggcgaagggcaaaatactccaagggtttgtttctgtgacaaagaaacttcagtgtcggtaccagtaggtgtgggaagagaatgtagaaaatgacataaggcagtagatatgtaaataaatcactaaaataagtagttgttatgaaaagagagttgagagttgaaatgaacaggaatctcaaaaactgattagaacctaacgataggagtgttcaagttgtttttcctagatcagagactcacaagggcctcattcaggtaacacaagtaactggcaatcaatcttgggcattttgccacctctcaaaaagtcaggaaaggtgtgaatgagcatttatacttagagagaggaaaacaagcatttccctccaagcagagccatcatgttttcagccaccatcaagtttttcccgaaaacaaaggcaaaccaatcttcccttctataagcttagtagtattattaaccccttattcactggtgctgtccaggtatacaaaggaagcttttttacttacagtttgggagagaagagtcctcctagatatcaaaagctgtgggtgaggcagcagctgccaaataagacagatctttggtagcacacaatttttatagacttctcatcatgttttttttttccaatatttgccctcccctttctaccttgacctagtagggaggtgtttattcaacacctctgattggctcataaacaaccagtccttaaaatcatgcccatatactccttatgctcatagaatgttaaagctgcaaggaatgtctttagaccgtggagttcctaatccagaccctccatttcacagatgaggaaactaaggcaaggaagataaggaggttcccttaagtcatacagctagtcaatgatggagctctagggtccattaaatgatactaggaagaatgttagtgtagctgtaacacttacaaaacacatgaacttggtgacgggtttttggttttgttttttacttgtctgagccgttattttcttctctgtaaagtgggatctcaatttcacaggagcattaagtgagttgtatagtgtctgtacgcagtaggcattcaagaattattatttccaaattaggtaatcaatgctatattttcattatttatcttcagtatatcattagtagtcaattccaacaatttattctataatttatagttaaatttaaataatctttcaataaaagaaattgattctgaatccttgaatttcccatgtgtgaattttgtccaaattggaaataaaattcaaaacattctgtttttaaaaatcattgtctctcccatcttctccagtcctccaaaacctagctgggctttctgatgtatttaatgccagaaatcattgttttgtattcccattctcttttaacctttgtacttttgtcttcaaatttggttaaaaactagaattaaagtgattgaactaagccatcaacacccctaaatatggtactgtctgggtatgggttcattctgcagggctttttcctaagtatgaaacccaaatttaattccagaaaaggtaaataaaaatattatatgcttccagaggcaaatgatgaatgaggcaaataaatgagggaaatctaaaagtgatggaatgaccgtaattacaaaaaagggtaaattctcatgaacatgttcctctggaataattcataaaatggaaaacaaaactaagatgcttgattgtgcagagtgtaacaccagaatttatggatgaaaaggtgaaatgtcaacaaaatgaaggaaaaaataaacggaactaggtgatctaaaaagagttttggtttagttttggttgtttttcctagatcagagactcacaagggcctcattcaggtaacacaagtaactggcaatcaatcttgggcattttgccacctctcaaaaagccaggaaaggtgtgaatgagcatttatacttagagagaggaaaacaagcatttccctccaagcagagccatcatgttttcagccaccatcaagtttttcctgaaaacaaaggcttctgagaacagtaagtattcatcactgaatgtgaatattgaaggaaattgaagtatttgaaacacaatattgaggctcatttggctagggaagttcccaccaagccctgtcctgaggatagtagagggatagaccagggaaaggtcctatcagctcccttgactccacttagtatctgatggcacatttcctggtttccccatcttcaactgggctcattgaagcacctgctaccatatttgtcagaccaatgtgaccagctttggggctatgtgaggtttcatcctctatgatttttggtaaaggagaatggaggaacaagaggtggatggtgatgaaagaatagagagtgggtgtaatgaaagttgttaggagtcagggctggggtagtcagaaccatagctaaaacattctacctgctgagagatgctactagtactaattattcttgttatacaacaataatagctatcctttttttgagagtctatgatgtacctggttcttttcataaattatctccaatatcagcgactctctgaagaaacg

SEQ ID NO: 588122 - DNA, 4001 bp, Homo sapiens
aaacacaaatacaaatgtgatgccatctgcacctatcagtttggcaaagtttaaaatggttaatatccaaggcggacaaaagcatggagtaagaggctctatcatacattgtgggggagtaaagtgacacagcctccttggtaggcaaacttggcagtagctattgatatttaaaatgaacaactcttagacccaccaactttaggaatttcctcaaacgacatatttgcagaagtacaaaaatattttaaaaaaaagaagtaaaaggatgttcattacaacactgatctattcacaaaaaactagtcacaacattagtgtcctttaaggagaatgtttaattatgacacacttaaacaaaagtggattttctggccactatgaagaatgaagtgaatctctaatattgatacataagaatgtcccggctgggcgcagtggctcatgcctgtaatcccagcactttgggaggccgaggtgggcggatcgcgaggtcaggagttcgagaccagcctggccaacatggtgaaaccccatctctactaaaaatagaaaaaattagccgggcgtggggcgcgcacctgtactcccagctactctggaggcggaggttgcagtgagccgagatcgcgccactgcactccagcctgggagacagagcaagactccgtttcaaaataaataaataaataaataaatttttgctgaaaaagatgcctaatagtaggtatgtcataataccaattatgtaccaataagaagatatagatatacctatgaaaagacacaggctggtgtcaccacaacttctgaaaaaatacaagagaaacttaacggtggctatcttcagggagtagaataggacggggcttttaggttacatccttctatactactaaatttttaatcgagtaaatgttactttttaaagtcatcttttttaggatggggaaaaatgcacgaaggaaagagtcaagaatagctacagggcagatccaggtggacattatttaccaaggtaaaaagcttgaacttttctccaaaaaccaatggggagccatgtacaagttttaataggggcatgatatattcagcttggcgtttttaacacatgacactgctgaggacggtgtggcctggctccgaacacaaggacagtgggatgcaaatggcctgaaaggagagtcaacaaaaataacaggtaagcgggaagacaacacgcgagttactcattagtaaaaggtgactgaagctgacttctaataccagcgtttctcagagccccaaagactatctacctcggaatcaccctatgacccagttaaaatgcagatgtctgggccccacctcagggcacctggatgaaaacttcctggaggatggaaccccagcaatctgcaactttaaatgggcccacactaaagttagagaaccacaggctcgctcacaaccctgacttctccatgtcagttccgatctttgcgaaccgcagacagggaaggtcttctctcaggggtcatgcccgcggccgccctccacggcgaggtccgcactcgcgcagccggccccgcggccgcctcacctggtcgcacactaccacgtcgaactcctcgtcggcgaggaacagcacgtagagcgccaggaaaaccatgcgcacgtaggcgcagacggcggcgccgcggccgccccagcccaggcctcgcggcagccagtccccggcacagcgcaccggtagctcgcggctctcggcgaaacagtggcccgggtcgtagtgcgctgtccagatcttcacgctacacccgcgcgcctgcagcgccagcgccgcgtccaacaccagccgctcagcgccgcccacgcccaggtctgggtggaggaacagcaccgacggcttgggaaccgagtcccgttcccggccctgctcctccgccatggccctggagccgcaactgcaccccgcaccctgatgggggtcttctgcgcaagctccgcgctcgtagctcccagctggccactgcgggccgaccccgccctgccgtacgtgcgtcagttaggccacatcagcgcaaatctgtgagggtctagtaactgcctgagaaaatatcttgtctgaccccggttatatttttccttcggtagggattggactttctgaaggacgttgtgatccaaaggaaggaggccggaggtctctacttcccatacagcaggtaactaagttgtctgtagcagactgtctacaggcatatcgtgagacgacccaggcgtccctggggtcagagaggaccttgcctgcaagtccgggggcggggcctgagtcagtctcgccagctgccggtctttcgggggctccgtaactttctatccgtccgcgtcagcgccttgccaccctcatctccaatatggtatggcggcccttccatgatccccgcctctcccagaagccctgactcctcctgctttgcgccgtgcttttcctctgtagctcccttgcttcccccagcctcgggtgtgggtgtctaggccggggttctggggcaggcctgccgcgctcacccgtctgtctgcttgtctccctctacagcctggtccgacccccagtggcactaacgtgggatcctcagggcgctctcccagcaaagcagtggccgcccgggcggcgggatccactgtccggcagaggtaaggaaccctgcagttcgttcgcttccagactcggagataggacccagaacctcgctgattctggggtggagaccctagcatgtgaagattgacaaaggcaaaatgagcttctagtgacgtggccgtgggagtagttaaaggccttttgggaggaaggcgacattttttttctcgttgctcagtttagggcactactcttaaaaaaggaaagttaacaaactggaatagagtcagagataactttgagaaaaccgatgtcattaaactggtgtctctggacctgaggtttgcactcacatttccatctggcggccccataagcaatctgtcctacagataactcgtcctacacaaaacttagtctcttttcagctcagctctctcactctcaattatatctccttacttccatatggcactgttgtacactcatttactcagagccagaaacgtcagcgtcatcttggatttttcttatgctctttctctctctagtcatatgccagactttaaactctgcttgaaagctttctcataagctctttccttttccctttctactgctttgcatttgctacttaacccttttcttcaggctgtttgctttccagtccatcgttcgctctgctgttactcttctgcgtagtttctgttacttgttgctgaactaaaaaaaacaaacaaacaaaaaaaaaaaaccggggggataccaaagctcttagtggtcatttcagcctaacctttctttttcctttttttttttttgggatggaatctcactctgtcgcccaggctggagtgcagtggcacgatctcggctcactacagcctttgcctccagagttcaagcaattctcctgcctcagcctcctgagtagctgagactgcaggcacgtgccaccacacccagctaattttttgtatttttagtagagacggggtttcaccatgttagccaggatggtctcgatctcctgaccttgtgatcctccgtctctgcctccaaaagtgctggaattacaggcgtgagccactgcgcccggccttcagcctaatctttctttgctgtcctatgatccagcactcgtgaacccattactgttttctgaattcacaaactttctccctcatctcaaggcaaatttctacttattttccaagactaagctcaggggttatttcctcttgaggccttctctgtctgtaagcagcagtagctactagttttcccttttgcccccatagcattttgttcatatcattataagaccagtgatgtttccatatttatctccttcattagactttaacagagaacc

SEQ ID NO: 588123 - DNA, 4001 bp, Homo sapiens
tctggggttcagcgggaaggtcctgactggaagcagagatctgcaacttcccaggatggacggggctgggaaggttgtgggtctctgggtctctctcagctttccagccccaccctagtgctcaccgccaacgagtgctggtcatgctgatctccgcctctgtagcgccctctcccagcaccagcgtgctcactgtcatcctgtccatgatcttcttcagccaggggcaggtggaaccgatggccaggttgtaccacttcccatagatctaggaggcaggtgagctctgggggtctgcatcagtctcagacctcaaagcagacctggctgacatctgctccccaccctccacctcctcctcttcctcctccttctcctcaaaatgacttatccttttaagggataatgtcttacaactaatcagaggccacacaccttcaagggaggccagatccctaagagtggcgtttcaggcatcacagcgaacccaggaagcaggtgtgcggctggggtcccaacctgccctgcagaagggctaactctctcaagatgtgggatctgtccatagctccatcaaccactgctccccaagagctggagtcctgtcttttactcctccaatgatggggtgctccccaccttgcaaggcagcccacagccccatgttaggaattatttcaaaagtataatgaacatgatggggtcattcaggataggcctgcttcctcttcctcctgaaagtgcacgggacagctgaaggagccctcaggctcctacggaacaggccaatgtgccccacaccctttgcgtcccagactgccacagggacctgctcctcattgcccctctgccacgacctttccttgtccctaaaagtaaacaaaacccacatgacaccacagctagaaggttctgagacccttcatacagacatggagacagccccaggtgggcaagggtattctcaaagccaccccgggatttagggcagagtgggggctggaaggcagctctggcactccacactcacaggagagtgtcctgccccagtccaggtctctccttgtgcccaagcctctgaatgtctcccaaccctaatctctgtcctgcttcacctcttcccataagccccacatgcccaacccaaaagctgctggccacatgcccacgctgtgccaccccaggtgtctgtccacagtcaggccaggatgtgggcaggggacacaggaagagctaagggaaagatgccacagagagaggggagtcattagagaaggaagggctgggaggtctgggcaaagctaggtgtctgcacgggggctgcagggcagtggcaggcaggacaaagccttctctggagcaggttcccattaacacaagggttccccttggagcccacgaggacagtgcagaaggtgaggatgtttgactcatagaatgtcagccaagagacccacggaatggcaggggatagagctgtaccttcaaaggatcccataatcccagatgatctgagtggaagcctgagaccccgagacaggccgcacttgcccagcagggcccatctgcctggactccccatcaccacatccaccctaccacagagagcggcagccttacccgagagatattgaagttttcctgcacttggatgttgtcgggcggcgttggcacagggccagcgctcaccgccaggcaggcgctcagcagcaagagcagggccccgaggctcctcatggctatgggctcctctgccttggtatatcccacaggctcggtctagcaacagaagggccaccgcctccctgcaacagggcagctgtgaactgaggctggggaaggggcctgtggcttgtagttgacctcagtgtttgccctgctcagctggggccaattacagccccaaggacagctccaatcgatccctgtagcctggctggggtcagcagtaccaagaggccgggatggctgcttcagaagaggcattggccaagcacaatagggccctggagcaccaggattgggctccgccccccaaaagtcccccacagagggcatgcgaggatggggagcgacctggcctttctgctgagtcatgccatctggacctcacagctctgtgagccagcaggtcaagcctgattgggcccatttctcacaggaaaaaactgaggcccaaggagaggaagtgacttgccagagacctcagggaagtctatgggcagagccaagaccagaacccaggtatcctgtctccagagttccttctccagcccccaggcttgccctagcctttgcaaataatagagacattaacaatgatgactgttacgagcttccgttcactgagcacctgctatgtgctggctgtgtaccaggcactttacacgtgccacaggtgtccagtaaatccccacaacaagcttacgaagtaggtgctatttgtcccctttacaggcagaggagttgagtctccaagaagtgaagtgacttgcccagaatccctcagccgggagtggagtagctgggaaaggcgtggtagagaccatggacgtgggagccaggcagcctacagtggcactcactgctgtgtgaccttgggcaagtcactttacctttcagtgccttggtttcctcatctgtaaatggggataataatagttcctagctcctagcattgttgagtgagcacctgcaatgcgctaggacagtacccagcatagagtaagagctgagtgtttgtggtgggttgaacagtgccccctccagaatccatgtgcaccccgaaccgcagaatgaacctgatttgcagatgtgattagttagatgaggttgaactggatgacaggggttttaaatccaatgaccggtatctttataagagaatggtgagggagactcagacacagggacacagagagaagcacggggaagatgtggcgtgacgccgaaggcagagatgggagggatgcagtgacacgtcaaaaatcaccaaggattgatggcagccaccaaaagctagcaaaaggcaaggaaggacttttccccagaatcttcaaagggaacatggctctgctgaaaatttggtctcaggtgtctgacctccagtgctgagagaagacacatttcctagcagccctaggaaactaatacagtagttattaaacttaaggttttatttatttatttattattttgagacggagtttcactcttgtcgcccaggctggagtgcagtggtgcgatctcggctcactgcaacctccacattctgggctgaagtgattcttgtgcctcagcctcccgagtagctgagattacaggtgcccaccaccatgcctggctaatttttgtatttttagtagagacagcgtttcaccatattggccagactggtctctaactcctgacctcaggtgatcctctcacctcagcctcccaaagtgctgggattacaggcgtaagccactgcgctcagcctaaatttaagattttaaatgagaattttttaaaacccaggtccgttgtctgtgagctcacactcttgccagcaataccaaaggcctctctatgaatttcccttctccagtggttaaatctactgtccttacttcctccctgctcttggcatggaacattccatactctcagccacctctctgttagagctgggaatgaccccttcgggcaggcagtcccaagattaagacccctgcttatgtgagaatcaaaggattcccccatgtagtcagtgcagaaacaaatggtgtatcatgtcccttctgtaagattcagtcagtacatccctctttcactggtatccagaacaagtgtgcttctattcataaatgtgtttcctttgctccgtcaccctaaccttggccagtgattatattcccttcttgctttggctgctaggaagctcaaagccatgatgtaagtttaagcacagttactgtcttggtttagctttctgggacagttatcttcgtgttccttgt

SEQ ID NO: 588124 - DNA, 4001 bp, Homo sapiens
ggacactggccttccccatgtgatcagtggcagcaggtgtggctgtcgggggccctagccttatctcctaggatcaactctgaaacgacaaccaactgcactgctaccctggccgcagaggtacagatgccactgtttgtgcctttcagtgcagtctctggtctacagtgacaaaaggactcaagaggaggatgagaaaagttgccgtgtaacttttgcagggatgagcccaacagaagcccttcacggtctccctgacccctgccagcaaaaggagcactcctttagtccacctttagtccacctaagacctctcaagtagctgcatggctacacccccgttcaatgtgacaaaaccaccacaaatggccaagggtatgacaattgctagagaactacaacaggacctgtctctcacaacaaacccctctcctctccaaactaacaagagactgcttgccctcacagtgacctgatcttcctggagagaagcagcagcaagcttctgttcacaattacagggcaaggaatgtcgacgagggtgagaatcattcctccccaggatcgacaaaaggcacagtggaattctgcagagtccaggaagtttggagttgctaagaaatttgctgctgcagacacaagccacatagggccttaccagggtcaaggcatgaatctgtgggactgaaggtgagtgacagaagagagacacctgtgtccaggacacgctgcacaggaatccctgggactctctctctgtcatgttcctggttatcaggacggctcaccagctttctgctgaggccagctggacccaggggagcagcggggaaccagaaggagcaagggcatggccatcgggacagactactcacaagacctggctgagctgatggaactgctccagagcctggcgacaccagcactgttgcttgtcactgctgcaccctgcacacagcgggctctgcaggagccggtagtaccggcgacgggcataccggctgtccagctccccttccagttccgggtctgtgcccccttcccccttcctcttactctgcatatagactctcaagaagcacccatacagacgctggatcatctcttggaaggttctgggggtgctaaagaacaagactccgcgcaacatagtgtggacttcttctcgcagcccctgagcaccagtgcccatcagcaagcccaggcgagtccatttctccagcagctctaggctacgcaggtagggatccaggcggctctccagcaggccaaaagcgtcaaggagtagcaaaaggcactggggctcatccgcagagttctcgcattgggagatggcattccagaactcaggggagatgttggcctgcagatcgttctgcagcacctccacgaaccactcctccaggaccgagtgtagcccgtggcccctcagaacctccaccgccgcccggagctcctcttcctttggcgggactgcaccgctggtccgggaagacacctggggtgcagaaaaccgtgaggcgaggggaacacaacatagaggtggggagaggcggggaagggaagaagctgagggggaggctgcaaaaactccgctgccccctgtccgtgctgcccggacgttgggccgaagctatggaagggctgtcagcggagctgaacgaaacgaaacggaaaggtggtggaaaatggcaggacaggacagaggcggatgatggacagagccgtatgaacccgagggtagcggccccaaagcgcgtacggtcccggaaactccgcgcggggccgcccctctcttcccaggcctcaccagccccagcgcagccggcggcaccaggccggtgctcacggtgttccaggccactaacaactcctgtccgggccgggagtcgctgtccccctccgccaccacaactgccgccgccatctgcacccaccgactccgagattcgctcggcgcggcgcgcggcgatgacgcacgtctgcacgcgcagccatgacgcgcacaaggcgctcagcgatgacgcgctagttcggcgcgccgtgggggagtcgtgcgcaggcgcggacagcgctgcttccgcggcggttggggtggtggggccccgggcggcgttgaccatgacccagcagggcgcggcgctgcagaactacaacaacgagctggtcaagtgtgagcggcgcagccgggacggggaggtcgggagggccgcagggccgggttcccggctcgcagcggggtgcccctggacccgcctcgctgcgggcatcgcgcggctgagcagagccctccgtgccggaggccgggtgtccgtggcccgagccctcgctggctcgcaggccccgcgccgggcgctcgggggtggtgcctgactctggcttcctcgggtggaaggaggcccgccctccgccgccgcgctcctgccctgggcccacagcgccgcccctcccggcccccaggcatagaggagctgtgccagaagcgggaggagctgtgccggcagatccaggaggaggaggacgagaagcagcggctgcagaatgaggtgaggcagctgacagagaagctggcccgcgtcaacgagaacctggcacgcaagattgcctctcgcaacgagttcgaccggaccatcgcggagacggaggccgcctacctcaaggtggagctcgggaggccaggccgagcatcaggggataggcacggcaggggtgttgccacggcaaggcgtcaggaccggctggggctcccggctgtgggcagtctgtgcctcgctggcatttcgggcaggggcagcgtggccaggcccattgaggaacccaggctgctgtgggagtgactgtggggctgtctgtggggcctggggcatcctgggtcctggtctttatccggttctcgctagccatgtggttatttctgctcagtgtgaagagccaggtcttgggcagagcacccagcacgggccagtgctaacccagcctggctttgagggtggagaggaagtgttttgggtcagattccggagggaagagggccctgccaccccgtctgccagtccccttgggcttccgccttcccccacacaggatcccttggctacagcacccccagccaggtcccagcacctgagtgtgaggacagctggggcttaggaccttaccaacaggtgaacattaacaaccttctcacttctctggccccagatcctggagagctcccagactttgctcagcgttctcaagagggaagctgggaacctgaccaaggctacagccccagaccagaaaagtagcggcggcagggacagctgaccagaccacgggcagggcctgcctccgtgtgcccctcagctcagccccagcaagtgtgtgctcagagcatctttgttcttcacggcagcagctaccttccctcactgtctcaggtgccgagaggggcaggtgccagcctccactggcatcagtgacaagcccagggcacagcccacccgggggtcctcgcttcatgctcacacaggctatggggatggtgggctccaggtcagctctgcaaggggcttgtctctgtggcacccacactcctgccctgccagggaggctctggttgtctgagcaccatgggggccccctcaccttgtccctcctcagccagcagaggcccagggcaagggacaggaggacaggggttctccttcaccacagaacccaaacctcaggtctcacccctgtggcctgtgattatgaataaagattatctttgtaaagatccgtgccagcctgctgcttgcccgtatcaacagcatggggctgccagacacctgcagagccagagcctgaggctcccccttgggagaggagggaggagggtctggagtggcctccctgtgactgccccactagcctcagggacaccgctgagggtgcccaccctccccaggccagccccaccctgagccctccccagcagggccgccggtcctcttcccctgactggcccacggctc

SEQ ID NO: 588125 - DNA, 4001 bp, Homo sapiens
tgcagtgagccgagatcatgccactgcactccagcctgggtgacagagcgagactccatctcaaaaaaaaaaaaaaagaattcgtgtctctgctcttcccttccctctgtgccagtcctgattgttgtggtttgtaatcatcagtgaccaaggtttgctcagggtttgctgtgcaccaggcactaagccaaggccttcctaggcatgggcgcctagctttctcctagaaagcagtagggtgtggttgagtggctccggagccacaccactgggttcaagtcctggtcctggcacttactagccatgtagccatgggcacattactttacctcagtttcctcacctataaaacagggatgaataataatgcctgtgctatagggtggtcatgaggattctacaagttgagtctggcatagagtaagtgcaatataagtgttagctgttactctctggccattgttaccacctgggcagtattatcccatttcacagataagaaaactgaggtttagaaaggctaagtgttctgccagagccattggctagtaggtagaagagctgggatttgaagccagctcatgaggactgccctactctgcctccatttggaaaaatacatgtggggagcatttggccggctttggaagtggcattctcaattttccccagagagtggggtgaaaggagatgcttttccaagtaactgaactggcctctgggagctctcataatcctacagcagaggcaagagctgacccatgacacacatatcatagaaggagaagggaaggatcagtgaagaatttgtttggaaatgttatctaatactgagtgctttcaggcgacttggtatgtggagcccctgctgtccccttgcgggggtaccagggaagccgcatcctccctgtatcttggccacatccactcagttggagacccggggtaccatccagtgcagcagcccctgggtgatgcgtccgttcccgtgctgggtgcctctgctctcctcgccagctggagggtgtgagcagaggcagcccagctcctgtaactctccgagcaggggctcccagcgcctcagcacagcgcttgcctttgcctcacattgtcccggcctgggggcataggaatccaaagcttcaaagtgactacccaagtccttgggccacccctgccttctgcagctcttcagtacgctgccctctaagcacacacctacacacacgcacactcccagctgctctgccgtgccgggagctgccggccggcaccccaaaggctctttgtccaaaagaggagagtgaggcttactcatgaagtcctcgagatgccagcccatgatcatgtgcccccaaacaccaccaaatgtccacaggttctgccccggacatgcctcgtttggctccaagcgatagcagggagtgaccctctgagatccagcagcacacacccccagctggagggtcagggttctggaagccctagccacggggccagcggctgcctctcgcccctgcctctcatggccgcagagctggccccttacctcttccctcctgcttggctccggggcggctcctcacatgcttcaccctggccgtcagcggggcagcctgtccatggcctctggaggggttcctgagttgcaggccggtggctgccaagcagccctgcctcactgggctccactggctctgcctccacagagggctccggcagaggctggggccagggctggccaggggtcctgcggggctgctcacaaccttctttccctcacagtagcgtcagccgctgcctcagtgccacgctcggcaggtccagggcttggggtccatcctcaggccgtccgcagcagcctcatttgaactcccaactcctttgtggagcctttacatgccgccagaggaaactgtgagcacagcctgaccctggttggctgcaggcgcttctctccacccaccagtgcaagaggatcccccaggccccagaaaggctccgggcctcccctcagccccagacagaggcgggccgcccggtgatgtcacacgagctccggccccagctggcctggcccctcccgcccagcccgctttggcggcctcggcaggccccctccttccttggcacgggcagcctggccagctctgctccctggcccgccctctccccaaagctcaggcagctcccgcgtgctgcgaggcggagcgcttcccctttgactcagggaatgggtttagatccgctccagctgtgcgtgcagccgcgtgcgagcagcaggcagcgggtcctccccctggatgcctcgttgggcactgccccactgagccccaggctggcgggcggggcagctcagcccagagcgcctctccccatcagccgcccttcgtggaggcctcattctcatctctaaaccctggggaaaggagtccaaggctgtccacacagaagctgtggcatcggagctgctcgaagttagcaggaggcagtggcttaggacagtggaaataccacaggctgagggtggaggcagccctggaggaaagctctgtgacttcacacctgagtggctttgattaattcacttcacctctctgggcatcccttccatgcatcggtaaatgagctaattaatactagtaatctacctgcaacagctgcagcgaggactctgtgaggtcacgtgggaaggagcttggcacagtgtcaaggacgcctccttgaactgagcttaggactctggagatgggtggatcaagggtctcctgctcccagaacctctgctttgtgatcctctttagcctgtgttttcatcaaaatgtgacctcctattgggctcttctaggaacaaacactggaactgcatcagagtcctcagcatggagccagccgcataggtggagctctgtgaatgttgatagaatcagagtaagaaaggagaggatggcactggaccccatgatgcaagcatcctccagacacgtcagcactggcagcctgggagaaggtacagtcagtgcaggaggacaggcctgctgccgggcaccctgcggggatacagagagtaggaggatggcaggcaccaggaagggagccccagggtacaagtttgcccctctgcttggacaagaacatgtgaaatattggtggtatctttgcttttttaaaaaggtgttagtgatgatggtggtgatgatgtttgggaacaaattgggagaaaaactttaatgggactctccctgcccctaggcatcctccctactaccaggcacccgtcccaaccctgtggcagattcctctttcagagatggcccaagcaatctctcccagtccccaaggagaccctgacacttcacccatggagcggtgaggtccctgctcctcgccttgaacccgagagggtttgtgacttgcttgtgaccagaggaatgtggtggaagtggcaccacctgacttctgaggctgggagaggaaaggcagcgcagtctctaccctgttcaccagggcactctcttttgaagccccgagctaagctggagcctaagaagtccagctagaggccacacacagtgtaggtcccagctgacaggagcatcagccgcagacacgtgagcaaggaaagatgcctgtagatgatcccagcccttagccacagagtcaccccagatgctgcatcactgtcagctgtagagtcttcctgttgaggccccacacactggggagcagagagagccattctactgtttcatctccaaattcctgacccacaggccccatgcgtataataagatggtggttttaggccgctaaattttggtggtaatttgttacacagcattagtaactgggatagactcgggcaagagcagttggagggagccctttagaggagctgagagaagtacattgtggctgaggagagaagatggggtcttgttagagaggtggaactttattccaaagacagtaaggagccactgaaaggttttgagcaagac

SEQ ID NO: 588126 - DNA, 4001 bp, Homo sapiens
actgatttgtttttcctcactggctgtaacaaaatgcatcttcacatatcaacatacttctccacctattgccaccttcaatggccacataccattctatgggttcttgttaacataaatgctggggaaaaaaagtgcatgtatctctattttctgaaggtattttaatacaatggaattgatgggtaaagggcatatacatttttaaaatgtggtaattatctccaaattatccacttgaaaagtcatcagcaacttaaacttcaagcagcagtgtaagtgccactgctcttcattctcacaaacactgtggatagaacacagtctcactcctcttttaacttatcttatgagaaacactaaggattttttcctatgtacataagtaacttgtgaatctgcaaaaagtgctttgctcacttctagagttcttttcttgtggatttgattggaaagaattccctgtaaaataaagatgtgctttttatctgtatatatataactgatatatatatataacacattatattagtaatatatacaatttcttatacatataatcagtaatatgtattatatataataaagaataaattccctgtaggatgaagatacacttttcatctgaatatatatttttatatattagtaaaaatatatataggaaatatttttcgagtgtgttatcttttgttaatttttttctgatacacaggggattttaatttttagtttgctaaatcaactttcagaatgcctgcttgcgaggtcattcttacgaaggcctttgttaacataaaatgtacctgtataaataagtctttgcgttttcttctggtactttttctcattttgcatgtgtaaaaatttcagtctgaattccatcaggaacccatttttgcgacataaagtttcattagttttcttcacacagcaggcattttattaataactcatcttttcctactcatctgaaacgttaccattatccatccctatgtatatatcttacatatatttcagtgtttttggatttcctgttctgttccatttatttatctgtgttttcagctgttagtaaataattaattgtgggaattaatagcacattttgatatctagaggagcaagtcttttcactccattataaacatttttaaatgtcatcacaatggtaagatagatagcaagtgtcatgcaaaaatgataaaaccttgatatcttcattcagtttatgtaaaactgataaacatggaaacagttcatattttgagaaaactgagtcttcccattcaaggaacccacctcgcgcttcccagtgtccctctaagaagctccagtaaagaacctgtctacctaggtggattcggatgtaaaaccgacacagggttttatctgagaactcttcgcctactgaaaaaggctcatggtatttttgacaggggaatgagttctcattaggcacctccctatcatgtatatggccccatgttttaaacgtggatatgcctaactttgtgagttaaatcactcaaattttccaccaagcgcgacggacggggaattgccagcgacggaaagcagctgaggctccatttggctccgctgctccgagggtgcccggcgccctccaaggtccccgccccaggggctgccgggctgcagggaagccgggcctgcggccccctcccaccgcgggctgagtccccgagctacctgtcttttctgtcgcgggcgtccaagtcccggaacctgcgcgtcaggcagcgctccacctccgcggcgtcgcccttgatggcagccctgtggatcttccgcagttcccagtcccgaatgtcgtaacccggacccgcatactcttggtccatggagctcaggagcgcctggcccaggcgtctcccgaagctgaagagcttcctcatggtggcgacttctcagacgcccaccacccgctcctgagccgcggcggctcctcgtggcctttccacccccactccgccccaaatccgcgatctcccccgcaacccgcgatcccccccgcaacccgcgatccacccccaaatccaagatccacccccaaacccgcaatgtagctcagaatccgcgatccagcccggtccaccacagccttcagcagcgacactcgcagactccgacctctcagaccgagtgagcccagctaagccgttaggcgcgcgcctgaacctcagcgctccgaactctcagaccgagtgagtccccgcgatgccagttaggcgcgcgcctacaactcagcgccagccgggactccggaagccgctcccaagccctcgtggccggcagggggcacctgcagcacgggcgcacgcgtcgctggcttgcgggttctcctgggctcccgcgggacgtcccggaatcccaggagtgcatcccttcccgcctgagggcctgcctggccctgactcccgacccgctcctcctccgaagagagatcggggccgctgacaggggccctccgcagccaccggggatgggactggggggtcggttcctgtcccggtgcagccgccgccgggtagaccgcctggcttggccgcagccagggcgacatgtagccccggttctgccaggctgggagcgccagccatcttgggagttgccaggcagctgtcgccagcaggtagagggcgcctgcagcttgggcgcccaggtggtggagcacggcctaggcggcctctggatcgcgagtgcacctggcctgagagcccgccaggccctgcccctgctcggctcctcgtctgctgaagctcgggacctctagccagtggccctctgcagccacggggaatggggctgagagccggttcccgctgcagggcagaccacctagctcagccgcagccacagggacatctggccccggttctgagatgtggggagtgctggcgggctcgggggttgcctggaggctgctgcctgcacacagaaggcggatgcagcttgggtgcccaggcgggctggaggtgcatggcctggtcggcctcgggatcgccagcgcgcccagcctgagggcccccaggccgtgcctcccgcccattcctccaccggagggggatcggggtcgctggcatgggcacttggcagtcactccggatggggttgagcaggggttctcagttttcgcccctgtgcagccgccgccgggcagaatgcctggcttggccgcagccactgctacacctagcgggtcgggcgggccggggggtgaaagcgctgggaggcgggtgccttctcgccctgtggcgcctctgggccccacggcttgtcggcctccggcgcgcagggctccccagcatcctgggcgccggcccgctgcctgcacaaagtcaactcagacaggatgaacttcggttgccttgtctggctgggctgccaggcggggcagctgacctgctgatggggtgactttcttcatcttcttgcccacaggacagcgggctgggaagccaggggccgccgggacctggggctggaaaccacatctgcccacagccgcagcctcctgcacctgtcatcctggcggcgccctgacgtcggagaagcagcaggcgcggagctcctgcagcgggcaccgctgcagcaacccgacccggcgcaggcggcagtggaaggcggcctgctagcacggctcccgcggccccaggaccaggggtgcggccagcaccgccctcactccccgcgtctcgtggatattgccctccctggaggcggctggacctaagcgaggctcgcagcgatcggccccgcgaagactcgcatgcagggctcaggatcccgcattctggcgccgcggcaccgcacctttcagcagccctgctcctcttcttgttggtaaacttttgtcactctgccatgaaaagcatccaggcgtccttgatttcgacattgcgtgcacgctcagccgagctcatcagacgggcggttgtccccagagcccgcgggtagcttgttcccgggcggcg

SEQ ID NO: 588127 - DNA, 4001 bp, Homo sapiens
gcaagcaaactgatttgtttttcctcactggctgtaacaaaatgcatcttcacatatcaacatacttctccacctattgccaccttcaatggccacatacccattctatgggttcttgttaacataaatgctggggaaaaaaagtgcatgtatctgtattttctgaaggtattttaatacaatggagttgatgggtaaagggcatatacatttttaaaatgtggtaattatctccaaattatccacttgaaaagtcatcagcaacttacacttcaagcagcagtgtaagtgccactgctctttattctcacaaacactgtggatagaaaacagtctcattcctcttttaacttaaattctcttaggagaaacactaaggattttttcctatgtaaataagtaacttgtggatctgcaaaaagtactttgctcactgttagagttcttttcttgtggatttgattggaaagaattccctgtaaaataaagatgtgctttttatctgtatatatgtataactgatatatataacattatgttactaatatatacaatttgttatacatataatcagtaatatatatattatatttaataaagaataaattccctgtaggatgaagatacacttttcatctgaatatatatttttatatattagtaaaaatatatatagtaaatatttttcaagtgtgttatcttttgttaatttttttctgatacacaggggattttaattttagtttgctaaatcaaccttcagaatgcctgcttgtgaggtcattcttaggaaggccactgttaacgtaaaatgtacctgtataaataagtctttgtgttttcttctggtatttttctaattttgcatatgtaaaaatttcagtctgtattccatcaggaactcatttttgtgacataaaatttcattagttttcttcacacagcaggcattttattaataactcgtcctttcctactcatctgaaatgttaccattatcaatccctatgtatatatcttacatatatttcagtgtttttggatttcctattctgttccatttatttatatgtgtttgtagctgttagtaaataattaattgtgggaattaatagcacgttttgatatctagaggagcaagtcgtttttcactccatcataaacattttaaaatgtcatcacaatggtaagacagacagcaagtgtcatgcaaaaatgataaaaccttgatattttcattcggtttatgtaaaactgataaacatattaagagctcacattttgagaaaactgagtcttctcattcaaggaacccacctcccacttccaagtgtccctctaagaagccccagtaaagaacctatctacctaggtggatttggatgtaaaaccgacacagggttttatctgagaactcttcgcctactgaaaatggctcatggtatttttgacatgggaatgagttctcattaggcacctccctatcatgtatatggctccatgttttaaacgtagatatgcttaactttgtgagttaaatcactccaattatccaccaagcgctacaggcgggaaattcccagcgatggaaagcagctgaggctccatttggctccgcggctcccagggtcccggcgaactccgacgaccccgcctcaggcggtgcggggaaaccgggcctgggggccccctcccaccgagggctgagcccccgctacctgtcttttctgtcgcggacgtccaagtcccggaacctgcgcgtcaggcagtgctccacctctgcggcgtcgcccttgatggccgccctgtggatcttccgcagttcccagtcccgaatgtggtacccccgacccgcatactcttggtccatggagctcaggagcgcctggcccaggcgtctcccaaaactgaggagcttcctcatggtggcgacttctcagatgcccaccacccgctcctgagacgccgcggctcctcgtggcctttccacccccacccagctccaaattcgagatccccctccccacccagcgatccacccctaaatccaagatgcacccccaaacccgcgatgtagctcagaatccgcgatccagcccggtccactacagccttcagcagcgacactcgcagcctccgacctctcgatagagtgagcccagtaaagcggttaggcgcgcgcctacagctcagcgccagcccggactccggaaggcgccctcgagctcgcgtggcccgcagagggtgactgcagctcgggctcaggcgccgctggcttgcgggttctcctgggctggcgcgggacgttccggaatctcaggcgcgcatcccttcccgcctggccgtgactcccgcccctcttctccgaagagagatcggggccgctccagggaccgtccgcggggatggggctgagggtcggttcctgccccggtgcagccgccgccgggcagaccgcctggcttggccgcagccacggcgacatctagccccggttctgcgaggctgggcgcgccagccagcttgggagttgcccggcgcctgtagctgggcgcccaggtggtggagcatggcctgggcggcctctggatcgcgggtgcccctggcctgagagcccgccagaccctgccccctcccggctcctcctctgccagagctcgagacctctagccaggggccctctgcagccaccggggatggggctgagggccggttcccgcccccgtgcagctgctgcagggcagaccgcctggctcggccgcagccacagggacatctggccctgcttccgagatgtggggagtgcgggcgggcccaggagttgcctagaggctgctgcctgcacacagagggcgactgcagcttgggcgcccaggcagcggagcatggtctgggtggcctctggaatgcgtgcgcgccaggcctgagggcccccctggtggtgccacctgccctggtcttcctctgcctgagcctggagcagctgaaatggccactctgcagtcacaggggatagagttaagttttcttatcccacgcatgcacacgaaaaggtaactattctgtgaggtaattaacatgttcattgacttcattttggtaatcatttcagaatgtgcatataaacgcatcacatgtacaatttttatttctctattacacctcagtaaagctgaaataattaacaggattgaaaggataaacccacagttctatagtcacagttggacacttcaatacctcattttaattaatggatagaaaaaccagacagaagcttcatgagaaatacaagacttaaacaacagtagaagccactgagagctaatacacatatacagaacagtccatcccaacaacagcagaatatacattcttttcaagttatgtggaactttctctaggataggccatatcttcatccacaaaatatgtcctaatcatttttaaaagtttgaaatcatacaaaatataatttacaaccacaatggaagaaacaacagataaataagtgaaaactggaaaattcatgaaaatgtggaaattaaacaatacagtcttcaactaccagtgagtgaaaaaataaattacaagcaaaattataaaatatcttgagacaaattaaaataaaaacaaaacataccaaaacttattgaatgcagtgaaagtagagttcaaaggaaaatgtatggatataaacaactacattttaagaaaaaatctcaaatcaatatccgcactctatacctaaaggcagtggaagaaaacaaaaaaagactaaatccaaagctagcagaaggaaagaaataataaagagcataattagagcataaatcaataaaataaaaggttggagagcagtagaataaataaacatagattctttgaaagatcaagcctttcactatattgactgagcaaaagatggaagactaattattaaaataataaatgaaagcagagccattactaccaactttacagaaatacaaaaggattac

SEQ ID NO: 588128 - DNA, 4001 bp, Homo sapiens
tgtacataataaaatatatagataataaaatctggaaacagataaaaacattccttttttacttctgaagaggctaaaagctcaaagaagataacaacacacacaataatgataaaaaatagaaagtgagaaattattttcatcagcgcaagattcatattcctctcttcccaaggattagtccattaataataaacttttactagaagttttgtactcactgcagcaatcacagataagaaaaaggaaaaaaactttacttaaaatacaaatgctcagaaattacaaattttatattttgtacatatttttgctaaaacaagaccatagtatgtttgtgtatgtataatttaactaattttttctccttgctagctataacaaaatacatctttgcacatcaacgtacttctgtatctactgccaccttcagtggtcacatattattccatcctatggatgcaactgaaatttatttataggatccattctatgggttctctttaaagtaagtactgtgaaaaataaagtgcatgtatctttatttcctaagggtattttagtataatggaattggtgggtaaagggcatacacattttttaaatgtagtacttaccattttcaaatgagtactttgaaaagtaatcagcaacttcaagcagcagtataaaacatcctcacaaatattgtggatagaaaactgtttcattcctcttttagtttaaattcttataccagaaatgcgaaggattttttcctatgtatataagtaacttgtagatctggaaaaaggtactttgcccacttttagagtgtttgatgatttgatttgaaagaatttcctgtaaaatgaagaggtacttttcatctaatgtgtatatataactgatatatataacatattatatgtgttatatatgtatacatatcagtaatatatatatatcttatgatatataataaacaacataggccaggcgcggtggctcacacctgtaatcctagcgctttgggaggcggaggcgggcagatgacttgaggtcaggagttcgagaccagcctggccaacgtggtgaaactaaatatacaaaaattagccaggcatgctggcacctgcctgcaatcccagctacttgggaggctgaggtaggaaaattgcttgaacccggcaggcagaggttgcagtgagccaagattgtgccattggacaccagcctgggcaaagaagcgagactccgactcaaaaaaaaaaaaaaagaatataatgaattccctataaaatgaaaacatacttttcatctgaaaaaatatatatatataatatagtaaatatttttcaagtaagctctcttatctgagaacttttcgcccactgaaacaactcacggttatttttgataggggaacaagtactctcattaggcacctcctataatgtatataaaccatgttttaaacgtgtacgttaaaaataacaacgctgtatatgcttaactttgtgagttaaatcactcaaattctccaactgctccagccagggaattatgagggatggaaaacagatgagagtccgtttggctccgccgctccgagggtgcccggcgccctgcacggccccgtcccagggtctgcggggaagccgggcctgggggccccctcccacccccggctgagcccccgctacctgtgctgcttgtccagggcgtccaggtctccgctcctgcgcgccaggcagcgctccacctccgcggcgtcgcctttgacagctgccctgtggatcttctgcagttcggagtcccggattcggtatccggaacccgtgtagacgtggtctatggagccctgggccgtctggcccctgcggctcccgaagccgaataacttcatattggtgacttcttctcagacccccaaccaccggctcttgagcgagggcagctccctgtcaccttttcaccacccccctccccgaccccggccgacccagccccaaatcccctatccaaccccaaagccccgatccaaccccaactccgctatttcaaatctataatctactccacaatccgcgatccagcccggtccaccacagccttcagcagcgacactcgcagcctccgacctctcagaccgagtgagcctcgcaaagccgttgggcgcgcgcctgcacggcagttgctgccgggctcccagaagacgctccctggcggcgcgcgcctgcaccgcggttgctgccgggctcccggaagacgctccctagaggcgcgcgccagcaggtggggctgcagctccgggcgtgcgccgatgggctcgccggttctcctgggatcgcccgggcggccccaggatcgcaggcgcgcagccagcccggcctgagaaggagggcctgtctggccttgcagcccgccccgctcctcctcggaagggagatacggtgctggcaagggcactccgcggccacctgagtggcttcgcggattggctgaacgctgaggctctggccctgaaatctgtgtggctagtgtcaggtagctggagagggatggaggcagagtcaggggctgctccttcccccacccgccctcactgctgccagtgccacacgcgcggtttgcagctgcagatctggcactggcgcaggttggcggagcttcctttggatggcctcagggccgcagagcgcacagcccacctggcctcaaggtccgctcctcttggacatctttctggatcctgggccctggcgctgggcactctgtgtccacacggatgaaacagcggctgctggcggggccggttgcctgattttgccgcctgggggtctggcctcaggatccacgctactgcggggcgggcctggtctggagtgtccagtcacttgctgccggtgcaccacgtctagactgcagctgcggctccgatgccggcgtgagctggcgggcctggtacctgatgtcctcagggtcaagtgcatcgccctcccacttgagaggttgctctgacttggcctcctccaagaacgcaggggccgccgggactggctcttcgtggtaaccgggatggtaccgagcagcaggttttcaccctggtgccactgctgtgcggactgcctgacttgggcgcccaggcacccgccccagggtccgcgcggcaggtgtgcaggtagggtgagtggcgcggagggttgggggttgctccgtcatctctgcccgtgtgcaacttgcagttttgcagttttctgcagcagctgaggcgctggcgcgggaaggcggagctcccctggatggcgtcaggtttgcgggcacagagcacagcccaccaggcctgaaggtccgctcaggggccatagtggttgagttctctgtggaactgggatggggtgaacagccagttcccgtcctttggccgcctggccaactgccagacttaaccgctgccgcccaggcatctgtctctagcgttgccactacttgggtagaagtgggggtcggggtggggcgtggagcgtcaccggttgccaagccagcactgtctttgcaacatattcagatggcggcgggcagctcgggcgccagcatgggctggcggggctcccctggacggccctcaggtcgctcacagcattgtcccaggacttcctcggcctgtgccaggtgggcaaggtacaggggtagcttccaaggcttctatcccaactctacctatttctacctattttctcttgagttattttgcctttatctcagttttatttgcaaaaatagtatacgcaaaatacatcgagtgaatgcacatcaggcatatagaagatctggcagaaacatgttttctcctgctcatttccagtcagtatttgaacacagaggcttccacggttttgattctttccacaaaaggttagttttgtctgttttcaccatttatgtaagtgaaactataaattatataatttttatgttcactcactaaacatgcttgtgacacatcattttgctcctat

SEQ ID NO: 588129 - DNA, 4001 bp, Homo sapiens
tatgtacataataaaatatatagataataaaatctgaaacagataaaaacattccctttttacttctgaagaggctaaaagctcaaagaagataacaacacacacaataatgataaagaatagaaagtgagaaattattttcatcagcgcaagattcatattcctctcttcccaaggattagtccattaataataaacttttactagaagttttgtactcactgcagcaatcacagataagaaaaaggaaaaaaactttacttaaaatacaaatgctcagaaattacaaattttatattttgtacatatttttgctaaaacaagaccatagtatgtttgtgtatgtataatttaactaatttttttctccttgctagctataacaaaatacatctttgcacatcaacgtacttctgtatctactgccaccttcagtggtcacatattattccatcctatggatgcaactgaaatttatttataggatccattctatgggttctctttaaagtaagtactgtgaaaaataaagtgcatgtatctttatttcctaagggtattttagtataatggaattggtgggtaaagggcatacacattttttaaatgtagtacttaccattttcaaatgagtactttgaaaagtaatcagcaactttaagcagcagtataaaacatcctcacaaatattgtggatagaaaactgtttcattcctcttttagtttaaattcttataccagaaatgcgaaggattttttcctatgtatataagtaacttgtagatctggaaaaaggtactttgcccacttttagagtgtttgatgatttgatttgaaagaattccctgtaaaatgaagaggtacttttcatctaatgtgtatatataactgatatatataacatatgtgttatatatgtatacatatcagtaatatatatatatcttatgatatataataaacaacataggccaggcgcggtggctcacacctgtaatcccagcgctttgggaggtggaggcgggcagatgacttgaggtcaggagttcgagaccagcctggccaacgtggtgaaactaaatatacaaaaattagccaggcatgctggcacctgcctgcaatcccagctacttgggaggctgaagtaggaaaattgcttgaacccggcaggcagaggttgcagtgagccaagattgtgccattggacaccagcctgggcaaagaagcgagactctgactcaaaaaaaaaaaaaaaagaatataatgaattccctataaaatgaaaacatacttttcatctgaaaaaaaaatatatatatataatatagtaaatatttttcaagtaagctctcttatctgagaacttttcgcccactgaaacaactcacggttatttttgataggggaacgagttctctcattaggcacctcctataatgtatataaaccatgttttaaacgtgtacgttaaaaataacaacgctgtatatgcttaactttgtgagttaaatcactcaaattctccaactgctccagccagggaattatgagggatggaaaacagctgagagtccgtttggctccgccgctccgagggtgcccggcgccctgcaaggccccgtcccagggtctgcggggaagccgggcctgggggccccctcccaccccgggctgagcccccgctacctgtgctgcttgtccagggcgtccaggtctccgctcctgcgcgccaggcagcgctccacctccgcggcgtcgcctttgacagctgccctgtggatcttctgcagttcggagtcccggattcggtatccggaacccgtgtagacgtggtctatggagccctgggccgtctggcccctgcggctcccgaagccgaataacttcatattggtgacttcttctcagacccccaaccaccggctcttgagcgggggcagctccctgtcaccttttcaccacccccctccccgaccccggccgacccagccccaaatcccctatccaaccccaaagccccgatccaaccccaactccgctatttcaaatctatggtctactccacaatccgcgatccagcccggtccaccacagccttcagcagcgacactcgcagcctccgacctctcagaccgagtgagcctcgcaaagccgttgggcgcgcgcctgcacggcagttgctgccgagctcccagaagacggtccctggcggagcgcgcctgcaccgcggttgctgccgggctcccggaagacgctccctggcggcgcgcgccagcaggtggggctgcagctctgggcgtgcgccgatgggctcgccggttctcctgggatcgcccgggcggccccaggatcgcaggcgcgcagccagcccggcctgagaaagagggcctgtctggccttgcagcccgccccgctcctcctcagaagggagatagggtgctggcaagggcactccgcggccacctgagtggcttcgcggattggctgaacgctgaggctctggccctgaagtctgtgtggctagtgtcaggtagctggagagggatggaggcagagtcaggggctgctccttcccccacccgccctcactgctgccagtgccacacgcgcggtttgcagctgcagatctggcactggcgcaggatggcggagcttcctttggatggcctcagggccgcagagcgcacagcccacctggcctcaaggtccgctcctcttggacatctttctggatcctgggccctggcgctgggcactctgtgtccacacggatgaaacagcggctgctggcggggccggttgcctgattttgccgcctgggggtctggcctcaggatccacgctactgcggggcgggcctggtctggagtgtccagtcacttgctgccggtgcaccacgtctagactgcagctgcggctccgatgccggcgtgagctggcgggcctggtacctgatgtcctcagggtcaagtgcatcgccctcccacttgagaggttgctctgacttggcctcctccaagaacgcaggggccgccgggactggctcttcgtggtaaccgggatggtaccgagcagcaggttttcaccctggtgccactgctgtgcggactgcctgacttgggcacccaggcacccgccccagggtccgcgcggcaggtgtgcaggtagggtgagtggcgcggagggtcgggggttgctccgtcatctctgcccgtgtgcaacttgcagttttgcagttttctgcagcagccgaggcgctggcgcgggaaggcggagctcccctggatggcgtcaggtttgcgggcacagagcacagcccaccaggcctgaaggtccgctcaggggccatagtggttgagttctctgtggaactgggatggggtgaacggccagttcccgtcctttggccacctggccaactgccagacttaaccgctgccgcccaggaatctgtctctagcgtagccactacttgggtagaagtgggggtcggggtggggcgtggagcgtcaccggttgccaggccagcactgtctttgcaacatattcagatggcggcgggcagctcgggcgccagcatgggctggcggggctcccctggacggccctcaggtcgctcacagcattgtcccaggacttcctcggcctgtgccaggtgggcaaggtacgggggtagcttcaaaggcttctatcccaactctacctatttctacctattttctcttgagttattttgcctttatctcagttttatttgcaaaaatagtatacgcaaaatacatcgagtgaatgcacatcaggcatatagaagatctggcagaaacatgttttctcctgcccatttccagtcagtatttgaacacagaggcttccacggttttgattctttccacaaaaggttagttttgtctgttttcaccatttatgtaagtgaaactataaattatataatttttatgttcactcactaaacatgcttgtgacacatcattttgctccta

SEQ ID NO: 588130 - DNA, 4001 bp, Homo sapiens
atgtacataataaaatatatagataataaaatctggaaacagataaaaacattccctttttacttctgaagaggctaaaagctcaaagaagataacaacacacacaataatgataaaaaatagaaagtgagaaattattttcatcagcacaagattcatattcctctcttcccaaggattagtccattaataataaacttttactagaagttttgtactcactgcagcaatcacagataagaaaaaggaaaaaaactttacttaaaatacaaatgctcagaaattacaaattttatattttgtacatatttttgctaaaacaagaccatagtatgtttgtgtatgtataatttaactaattttttctccttgctagctataacaaaatacatctttgcacatcaacgtacttctgtatctattgccaccttcagtggtcacatattattccatcctatggatgcaactgaaatttatttataggatccattctatgggttctctttaaaataagtactgtgaaaaataaagtgcatgtatctttatttcctaagggtattttagtataatggaattggtgggtaaagggcatacacattttttaaatgtagtacttaccattttcaaatgagtactttgaaaagtaatcagcaactttaagcagcagtataaaacatcctcacaaatattgtggatagaaaactgtttcattcctcttttagtttaaattcttataccagaaatgcgaaggattttttcctatgtatataagtaacttgtagatctggaaaaaggtactttgcccacttttagagtgtttgataatttgatttgaaagaattccctgtaaaatgaagaggtacttttcatctaatgtgtatatataactgatatttataacatattatatgtgttatatatgtatacatatcagtaatatatatatatatcttatgatatataataaacaacataggccaggcgcggtggctcacacctataatcccagcgctttgggaggcggaggcgggcagatgacttgaggtcaggagttcgagaccagcctggccaacgtggtgaaactaaatatacaaaaattagccaggcatgctggcacctgcctgcaatcccagctacttgggaggctgaggtaggaaaattgcttgaaccgggcaggcagaggttgcagtgagccaagattgtgccattggacaccagcctgggcaaagaagcgagactccgactcaaaaaaaaaaaaagaatataatgaattccctataaaatgaaaacatacttttcatctgaaaaaatatatatatataatatagtaaatatttttcaagtaagctctcttatctgagaacttttcgcccactgaaacaactcacggttatttttgataggggaacaagtactctcattaggcacctcctataatgtatataaaccatgttttaaacgtgtacgttaaaaataacaacgctgtatatgcttaactttgtgagttaaatcactcaaattctccaactgctccagccagggaattatgagggatggaaaacagctgagagtccgtttggctccgccgctccgagggtgcccggcgccctgcacggccccgtcccagggtctgcggggaagccgggcctgggggccccctcccaccccgggctgagcccccgctacctgtgctgcttgtccagggcgtccaggtctccgctcctgcgcgccaagcagcgctccacctccgcggcgtcgcctttgacagctgccctgtggatcttctgcagttcggagtcccggattcggtatccggaacccgtgtagacgtggtctatggagccctgggccgtctggcccctgcggctcccgaagccgaataacttcatattggtgacttcttctcagacccccaaccaccggctcttgagcgagggcagctccctgtcaccttttcaccaaccccctccccgaccccggccgacccagccccaaatcccctatccaaccccaaagccccgatccaaccccaactccgctatttcaaatctataatctacacaatccgcgatccagcccggtccaccacagccttcagcagcgacactcgcagcctccgacctctcagaccgagtgagcctcgcaaagccgttgggcgcgcgcctgcacggcagttgctgccgggctcccagaagacgctccctggcggcgcgcgccagcaggtggggctgcagctctgggcgtgcgccgatgggctcgccggttctcctgggatcgcccgggcagccccaggatcgcaggcgcgcagccagcccggcctgagaaggagggcctgtctggccttgcagcccgccccgctcctcctcagaagggagatagggtgctggcaagggcactccgcggccacctgagtggcttcgcggattggctgaacgctgaggctctgaccctgaagtctgtgtggctagtgtcaggtagctggagagggatggaggcagagtcagggactgctccttcccccacccgccctcactgctgccagtgccacacgcgcggtttgcagctgcagatctggcactggcgcaggatggcggagcttcctttggatggcctcagggccgcagagcgcacagcccacctggcctcaaggtccgctcctcttggacatctttctggatcctgggccctggcgctgggcactctgtgtccacacggatgaaacagcggctgctggcggggccggttgcctgattttgccgcctgggggtctggcctcaggatccacgctactgcggggcgggcctggtctggagtgtccagtcacttgctgccggtgcaccacgtctagactgcagctgcggctccgatgcaggcgtgagctggcgggcctggtacctgatgtcctcagggtcaagtgcatcgccctcccacttgagaggttgctctgacttggcctcctccaagaacgcaggggccgccgggactggctcttcgtggtaaccgggatggtaccgagcagcaggttttcaccctggtgccactgctgtgcggactgcctgacttgggcacccaggcacccgccccagggtccgcgcggcaggtgtgcaggtagggtgagtggcgcggagggtcgggggttgctccgtcatctctgcccgtgtgcaacttgcagttttgcagttttctgcagcagccgaggcgctggcgcgggaaggcggagctcccctggatggcgtcaggtttgcaggcacagagcacagcccaccaggcctgaaggtccgctcaggggccatagtggttgagttctctgtggaactgggatggggtgaacggccagttcccgtcctttggccacctggccaactgccagacttaaccgctgccgcccaggaatctgtctctagcgtagccactacttgggtagaagtgggggtcggggtggggcgtcaccggttgccaggccagcactgtctttgcaacatattcagatggcggcgggcagctcaggcgccagcatgggctggcggggctcccctggacggccctcaggtcgctcacagcattgtcccaggacttcctcggcctgtgccaggtgggcaaggtacgggggtagcttcgaaggcttctatcccaactctacctatttctatctatcttctcttgagttattttgcctttatctcagttttatttgcaaaaatagtatacgcaaaatacatcgagtgaatgcacatcaggcatatagaagatctggcagaaacatgttttctcctgcccatttccagtcagtatttgaacacagaggcttccacggttttgattctttccacaaaaggttagttttgtctgttttcaccatttatgtaagtgaaactataaattatataatttttatgttcactcactaaacatgcttgtgacacatcattttgctcctattgattattcattattttctaatattcaactttatgactataccacaggtttgaggcctttgc

SEQ ID NO: 588131 - DNA, 4001 bp, Homo sapiens; identical to SEQ ID NO: 588128

SEQ ID NO: 588132 - DNA, 4001 bp, Homo sapiens
ttgcataaatggaacgagtatataagcaaaacatatgtacataataaaatatatagataataaaatctggaaacagataaaaacattccctttttacttctgaagaggctaaaagctcaaagaagataacaacacacacaataatgataaaaaatagaaagtgagaaattattttcatcagcacaagattcatattcctctcttcccaaggattagtccattaataataaacttttactagaagttttgtactcactgcagcaatcacagataagaaaaaggaaaaaaactttacttaaaatacaaatgctcagaaattacaaattttatattttgtacatatttttgctaaaacaagaccatagtatgtttgtgtatgtataatttaactaattttttctccttgctagctataacaaaatacatctttgcacatcaacgtacttctgtatctattgccaccttcagtggtcacatattattccatcctatggatgcaactgaaatttatttataggatccattctatgggttctctttaaaataagtactgtgaaaaataaagtgcatgtatctttatttcctaagggtattttagtataatggaattggtgggtaaagggcatacacattttttaaatgtagtacttaccattttcaaatgagtactttgaaaagtaatcagcaactttaagcagcagtataaaacatcctcacaaatattgtggatagaaaactgtttcattcctcttttagtttaaattcttataccagaaatgcgaaggattttttcctatgtatataagtaacttgtagatctggaaaaaggtactttgcccacttttagagtgtttgataatttgatttgaaagaattccctgtaaaatgaagaggtacttttcatctaatgtgtatatataactgatatttataacatattatatgtgttatatatgtatacatatcagtaatatatatatatatcttatgatatataataaacaacataggccaggcgcggtggctcacacctataatcccagcgctttgggaggcggaggcgggcagatgacttgaggtcaggagttcgagaccagcctggccaacgtggtgaaactaaatatacaaaaattagccaggcatgctggcacctgcctgcaatcccagctacttgggaggctgaggtaggaaaattgcttgaaccgggcaggcagaggttgcagtgagccaagattgtgccattggacaccagcctgggcaaagaagcgagactccgactcaaaaaaaaaaaaagaatataatgaattccctataaaatgaaaacatacttttcatctgaaaaaatatatatatataatatagtaaatatttttcaagtaagctctcttatctgagaacttttcgcccactgaaacaactcacggttatttttgataggggaacaagtactctcattaggcacctcctataatgtatataaaccatgttttaaacgtgtacgttaaaaataacaacgctgtatatgcttaactttgtgagttaaatcactcaaattctccaactgctccagccagggaattatgagggatggaaaacagctgagagtccgtttggctccgccgctccgagggtgcccggcgccctgcacggccccgtcccagggtctgcggggaagccgggcctgggggccccctcccaccccgggctgagcccccgctacctgtgctgcttgtccagggcgtccaggtctccgctcctgcgcgccaagcagcgctccacctccgcggcgtcgcctttgacagctgccctgtggatcttctgcagttcggagtcccggattcggtatccggaacccgtgtagacgtggtctatggagccctgggccgtctggcccctgcggctcccgaagccgaataacttcatattggtgacttcttctcagacccccaaccaccggctcttgagcgagggcagctccctgtcaccttttcaccaaccccctccccgaccccggccgacccagccccaaatcccctatccaaccccaaagccccgatccaaccccaactccgctatttcaaatctataatctacacaatccgcgatccagcccggtccaccacagccttcagcagcgacactcgcagcctccgacctctcagaccgagtgagcctcgcaaagccgttgggcgcgcgcctgcacggcagttgctgccgggctcccagaagacgctccctggcggcgcgcgccagcaggtggggctgcagctctgggcgtgcgccgatgggctcgccggttctcctgggatcgcccgggcagccccaggatcgcaggcgcgcagccagcccggcctgagaaggagggcctgtctggccttgcagcccgccccgctcctcctcagaagggagatagggtgctggcaagggcactccgcggccacctgagtggcttcgcggattggctgaacgctgaggctctgaccctgaagtctgtgtggctagtgtcaggtagctggagagggatggaggcagagtcagggactgctccttcccccacccgccctcactgctgccagtgccacacgcgcggtttgcagctgcagatctggcactggcgcaggatggcggagcttcctttggatggcctcagggccgcagagcgcacagcccacctggcctcaaggtccgctcctcttggacatctttctggatcctgggccctggcgctgggcactctgtgtccacacggatgaaacagcggctgctggcggggccggttgcctgattttgccgcctgggggtctggcctcaggatccacgctactgcggggcgggcctggtctggagtgtccagtcacttgctgccggtgcaccacgtctagactgcagctgcggctccgatgcaggcgtgagctggcgggcctggtacctgatgtcctcagggtcaagtgcatcgccctcccacttgagaggttgctctgacttggcctcctccaagaacgcaggggccgccgggactggctcttcgtggtaaccgggatggtaccgagcagcaggttttcaccctggtgccactgctgtgcggactgcctgacttgggcacccaggcacccgccccagggtccgcgcggcaggtgtgcaggtagggtgagtggcgcggagggtcgggggttgctccgtcatctctgcccgtgtgcaacttgcagttttgcagttttctgcagcagccgaggcgctggcgcgggaaggcggagctcccctggatggcgtcaggtttgcaggcacagagcacagcccaccaggcctgaaggtccgctcaggggccatagtggttgagttctctgtggaactgggatggggtgaacggccagttcccgtcctttggccacctggccaactgccagacttaaccgctgccgcccaggaatctgtctctagcgtagccactacttgggtagaagtgggggtcggggtggggcgtcaccggttgccaggccagcactgtctttgcaacatattcagatggcggcgggcagctcaggcgccagcatgggctggcggggctcccctggacggccctcaggtcgctcacagcattgtcccaggacttcctcggcctgtgccaggtgggcaaggtacgggggtagcttcgaaggcttctatcccaactctacctatttctatctatcttctcttgagttattttgcctttatctcagttttatttgcaaaaatagtatacgcaaaatacatcgagtgaatgcacatcaggcatatagaagatctggcagaaacatgttttctcctgcccatttccagtcagtatttgaacacagaggcttccacggttttgattctttccacaaaaggttagttttgtctgttttcaccatttatgtaagtgaaactataaattatataatttttatgttcactcactaaacatgcttgtgacacatcattttgctcctattgattattcattattttctaatattcaa

SEQ ID NO: 588133 - DNA, 4001 bp, Homo sapiens
tgcataaatggaatgagtatataagcaaaacatatgtacataataaaatatatagataataaaatctggaaacagataaaaacattccttttttacttctgaagaggctaaaagctcaaagaagataacaacacacacaataatgataaaaaatagaaagtgagaaattattttcatcagcgcaagattcatattcctctcttcccaaggattagtccattaataataaacttttactagaagttttgtactcactgcagcaatcacagataagaaaaaggaaaaaaactttacttaaaatacaaatgctcagaaattacaaattttatattttgtacatatttttgctaaaacaagaccatagtatgtttgtgtatgtataatttaactaattttttctccttgctagctataacaaaatacatctttgcacatcaacgtacttctgtatctactgccaccttcagtggtcacatattattccatcctatggatgcaactgaaatttatttataggatccattctatgggttctctttaaagtaagtactgtgaaaaataaagtgcatgtatctttatttcctaagggtattttagtataatggaattggtgggtaaagggcatacacattttttaaatgtagtacttaccattttcaaatgagtactttgaaaagtaatcagcaacttcaagcagcagtataaaacatcctcacaaatattgtggatagaaaactgtttcattcctcttttagtttaaattcttataccagaaatgcgaaggattttttcctatgtatataagtaacttgtagatctggaaaaaggtactttgcccacttttagagtgtttgatgatttgatttgaaagaatttcctgtaaaatgaagaggtacttttcatctaatgtgtatatataactgatatatataacatattatatgtgttatatatgtatacatatcagtaatatatatatatcttatgatatataataaacaacataggccaggcgcggtggctcacacctgtaatcctagcgctttgggaggcggaggcgggcagatgacttgaggtcaggagttcgagaccagcctggccaacgtggtgaaactaaatatacaaaaattagccaggcatgctggcacctgcctgcaatcccagctacttgggaggctgaggtaggaaaattgcttgaacccggcaggcagaggttgcagtgagccaagattgtgccattggacaccagcctgggcaaagaagcgagactccgactcaaaaaaaaaaaaaaagaatataatgaattccctataaaatgaaaacatacttttcatctgaaaaaatatatatatataatatagtaaatatttttcaagtaagctctcttatctgagaacttttcgcccactgaaacaactcacggttatttttgataggggaacaagtactctcattaggcacctcctataatgtatataaaccatgttttaaacgtgtacgttaaaaataacaacgctgtatatgcttaactttgtgagttaaatcactcaaattctccaactgctccagccagggaattatgagggatggaaaacagatgagagtccgtttggctccgccgctccgagggtgcccggcgccctgcacggccccgtcccagggtctgcggggaagccgggcctgggggccccctcccacccccggctgagcccccgctacctgtgctgcttgtccagggcgtccaggtctccgctcctgcgcgccaggcagcgctccacctccgcggcgtcgcctttgacagctgccctgtggatcttctgcagttcggagtcccggattcggtatccggaacccgtgtagacgtggtctatggagccctgggccgtctggcccctgcggctcccgaagccgaataacttcatattggtgacttcttctcagacccccaaccaccggctcttgagcgagggcagctccctgtcaccttttcaccacccccctccccgaccccggccgacccagccccaaatcccctatccaaccccaaagccccgatccaaccccaactccgctatttcaaatctataatctactccacaatccgcgatccagcccggtccaccacagccttcagcagcgacactcgcagcctccgacctctcagaccgagtgagcctcgcaaagccgttgggcgcgcgcctgcacggcagttgctgccgggctcccagaagacgctccctggcggcgcgcgcctgcaccgcggttgctgccgggctcccggaagacgctccctagaggcgcgcgccagcaggtggggctgcagctccgggcgtgcgccgatgggctcgccggttctcctgggatcgcccgggcggccccaggatcgcaggcgcgcagccagcccggcctgagaaggagggcctgtctggccttgcagcccgccccgctcctcctcggaagggagatacggtgctggcaagggcactccgcggccacctgagtggcttcgcggattggctgaacgctgaggctctggccctgaaatctgtgtggctagtgtcaggtagctggagagggatggaggcagagtcaggggctgctccttcccccacccgccctcactgctgccagtgccacacgcgcggtttgcagctgcagatctggcactggcgcaggttggcggagcttcctttggatggcctcagggccgcagagcgcacagcccacctggcctcaaggtccgctcctcttggacatctttctggatcctgggccctggcgctgggcactctgtgtccacacggatgaaacagcggctgctggcggggccggttgcctgattttgccgcctgggggtctggcctcaggatccacgctactgcggggcgggcctggtctggagtgtccagtcacttgctgccggtgcaccacgtctagactgcagctgcggctccgatgccggcgtgagctggcgggcctggtacctgatgtcctcagggtcaagtgcatcgccctcccacttgagaggttgctctgacttggcctcctccaagaacgcaggggccgccgggactggctcttcgtggtaaccgggatggtaccgagcagcaggttttcaccctggtgccactgctgtgcggactgcctgacttgggcgcccaggcacccgccccagggtccgcgcggcaggtgtgcaggtagggtgagtggcgcggagggttgggggttgctccgtcatctctgcccgtgtgcaacttgcagttttgcagttttctgcagcagctgaggcgctggcgcgggaaggcggagctcccctggatggcgtcaggtttgcgggcacagagcacagcccaccaggcctgaaggtccgctcaggggccatagtggttgagttctctgtggaactgggatggggtgaacagccagttcccgtcctttggccgcctggccaactgccagacttaaccgctgccgcccaggcatctgtctctagcgttgccactacttgggtagaagtgggggtcggggtggggcgtggagcgtcaccggttgccaagccagcactgtctttgcaacatattcagatggcggcgggcagctcgggcgccagcatgggctggcggggctcccctggacggccctcaggtcgctcacagcattgtcccaggacttcctcggcctgtgccaggtgggcaaggtacaggggtagcttccaaggcttctatcccaactctacctatttctacctattttctcttgagttattttgcctttatctcagttttatttgcaaaaatagtatacgcaaaatacatcgagtgaatgcacatcaggcatatagaagatctggcagaaacatgttttctcctgctcatttccagtcagtatttgaacacagaggcttccacggttttgattctttccacaaaaggttagttttgtctgttttcaccatttatgtaagtgaaactataaattatataatttttatgttcactcac

SEQ ID NO: 588134 - DNA, 4001 bp, Homo sapiens
tttgcataaatggaatgagtatataagcaaaacatatgtacataataaaatatatagataataaaatctgaaacagataaaaacattccctttttacttctgaagaggctaaaagctcaaagaagataacaacacacacaataatgataaagaatagaaagtgagaaattattttcatcagcgcaagattcatattcctctcttcccaaggattagtccattaataataaacttttactagaagttttgtactcactgcagcaatcacagataagaaaaaggaaaaaaactttacttaaaatacaaatgctcagaaattacaaattttatattttgtacatatttttgctaaaacaagaccatagtatgtttgtgtatgtataatttaactaatttttttctccttgctagctataacaaaatacatctttgcacatcaacgtacttctgtatctactgccaccttcagtggtcacatattattccatcctatggatgcaactgaaatttatttataggatccattctatgggttctctttaaagtaagtactgtgaaaaataaagtgcatgtatctttatttcctaagggtattttagtataatggaattggtgggtaaagggcatacacattttttaaatgtagtacttaccattttcaaatgagtactttgaaaagtaatcagcaactttaagcagcagtataaaacatcctcacaaatattgtggatagaaaactgtttcattcctcttttagtttaaattcttataccagaaatgcgaaggattttttcctatgtatataagtaacttgtagatctggaaaaaggtactttgcccacttttagagtgtttgatgatttgatttgaaagaattccctgtaaaatgaagaggtacttttcatctaatgtgtatatataactgatatatataacatatgtgttatatatgtatacatatcagtaatatatatatatcttatgatatataataaacaacataggccaggcgcggtggctcacacctgtaatcccagcgctttgggaggtggaggcgggcagatgacttgaggtcaggagttcgagaccagcctggccaacgtggtgaaactaaatatacaaaaattagccaggcatgctggcacctgcctgcaatcccagctacttgggaggctgaagtaggaaaattgcttgaacccggcaggcagaggttgcagtgagccaagattgtgccattggacaccagcctgggcaaagaagcgagactctgactcaaaaaaaaaaaaaaaagaatataatgaattccctataaaatgaaaacatacttttcatctgaaaaaaaaatatatatatataatatagtaaatatttttcaagtaagctctcttatctgagaacttttcgcccactgaaacaactcacggttatttttgataggggaacgagttctctcattaggcacctcctataatgtatataaaccatgttttaaacgtgtacgttaaaaataacaacgctgtatatgcttaactttgtgagttaaatcactcaaattctccaactgctccagccagggaattatgagggatggaaaacagctgagagtccgtttggctccgccgctccgagggtgcccggcgccctgcaaggccccgtcccagggtctgcggggaagccgggcctgggggccccctcccaccccgggctgagcccccgctacctgtgctgcttgtccagggcgtccaggtctccgctcctgcgcgccaggcagcgctccacctccgcggcgtcgcctttgacagctgccctgtggatcttctgcagttcggagtcccggattcggtatccggaacccgtgtagacgtggtctatggagccctgggccgtctggcccctgcggctcccgaagccgaataacttcatattggtgacttcttctcagacccccaaccaccggctcttgagcgggggcagctccctgtcaccttttcaccacccccctccccgaccccggccgacccagccccaaatcccctatccaaccccaaagccccgatccaaccccaactccgctatttcaaatctatggtctactccacaatccgcgatccagcccggtccaccacagccttcagcagcgacactcgcagcctccgacctctcagaccgagtgagcctcgcaaagccgttgggcgcgcgcctgcacggcagttgctgccgagctcccagaagacggtccctggcggagcgcgcctgcaccgcggttgctgccgggctcccggaagacgctccctggcggcgcgcgccagcaggtggggctgcagctctgggcgtgcgccgatgggctcgccggttctcctgggatcgcccgggcggccccaggatcgcaggcgcgcagccagcccggcctgagaaagagggcctgtctggccttgcagcccgccccgctcctcctcagaagggagatagggtgctggcaagggcactccgcggccacctgagtggcttcgcggattggctgaacgctgaggctctggccctgaagtctgtgtggctagtgtcaggtagctggagagggatggaggcagagtcaggggctgctccttcccccacccgccctcactgctgccagtgccacacgcgcggtttgcagctgcagatctggcactggcgcaggatggcggagcttcctttggatggcctcagggccgcagagcgcacagcccacctggcctcaaggtccgctcctcttggacatctttctggatcctgggccctggcgctgggcactctgtgtccacacggatgaaacagcggctgctggcggggccggttgcctgattttgccgcctgggggtctggcctcaggatccacgctactgcggggcgggcctggtctggagtgtccagtcacttgctgccggtgcaccacgtctagactgcagctgcggctccgatgccggcgtgagctggcgggcctggtacctgatgtcctcagggtcaagtgcatcgccctcccacttgagaggttgctctgacttggcctcctccaagaacgcaggggccgccgggactggctcttcgtggtaaccgggatggtaccgagcagcaggttttcaccctggtgccactgctgtgcggactgcctgacttgggcacccaggcacccgccccagggtccgcgcggcaggtgtgcaggtagggtgagtggcgcggagggtcgggggttgctccgtcatctctgcccgtgtgcaacttgcagttttgcagttttctgcagcagccgaggcgctggcgcgggaaggcggagctcccctggatggcgtcaggtttgcgggcacagagcacagcccaccaggcctgaaggtccgctcaggggccatagtggttgagttctctgtggaactgggatggggtgaacggccagttcccgtcctttggccacctggccaactgccagacttaaccgctgccgcccaggaatctgtctctagcgtagccactacttgggtagaagtgggggtcggggtggggcgtggagcgtcaccggttgccaggccagcactgtctttgcaacatattcagatggcggcgggcagctcgggcgccagcatgggctggcggggctcccctggacggccctcaggtcgctcacagcattgtcccaggacttcctcggcctgtgccaggtgggcaaggtacgggggtagcttcaaaggcttctatcccaactctacctatttctacctattttctcttgagttattttgcctttatctcagttttatttgcaaaaatagtatacgcaaaatacatcgagtgaatgcacatcaggcatatagaagatctggcagaaacatgttttctcctgcccatttccagtcagtatttgaacacagaggcttccacggttttgattctttccacaaaaggttagttttgtctgttttcaccatttatgtaagtgaaactataaattatataatttttatgttcactca

SEQ ID NO: 588135 - DNA, 4001 bp, Homo sapiens
catatgtacataataaaatatatagataataaaatctggaaacagataaaaacattccttttttacttctgaagaggctaaaagctcaaagaagataacaacacacacaataatgacaaaaaatagaaagtgagaaattattttcatcagcgcaagattcatattcctctcttcccaaggattagtccattaataataaacttttactagaagttttgtactcactgcagcaatcacagataagaaaaaggaaaaaaactttacttaaaatacaaatgctcagaaattacaaattttatattttgtacatatttttgctaaaacaagaccatagtatgtttgtgtatgtataatttaactaattttttctccttgctagctataacaaaatacatctttgcacatcaacgtacttctgtatctactgccaccttcagtggtcacatattattccatcctatggatgcaactgaaatttatttataggatccattctatgggttctctttaaagtaagtactgtgaaaaataaagtgcatgtatctttatttcctaagggtattttagtataatggaattggtgggtaaagggcatacacattttttaaatgtagtacttaccattttcaaatgagtactttgaaaagtaatcagcaactttaagcagcagtataaaacatcctcacaaatattgtggatagaaaactgtttcattcctcttttagtttaaattcttataccagaaatgcgaaggattttttcctatgtatataagtaacttgtagatctggaaaaaggtactttgcccacttttagagtgtttgatgatttgatttgaaagaatttcctgtaaaatgaagaggtacttttcatctaatgtgtatatataactgatatatataacatattatatgtgttatatatgtatacatatcagtaatatatatatatcttatgatatataataaacaacataggccaggcgcggtggctcacacctgtaatcccagcgctttgggaggcggaggcgggcagatgacttgaggtcaggagttcgagaccagcctggccaacgtggtgaaactatacaaaaattagccaggcatgctggcacctgcctgcaatcccagctacttgggaggctgaggtaggaaaattgcttgaacccggcaggcagaggttgcagtgagccaagattgtgccattggacaccagcctgggcaaagaagcgagactccgactcaaaaaaaaaaaaaagaatataatgaattccctataaaatgaaaacatacttttcatctgaaaatatatatatatatataatatagtaaatatttttcaagtaagctctcttatctgagaacttttcgcccactgaaacaactcacggttatttttgataggggaacaagtactctcattaggcacctcctataatgtatataaaccatattttaaacgtgtacgttaaaaataacaacgctgtatatgcttaactttgtgagttaaatcactcaaattctccaactgctccagccagggaattatgagggatggaaaacagctgagagtccgtttggctccgccgctccgagggtgcccggcgccctgcacggccccgtcccagggtctgcggggaagccgggcctgggggccccctcccaccccgggctgagcccccgctacctgtgctgcttgtccagggcgtccagttctccgctcctgcgcgccaagcagcgctccacctccgcggcgtcgcctttgacagctgccctgtggatcttctgcagttcggagtcccggattcggtatccggaacccgtgtagacgtggtctatggagccctgggccgtctggcccctgcggctcccgaagccgaataacttcatattggtgacttcttctcagacccccaaccaccggctcttgagcgagggcagctccctgtcaccttttcaccacccccctccccgaccccggccgacccagccccaaatcccctatccaaccccaaagccccgatccaaccccaactccgctatttcaaatctataatctactccacaatccgcgatccagcccggtccaccacagccttcagcagcgacactcgcagcctccgacctctcagaccgagtgagcctcgcaaagccgttgggcgcgcgcctgcacggcagttgctgccgggctcccagaagacgctccctggcggcgcgcgcctgcaccgcggttgctgccgggctcccggaagacgctccctagcggcgcgcgccagcaggtggggctgcagctctgggcgtgcgccgatgggctcgccggttctcctgggatcgcccgggcggccccaggatcgcaggcgcgcagccagcccggcctgagaaggagggcctgtctggccttgcagcccgccccgctcctcctcggaagggagatacggtgctggcaagggcactccgcggccacctgagtggcttcgcggattggctgaacgctgaggctctggccctgaagtctgtgtggctagtgtcaggtagctggagagggatggaggcagagtcaggggctgctccttcccccacccgccctcactgctgccagtgccacacgcgcggtttgcagctgcagatctggcactggcgcaggatggcggagcttcctttggatggcctcagggccgcagagcgcacagcccacctggcctcaaggtccgctcctcttggacatctttctggatcctgggccctggcgctgggcactctgtgtccacacggatgaaacagcggctgctggcggggccggttgcctgattttgctgcctgggggtctggcctcaggatccacgctactgcggggcgggcctggtctggagtgtccagtcacttgctgccggtgcaccacgtctagactgcagctgcggctccgatgccggcgtgagctggcgggcctggtacctgatgtcctcagggtcaagtgcatcgccctcccacttgagaggttgctctgacttgtcctccttcaagaacgcaggggccgccgggactggctcttcgtggtaaccgggatggtaccgagcagcaggttttcaccctggtgccactgctctgcggactgcctgacttgggcgcccaggcacccgccccagggtccgcgcggcaggtgtgcaggtagggtgagtggcgcggagggtcgggggttgctccgtcatctctgcccgtgtgcaacttgcagttttgcagttttctgcagcagctgaggcgctggcgcgggaaggcggagctcccctggatggcgtcaagtttgcgggcacagagcacagcccaccaggcctgaaggtccgctcaggggccatagtggttgagttctctgtggaactgggatggggtgaacagccagttcccgtcctttggccgcctggccaactgccagacttaaccgctgccgcccaggcatctgtctctagcgttgccactacttgggtagaagtgggggtcgaggtggggcgtggagcgtcaccggttgccaggccagcactgtctttgcaacatattcagatggcggcgggcagctcgggcgccagcatgggctggcggggctcccctggacggccctcaggtcgctcacagcattgtcccaggacttcctcggcctgtgccaggtgggcaaggtacgggggtagcttccaaggcttctatcccaactctacctatttctacctattttctcttgagttattttgcctttatctcagttttatttgcaaaaatagtatacgcaaaatacatcgagtgaatgcacatcaggcatatagaagatctggcagaaacatgttttctcctgcccatttccagtcagtatttgaacacagaggcttccacggttttgattctttccacaaaaggttagttttgtctgttttcaccatttatgtaagtgaaactataaattatataatttttatgttcactcactaaacatgcttgtgacacatcattttgctccta

SEQ ID NO: 588136 - DNA, 4001 bp, Homo sapiens
agctggagcacaactcaacacaggcagagatgctacctgaatatagagtcggtgtcacaccaactgaggaacagcacattttaaaatacccaggctcaagactatcctgcagaacttggttaaaactgatgatctggggtctctgagacactctgaggcatgtcagtgctgtagtcacaaacctcactcagtaaattcctcagggggctcaccagggcccctgtgcacgcacttggtggattgcagagatgagacacacataacacatcagtggctcccaaacctaccatacaagagaatcactggggagcctcttctcacacagagtccctgtctcttactcccctcactgccctgggccttctaaatcacaatctccagaaaaggaactcaggaatctgcacttagacaagcatcctggtgattctgatgtgtggccaggtttgggtactgaggaagccagtcagcattaacatggtgtgatggatgctaccacagaggcctttctgctgcggagggaccagagaacagggagatatcatggcaggcttcacagaagccagatctctagatgccatccttgctgtctctcttaacccctccccaagggccagtcgtcaactcctgctgatctactccctgaatatatcacaaattcatctgggtgccctccctccgctgtctccattctggtctaggccaccatcacctctcactcagactgcagcaaactctacctaaccagcctttttgactctagcttaccctagagtatctaatctattctcacacttcaaggaaagtaatttttccaaaacgtaactctcatcctgtcactcattctgcctagaaccttccatgactccctagcaccttccatgactccctagcaccctaggatagctagcgtttctcagctcccacactcccccaactccctggcatctgccttctctccagggaggactagtacatcattctactcatacattctacgcatacctcattctaccagtcctaccagctcgtgcacccaagcctttgcatgggcctcccatcatgccttcccacagcccacttgtaatgtcctggctaattctcaggtatccgcaggtctccacgtggatataaacatcttttctaccagaaaccttcccccacgtctccaaaatgggtcacctgccccacagctactcaaacctttccggtcaagctcgttcctttgcctggcctgcccaccaatgccctgggtggggactctgcctgggtctcgcagcaccctcaacgccaagccaggaagggaaggcaggttctgaggaaactcttactgcaataagaaatgaattaaatctctaaggttctaagtctctacaattctattcgctgtctccagattctattctgaaaggccaaaatttctaagaatctgattttatgttaattcaaaagtgtttccacgtctatgctcaaagtttacaaaagactactcaaagtttaccattccaactctaaggagtccttaactcttcacctcccggggcatccggccgccggggaccgcgtctcgggccagcgccgggcaccactctggtcccgggcccccgggccccgccgcctcacctggccgcctgcatgagcgcgctccagccgtagtggttgcggctgttgaccgaggcaccgcggcgcagcaggaagcgcaccagcggttcgtggcccccggccgcggcgaactgcagtgcggtgttgcccgcctcgtccgagcaatccacgggcaccggagccccgactgcccccgccgctgcggccccgggcccggccacctcggcccccgccggctccgcgcccgcctccggctccgcgccgcgctcggctggctccgccgcccccggctccagcagccgccgcgccgtctccgtgtcgccctggtcacacgcgcgcagcagcagctggaaggccgggggcagcccgccctcgcccatcgccgccgccacgcgcggcccgctcccgtccgccccgccggccgcgtcggctccgcccccggataccgcccgcaggcgcccccttccggccacccgcccgcgccgcgcgcctactgtgtgccgggagcgcgccggggctagggccgcgcgcctgctgtgtgccgggagcgcgctagggccggggctgcgcacctccagtgcccgtattcgggagtccagggacgctcagaggagcgcccgccgcagacccgcgtgttcccttttgcctcttcggcgccctctcgccgccctgtcccggggctccagaaacttcctgtcagggcagaggtgggagcggccacgccatcccctcttcacgctgtggtcagggccctgggcccgggtctgagtccgcagctgcgtgggccttgactttactagcgggctccgctgaccccaccgcagcccctggcactgaacctgcccttctagaataaggaagcggctgaattaaggaacgaacggattgtttcctcacagtgtcctgcggtgcccttaatgtcgctccttcatctgggccaggctgctggggctaaaagcgcctcctgttctctctctctcccccaccttttatttcaactattattatagattaaagggtacaggtttgttacatgggtaaattgttacatgggtaaattgcgcgacgctgaagcttgtggtcccaacgatcccgtcacccaggcagtaagcataatacccaccaagaggttcttcagcccagagtcccctccatccctccctggcctagcgatccccagcgtttgttgttcccatctttgtgtccatgtgtactcaatgtttagctcccacttataagtgagaacatgcagtatttggttttctgttctttttaggtcgcttaggataatggcctccagctttatccatgttgctgcaaagggcatgatttcgttcattcttatggctgcatagtattccgtagtattccatcatattctatcgtgtatatgcaccacatttctttcattccttccctctcttccctccctccctccctatcccccttccttcctccctccctccctccctttctccctctctctctctctctctctctctcttttgacagggtcttgctctgtcatccaggctggagtgcaatggtgcaatctctactcaccacaacctctgcctcccaggctcaagcaatcctcccacctcagcctaccgagtagctaggactgcaggcaagtgccaccacacccggctaattttttgtatttttggttgagaaagggttttaccatgttgtccggctggtctcaaagtcctgagctcaagtgattcacctgctgtggcctcccaaagtgccaggattacaggtgtgagccatcacatctggctctgtaccacatgttctttatccaatctactgttgatgggcacttaggttgattccatacccttgctattgtaaatggcactgcaatgaatatacaggtgtctttttgatagaatgaattattttcctttgggtatatacctggtagtaggtttgctgggtcaaatagttctattttaagttctttgagaaatctccaaactgctttccacggtggctgaactagtttgcattcccaccaacagtgtattttctccacagccttagcagcacctattgttttttgactttttaataattgacattctgactggtgtagatgatatctcattgtggttttgatttgcatttctctgatgattaatgatgttgcgcatttgtttcatatgtttgttggctgcctgtatgtcttcttttgagaagtgtctgttcatgccctttgcagagacacaacgaaaaaaagaaaacttcaggccaatattcctgaaaaacatagctgcaaaaatcctcaatgacatactacaaacagaatccagcagcacatcaaaaagtcaattcaccatgatcaagtaggctttatttctggaatgcaaggttggctcaacatgcgcaaatca

SEQ ID NO: 588137 - DNA, 4001 bp, Homo sapiens
ggcacgaaacctggccgctcgcttagcccagagcgggtcgggaggccccgcggggccgccctccgcgggaaagccactggcccgctggggcacccggccgcggcgctaactggcccgcgccggtccgcggcggggggggggctcgcgacggcgggcagccgcgctaaacccgggagacgaatggggcaattcccacaggtcggacccacgcccacgcagccgcgccgcaagagggccgccctcaggcccctacagcccgcaaggcgcgcggccgaccgcaccaggccgctctcaagcacgtgggaggccagaggccgcccggcccacgagccgagccgaagcccgcccaaaatcccgcgcgcccggcgcggggcgggggcggccgcctgccgttgcccttttaagaagggggagggggtcggcagcgcgcccgcgacgggatgagtcggcggcggccgcggcgcgcggctcccgccagtgggagccaagccccggcggggcggggggaaacagaccgagggctcggcgcgggaagaggcggccgccagccagcgccgagggcgggcgggcaaggccaagctcgtgggccggctcaccaggcgcagggagacgggcacccgccaacatggcgctgcggcggcctgtggcgcgccccggctggcgtgaagagccgccgcccgcccacacggaggggccagcctcccggggcaagggcaggggccccgggcgccgccgccgcggcacagggggaagggcgaggccgtcgccacaacggttggccttggtcgacccgggctgcccctgggaggcaggagtgggcaaggccgagggcgaagagggagcgagagaacgggggagaaagttttatttttgggcttgaaaaatggcgggaaccacgtccttttttcaaacttggcctcgggaggggcggcggttgcgccacctccgccgccctggcccgcccctcccccgctccgcgcgccgggccgcgcccgcccaggcctccaggcgcccgagggggcttctcgctcccttcaaaagaaaaaagccccctcctcgccccacgactgctgacctcggccgggccggcgcccacggcgagctccggccacaagagcccccgtcccgccccacccgcgccccttccccggccggcccggggcgcgcggagcccggcctggcccaggcggggatggccgcgcagctcctcggcaggccgggcctccgcccggccgcgcatcccgggaggctgcaaacatggctcccagcgttacacaacccccgcctccctctctcgccgccggccacttgcacacgcgctccctcaggggaaagaccccggcgggcgaagcgctcaaagtttgctttcccccacaccgctgcctccccccggccgccccaggggcccgcgggcggcaaagagttaatcctcgcgcgctcgctcccccctccgcgcccgcccgccttccccgtccgagcccacgagctgcgctcttccccgcgccggggccggcgaaccctcagcccgggccccgcaggtggccaccattacatgcaagtcatcgggggagagggcacccagaggggtctctgcttacagctgccggggtccggttcctcagctccaggtggatcctcctcttcatgtccatgttcccctcttcccccctcttcaaacttaactttccgcggcgggggcggaggggggagaggcgtcccggcttgcgcagcgagggccgtcggaagggtttgctagcggcggaggccggcggcgcggtcctgggtggcgggcggcgtgcgggcaggcgagcggagcccccggagccaagttactcacgggagcggagagaaaccatggagggaaaagggggctggagcgcagcgctgggctcactaccgccgcccccggccgcggcctgcactgcgcttaaaccggcgacgcggcgcggcagctgctcggctccactcggccccgcgcggcgctgctcggctcggcggccgcggctgcaccaaggcggggcggggagactcgcggcgggcggggcggaggctggggaaaggcgcagcccgaatagaggagcgacttcctccctctctccgattgcacgtggggcggctgatgtaagacctttctcgtgggtgggggggcttccccgccccccggcccccgccgcgctgagactccttctacctccggccccacgtcgtcgcgcccggagctgggcttgcggcccgggctgggaggttcgcgggaagggttggtgggaagctttgcagtccggctgcgggggtccctaaaacccagtccatccggggaggctcacgggggcggcccgacgcccgcggaggcgcgagatgtgaagaagccggggacaggctttgacgttcaccttttgcctgccacacagtctggggccaacaggccgaaccccgctgcctccttggcagactggcgtccgtagtgccgccgaggatcccccccgtcgggacggaatcgcggccgaccggccctggcagggcagctggggtcgcttgctaagccacagagcagccgagcatccccaccctgttcaggagagtctccctcggttttctaacattttaataggagctagagaaggaaacgattagcatttctaatagggcctcagggtttccccgcagacttttttttttaatctcatttattccttagggcacccctgtgaagtgtgtaaattcttggtggtctaagtttcgctgaaacctggcaggcagcctttgtcatggtctggcccaaagggtcccaggggttagagcaccagatcgggatgagtgttgtgctttgcagaacaccggggaatgacgttatattcagcgtacaataagtaaatacataatgtgtcaaatcaaatacaatctaagaagatcgtactgacaagaagcaccaaaaactaagaacaatttgttaaagaaaaacttgaaattctatgtattaacatgaagttttatggaagttaagaaagtgccccctttcctattttacctaagttttagtggcaaacaacccaaatttagttgtaaaccaattatatatcagcttttaaaatactgagtgagttaacatttgaagatgaaagttttagaaggaatatgggaaaagaaaaactttctggtagtagttccctgactccgtttgtagtctcagcagacgtctttatgacaagggaaaatggagacagatgttctcagggttacaaaaggtctgtaactaaggttatgagaaccacagggctatgcaatgagggcttttaccaaacaaaacaaaacaaaacaaaaaatcggtttcatgagccaacaagcgattattgaggatctgctttaaggggcttgatattatttctctaattctcagacaactttctgaagtaggtgataatttaatcattttacagatgaggagctcaggaatcttaagctgcacgtccagcaagaagcagagctaggatttacacccagataggtctgactccacagcccaccatcttgtgctacatcatcagtctggctagagtggagtcatagcatggtggggggctactttggtgctgtaggttgggaacagttgcagagggcttttaataccaaacagcatgcaagtgtcctcgtgcaggaaaaggggggatggtgctgaaggagtcttaaacgtggtagctctgtgctagagagtggtaacctgatggctcccggaggaggtggtattaatccttagcatcagggcaaatcttgagactctgtcctctctttatggccaactggagggtatgaaggactctttccctagggtacatagctcacaggatagatgtgtgttttatagtattaagccacaaagtaattaataaacatagccacaatgtgctgcaaatagaaggcaaaagagccaaaggaggagagactacagacacggcactgtccgttcttacgcagccggtgctggcatgcacctctgtgaacaaaga

SEQ ID NO: 588138 - DNA, 4001 bp, Homo sapiens
ttatattccccaggagcaggccatgaggcccgtgctaacatacaaataataatattcattatgtatgtacttccaatccctagcaaaatgcctggaatttaggatgttaataagtattattgaatgaatatcatgtatcattgctaatattttaaaaaacatatctacactaatttaatgaacattttctacccacaactataggatataaaatacaaattgaagtatactggttcttgattatctggcgatctgacctcaagaaaaacatttagcttctccagagggtcttcgtttataaaataagaatgttgaagtaattatcatctaagatccatttacagctctgaagtgccaatcttaaatattacttcaagtagatgaagatgaagaaaattagcataatgaaggaaggcattatataaattggattgttctgagcttcctgatgaaattctgtccaattttaaaggaaaaggaaatagttgacttcaaaaaactgtttatagtttatcattgaaaaataataggtctgctggtttacctctgatttgaaatgtcgtaaattaataggtctagagagagctaacgtcatattcagaaatcaacctttgcagaccttctggttgaaaaagtatttaataagcatgaaactctggctggttccttaataatattattattaactattttgtcaacatctgttaaatgttggctatgtgctggatgtggttgagcctggagctagggtgttactgtcacttttggggaagaggccatttcagaattatgaaaccaacattttaccacatttgagtcatttgcaatgtgcattctcttacagctaccaaaatactcctgtggaaagagggcaacattgctttctcaaagtttttacaatcttttagatataaccaaggcaagaaaaattccatccttgttaattagctagcagtgaacataagaaatcagaacatttaataaatatttaaaatgaacgaacagaaaaattcttgaaggaacatgtttaagaaaaaaatagccagatacatgatttgtaatctcacttttacaaatatatccaacactagtaaatactcttctttagttttgctttgtgcttttctaaggagttttatggccattagctcatgcaacaatcaagtggaatagctgttggagggcctcactgacattcccctaggataatgtatctgacactacccagaaagtatttcccttctttttaggttttccagccagcacttgaaaagactgtatatgacacagagcctacaagaaaaggaatgtggccacaccctctttaaatgaaaaaagtaataagcggaccttcttattttaaatagcataagcaaatataacatatatttttaaatgtttattacaaagagcatgattagcactttgaggtctgaatctatcttgttttccttacaaaagaagaaaataaattatgaaagtcctactattttgaaacagttccctgcagcccactcctatcacttttgttcttgcccccaaaaagcagcccccatcacgatttctctgtaaaacacacagctcttgggaagaaatatttcaaggggaaggaaaggaaaaacacattcttttaaggctaccagagggaaagcacattcttcccttctttctcatggtaacttaccaagagtacaatgagccagtattaagcaaacttatcttatttttacttgtatttgttaactaagtagaacaaaaatattgtaatttgtgattcctaaaatataaatatccaatgtaattctacagaaagatttatgaatgacttatcatgttaaatgcaactaaccataaatcctgtagaagcagtaacatttaacatagtgatgagaaaagttttcaaaacaaccaaaactaactaaaaggaaaaccaagacttacctttatctctaccttcttgcaaagaactaaagagaaattcttctctgaagatttcacactggcagtggagacttgggcttctgattttataggattttaaaggaagccacacctagcaaccagaagttagtaattggctgccttctgtttgaagtacatggctcagctatgtccaaaaacaaagtgaaacaagtcttgcaaaactactcactaaaccaattcaactggcattacaaaggaaaagaaatggaagggctgatttttcctccctctttattttgcacttttatttccagatgggatatttattttgcacttttattttcagagtatacatctgccccaatcctaataccagtgattggcacacttttgtagttaaataggttgtagactaaaaagtatgttaccttcaaaactaaacaaaccaacaaacaaaatattacatttgaattccacctccatcacttattattctgtgactttagggacatacttaatttttctgaacctgtttttacttttgttttgttgtctttttcccccgctttttgtggagaatggggtctcgttatattgcccaggcaggtctcaaactcctgggctcaggctatcctcctgcctctgtctccctaagagttggaatcacaggcgtgagccaccatgcctagctgtttttacttttgtatataggagcattatctaagttgtctacccactagaattcttgtgacaatggagaaataacatatatttgtaaattttaacattacacagtgccgaataattttctatttatatttttcttgccttaaaaaataaacgacttttgttcctagatatagcttgttgttataaataagaaatatagaagtaataaagttccagattggctcaaaattttgaacaaaggtaatgccaaaaatttgatcattatgacattcaataaaagcattgacatcagaaggcctatctacattaattcttttaaatagagtcagttacatagaactatatatataaactgtaatatagatcagttatatatacattttgatacacatctttgacattgtagactagttgaacaccaaaacaaggaactagacctataaaatgaaaggattaatggagcagcaactattacagaacacattccataagaaatttcccacccaatggaggaaaattggttctggtaacttccatagtggttcattttcattcttctttaaaccctacaaagtattatatgatgtttccattaaagtgcacaggtgtaaaatctcacagcattatggctcaatttatgctgcatttagtggtttgttctttttcctcttttcctcatagatatttcacataaaaaacatgaagtttaggaagttaatgaaaatactttctaaagattggcagtattttataatacattctaagtgctcgatgccaatatcaatgaagtcaacatatcctgaagtaggatgatcatctaatctaaatatttaagaaaatgtcaatatatgtttttactatcatatgtgtaagttgaaaattaattagttacctgctaacaagttaagttaattgatattattgcaaattgatcttgacagatgtagactaactttctaataccatatttatgtcatcaggtgagaaggaataagatgattatacaaaatctggttttctttttttctttaatttgcgtttgtattcctaactctggtaatggaactattggaacattcctgcacagtgatgctcttgtgaaatgaagaaaaaattccacttactttttataaaatataacaacctagaaaacatgtatagtctcattttgctttgttgctgctattaccagtgccataaactgaatggaattattttatatgtttggatttgtaatacataggcaaacctaaaatagcaacaataaatatgataattgtagcagaattaagaaaaaaaaagtgaaaagaatgtttttccaaaattaacttccagctgtaacactaaaggcaagtgaaactcccaaacataacacaaaaagaaagcca

SEQ ID NO: 588139 - DNA, 4001 bp, Homo sapiens
atgttgtatatttacttgtgtagccatgactgctacgggcttttcgaagagaaccgggcagccagtttggattccgacaatgcagtagaatttaaggtgttatgactaaaacatgtcctaagcagattaagctagtcatacaacattttaataaagaagtgtcgagatattaagtgtaaagtgcactcattcctatgaataccgcaggagaaacataggtgagggggaatcacactgccctggatacacatgaatatgccatctccctgcctacctctacccaaccctacctacacacacctatctttaccacgcagagacaattaaacagccatagactctggatgcatttctgtgtccttgttcccactgggtgagttgttgccagcctgacatttttccaaattccctactagtgggctctatcaggtaggaaagcagggactttactgacctgggaccccatcgctgtgggtctcaggagatttcagtttccaaatgatacacggcaccacctagctattgtgacagctgggagagtggatgtcaccagcagtagaaataaagtatcctgtttcctgaggaaaacgccctggctgtgtgatgctgaccaagtgggcaccaaacatttctccgtgtgatatttttcttctttttaaaagaccgccccccgccccaccgcatctctctatacgtatacacctccagagttcattctaaaagaaccaacacaaagaccatccatcctctagccataaggttttcagtgcttaaatgtggaaggagaaggtctagctagcattgaaagttgtggggacaggaagaggaatctgatcattcaacatccttctccttctggtcagacaagagaaaaacaatagaaactgcacagtcagggagtacaagacccttatggaacaggtgctaaggagagaagtagtatcacaggatggaaggccccttcaaaaccaggtacattagcaagcccagaatgtgtaacggttatcctatttccctgccatgtgcctcaaagcaacatgctcacttccacatccccatgtcatgaggccagaggaaggggaagcgagaatccctacactgggccatccacacgcaggagcagaacagacactgtgctcagagttgcagggtcaaaataacaaacactgtcccacagtcttagccggtgacatcaagtaagggcagcggcagatctctggatttggggcgcagtttggggaacgtggatgcaaccacacgcgtacacacacatatacaggattttacaaaccggcccctatcccactgcctccctccacacttcacacaccaagtgcatcctgcccacctcaccgtttccatcatcacattctttctccaggagagtcagccgagagatgagggggtcctagcggggattcctggaaatgtcaccccccaacacctccgtccgccaccccatcccctctgctgtaccttttacacacacactctcacacactcactcctgccatgactgtcatcaggcccgcctgctgcgcccgaagcccggcatctcagcgggcaccggaccccaggcgtctcgctcgcaacgccgccttcccccgcctcgctagctgatggttccaggcactgcctcctggatgtcgcctgctgcctccgctcctccgcactattgttccaggcagcccctctcgcgtccgggggcgccctttggcgaggacccgggctccgtcgggggccgcatcagcgccgggcaccccttctcacccacccctccctggctgtggtaccttgcctgacagctgggtccgcgggcccgcgggagcaggcggcgctagtgacagcgctggtgccaagcctgggaataaagctccgctccagccgctgctgcctccagcgccaccatcttctcccgccgcagctgccgccgccgccgccgccgccgggaccgcagccgccctcgcccagctccggctccgcagccgctgctcggacccctccggtctcgcggccccaccccctttccccaccctccctcccgccctccagctagctcgctggcccctcgtgacgcgcgctggggccgggcgggcctgcgagggagggcgcgggggagcgcgcgcgcgcacgccgcctgctagtagcgcccctgcctccctcgcccactcgcgtgcgcgcgcggcccgcgagcccgcggcggcggcggcggcaccgctgatgtcctccgtgggccgccggctgcagcgcccctgccccggcgccggtgggcgtgcggcacacccgcgcctctcgccttccctcgcgtccgggttccgaagggcccgccctgcctttcggaatgggttccacagccccatcctctggctcccggccggacgcaaggaggggaaaatgcagctgcatccccgaggggactgacgggggcctccaccctcctcggtggcaacccaggtggtccccagtttcctagccagcagctgtggccaacctctgcgcgaagcaacgggccacgctgcaggaccacgaagccaggcagccgcgtcgactcctgcagggtgttctctccggagtgactcccgagctttcccgcttcccaggccccttagatatcgcctgcgcttcaaattcggagattgacggcgtctccggaatgcgtcgcagtcctgcgagttctccgccagggggagagccgcgcgggcttgggcctgagcgaagacagccgggctgcagccctccaggggaactgccgagtcccgccggggacagcggagagcctgcggattgtgaagccgaggaaggctcggcttggttttcctacccgctcctcagttctggttgatcggaacttaagtgtctttgagcctagcacaggccatccgccctagatatggctcctaactcgagaggccaccctttgcggcagggaccaggtggcaagtgctgtgcattaatgaaaagctgtgggctagacaggccccgggaggcctgggctctggcgccagccccacctgtaattggcaatgcaatagctaaatcattccccctcttagaaacacagatttttccataataatgttataatgcacaaagccttgtagtttgcaaagccctctccgcacatgtattctccagtaaaatgaagataagcgctggttatccagatcccttgggaaatggatcttttaccacaccgtgtttccatattattttaagcacgtctctagagaagtctgggggtgtagcctaaagcattctgaaagtcttgttttagctttaaaattcatatgaattttgcattgtactttgtaatttttttttgctttaataaaacaatagctaccttctcaaaaagattttagtaaaatttaaaattatatactaggaagatgtctgcttgtcctgtgacattactcatattttttccggtgaatacttatttggcatatgtacgagccagacatggtccttttccaccagagctcacagtacgctgaaggaaataggtattcaactatcagactggccaggcgcggtggctcacgcctgtaatcccagcactttgggaggctgagtccagcagatcactttaggccaaaagtttgagatcagcctggtcaacatggcgaaaccctgtctctactaaaaacacaaaaattagccgggcgtgttggtgcacgcctgtaatcctagctactcgggaagctgaggcacgagaatgcttgaaccgggaggcggaggttgcagtgagccgagatcgcgctactgcactccagccttggtgtctcaaaaaacaaacaaacaaataaaacaatcagactaagtgcaactgtgataaattctcaactgcaaaggcgctaaggtgcacgggaaaacctaatgtggactctgggactaggtaaggctttctaaggaaatgacatttcagatcccccaggagaggcagcattgagacacttccaggtaaagggaaggaaatgtgaaaaggcccaagcaggtgg

SEQ ID NO: 588140 - DNA, 4001 bp, Homo sapiens
aaagcacatctcatgaccctaattttctccataaaataaaaggtaacaaacaggccgggtgcggtggctcacgcctgtaatcccagcactttgggaggccgaggcaggcagattacgaggtcaggagatcaagaccatcctggctaacacggtgaaaccccgtctctactaaaaaatacaaaaaattagccgggcgtggtggtagacgcctgtagtcctgagccaggagaatggcgtgaacccgggaggcggagcttgcagtgagccgagatcgcgccactgcactccagcctgggcgacagagactccgtctcaaaaaaatataaaaataaaaataaaaggtaacaaagagtaggtgtctgggagcttaatggacagtcgaagaaaaacaatatagaacagtggcgaagatcaaggtctctgaagttggactgcctgaattcaaacattggttctaccacctactcgctgtgtgacttgaggcaagttatttaacctctccaagccttcattccctcaagtgtcaagcggtattaacaattgctctacaccatggggttgtcacaagagctaaaggacaaagtatgtaaagctcagtgtctgataaaaagcattcaacactattatcactcttgttaatagcgaaggtagggcaagcaggagctgtggacatataaaaagatcatttgaaagcaataactgcggctgggcacagtggctcacgcctgtaatcccaacactttgggaggccgaggggggcgaatcacctgaggtcaggagtttgagaccagcctggccaacatggtgaaaccccatctctactaaaaatacaaaaaattagccaggcgtcgtggcacacgcctgtaatcccagctccttgggaggctgaggcagagatagcttgaacccgggagacggaggttgcagtgaggcgagatcacgccgttgctctccagcctgggtaacagagtgagactctgtctcaaaaaaaaaaaaaaaaaaaaaagaaaagaaaagaaaaagaaaaaaagaaagtaataactgtgtaactaagaagaacgagcacaaatctgtattgtctcacatatgaacaatccccaaaagttccaaacctagatcacagcaattccaaatagaaattttatccctgctttgttaagccactatcactggtatgtatggggaaaggctttttttttttttctttttttttttttttttgagacggagtttcgctcttggcatgcccaggctggagtgcaatggcgcgatctcagctcaccacaaactccgcctcccgggttcaagaacgtctcctgcctcaccctcccgagtagctgggattacaggcatgcgccaccacacctggctagttttgtatttttagtagagacggggtttctccatgtcggtcaggctggtctggaactcccgacctcaggtgatccgcccgcctcggcctcccaaagtgctgggattacaggcatgagccaccccgcccggccaaggactgcttcttctggcattccctacaaggcctgttgaggatgctgctaaggtccctcaagtgcctttcacgaagcatttctggcggaaacgctgcccttcccgacaagctgggccgcctccttggttggacagggcccattctctaatattttttcggcttgtgttgcgaccaaggtacatacaggtgtcgggagcacacgtgaacaaacgcaaagtgggtcgaagaccaacgcgagcgcccgctgaaacagcccaaggtagtaacaggggaggacggagaaagcagccgtgagagcagcgcatgaaagcagcgtcattcaaggcacatcactcaagggtaggagcagcctcggccgaacgctcacccgcggcattgagcccagccagcagaagagataggctgacgaccgccttacctccagaagtcggagacggacaaattcacgttactcatctgtgcctcaccgcttccggcgctgcgggatgacgtcagaggccggctgtatcgcgaccagtgacgtcaccagcacctctctaacggattggctgaaagaatcttgcccacttcccagatcaaaaagcgtccgccccaattgggttctctctgggccgtggtccaactgaggatcctggaagttatgcctgtggggaccagctctctcagcatctctctgcctgagggccactcgcctgtcactgcctcacagtctctgaattgggtgacatttcagacccaatccctctgtggacgtttctaggtggctgtgcagcttctcgatactccataaggagacgttcacaacctttaaggccatctctcctgctgcagacaacctgctgtagcactgctacttgctttttaaactacagtccgctttctcctttgtgcagggaggaaagaatggagcggtaagaggcagggaaacctgttttttgtagtgctgtgtacactaaatgaactgaggggcaatccgggagaaaaaaagcaagatgcagggataagatgcgtgtactgattttttacagcaattccagaaagttccctaagaatcatattgcagttattcaaaggcattttggcagaaggaacaatccctatctcggaggtaaaagtatagtttataatttttctcaagtacaacacactggcaaaaattctttggttgaattaggtttctgaattttctgctaggcccatctgtgcacttccctgtaaaatccagttttagcacagaccctggctaagtcagtttaccaagaaccaccaccaccaccccgccttatgtggttattctcaatatctgatcaggttccttattctccactatcccccagatgatgtctgattaccttggcctgtctccagcaagaatcctgttaggtatatttagccagaaactcctttaccccgatgtttcctcttagtaattttccatccactgacccctacacagctccttggccataaatgcccacttgcccatgctgctgtttggagttgagcctaatctctcttccactgcaaaaccccgttgcagtgagctctatatacctatcatgaagttcctgaataaagtcttccttaccatgcttcagcaagtatcattgaataatcttttctttaacaaaattgagatttaaggagtcacattcttcatcaaggtggagtattgtttccttccatggaaaagcagagacttaatggtatgatgaagctatcagagccttcaagacagaaggtgggaggatcttccaagaaacacagaggacaggcttgcttttgttagcagagaagatgcaggtttatattagggtcatataaggaagtgggaaaacacaagcagcatctcagcagccacacaggccttacagctgaggaatgttgttcacaactgcccaagataaaaagaggcaactctggtgacctgaccagttttgttgttccctcaattaagcatccctctcggttaagggtgcttctttgacctgcctttgtgtgtcttgcatccaaaagttggattggatcattctaattacatcattcactatataatgtgcaaaattgggcagagtttccacgtcctgcttgttaggcctagtccattgtctatagtgtattagtggccagaaaagcaagatcacatggcacaatgtatagctaaaggtatggcaggcagtgaagactttcaggcacttcatattgccatgctaatcaccagaactttttcatcttgaaaaactgaaactcggccaggcacggtggctcacacctgtaatcccagcactttgggaggccaacgcaggtggattacctgaggtcaggagttcaagaccagcctggcgtggcggaactcgcctgtagtcccagctacttgggaggctgaagcagaagaattgcttgaacccgggaggtagaggttgcagtgagccaagatcactccactgcactccagcctgggcgatagagcaagactctgcctcaaaaaaaaaac

SEQ ID NO: 588141 - DNA, 4001 bp, Homo sapiens
acaaaaggaaaagggtataaatcttgatgactttaaaagggaaagcagaggcagaaatgtgagggaaagcacatctcatgaccctaattttctccataaaataaaaggtaacaaacaggccgggtgcggtggctcacgcctgtaatcccagcactttgggaggccgaggcaggcagattacgaggtcaggagatcaagaccatcctggctaacacggtgaaaccccgtctctactaaaaaatacaaaaaattagccgggcgtggtggtagacgcctgtagtcctgagccaggagaatggcgtgaacccgggaggcggagcttgcagtgagccgagatcgcgccactgcactccagcctgggcgacagagactccgtctcaaaaaaatataaaaataaaaataaaaggtaacaaagagtaggtgtctgggagcttaatggacagtcgaagaaaaacaatatagaacagtggcgaagatcaaggtctctgaagttggactgcctgaattcaaacattggttctaccacctactcgctgtgtgacttgaggcaagttatttaacctctccaagccttcattccctcaagtgtcaagcggtattaacaattgctctacaccatggggttgtcacaagagctaaaggacaaagtatgtaaagctcagtgtctgataaaaagcattcaacactattatcactcttgttaatagcgaaggtagggcaagcaggagctgtggacatataaaaagatcatttgaaagcaataactgcggctgggcacagtggctcacgcctgtaatcccaacactttgggaggccgaggggggcgaatcacctgaggtcaggagtttgagaccagcctggccaacatggtgaaaccccatctctactaaaaatacaaaaaattagccaggcgtcgtggcacacgcctgtaatcccagctccttgggaggctgaggcagagatagcttgaacccgggagacggaggttgcagtgaggcgagatcacgccgttgctctccagcctgggtaacagagtgagactctgtctcaaaaaaaaaaaaaaaaaaaaaagaaaagaaaagaaaaagaaaaaaagaaagtaataactgtgtaactaagaagaacgagcacaaatctgtattgtctcacatatgaacaatccccaaaagttccaaacctagatcacagcaattccaaatagaaattttatccctgctttgttaagccactatcactggtatgtatggggaaaggctttttttttttttctttttttttttttttttgagacggagtttcgctcttggcatgcccaggctggagtgcaatggcgcgatctcagctcaccacaaactccgcctcccgggttcaagaacgtctcctgcctcaccctcccgagtagctgggattacaggcatgcgccaccacacctggctagttttgtatttttagtagagacggggtttctccatgtcggtcaggctggtctggaactcccgacctcaggtgatccgcccgcctcggcctcccaaagtgctgggattacaggcatgagccaccccgcccggccaaggactgcttcttctggcattccctacaaggcctgttgaggatgctgctaaggtccctcaagtgcctttcacgaagcatttctggcggaaacgctgcccttcccgacaagctgggccgcctccttggttggacagggcccattctctaatattttttcggcttgtgttgcgaccaaggtacatacaggtgtcgggagcacacgtgaacaaacgcaaagtgggtcgaagaccaacgcgagcgcccgctgaaacagcccaaggtagtaacaggggaggacggagaaagcagccgtgagagcagcgcatgaaagcagcgtcattcaaggcacatcactcaagggtaggagcagcctcggccgaacgctcacccgcggcattgagcccagccagcagaagagataggctgacgaccgccttacctccagaagtcggagacggacaaattcacgttactcatctgtgcctcaccgcttccggcgctgcgggatgacgtcagaggccggctgtatcgcgaccagtgacgtcaccagcacctctctaacggattggctgaaagaatcttgcccacttcccagatcaaaaagcgtccgccccaattgggttctctctgggccgtggtccaactgaggatcctggaagttatgcctgtggggaccagctctctcagcatctctctgcctgagggccactcgcctgtcactgcctcacagtctctgaattgggtgacatttcagacccaatccctctgtggacgtttctaggtggctgtgcagcttctcgatactccataaggagacgttcacaacctttaaggccatctctcctgctgcagacaacctgctgtagcactgctacttgctttttaaactacagtccgctttctcctttgtgcagggaggaaagaatggagcggtaagaggcagggaaacctgttttttgtagtgctgtgtacactaaatgaactgaggggcaatccgggagaaaaaaagcaagatgcagggataagatgcgtgtactgattttttacagcaattccagaaagttccctaagaatcatattgcagttattcaaaggcattttggcagaaggaacaatccctatctcggaggtaaaagtatagtttataatttttctcaagtacaacacactggcaaaaattctttggttgaattaggtttctgaattttctgctaggcccatctgtgcacttccctgtaaaatccagttttagcacagaccctggctaagtcagtttaccaagaaccaccaccaccaccccgccttatgtggttattctcaatatctgatcaggttccttattctccactatcccccagatgatgtctgattaccttggcctgtctccagcaagaatcctgttaggtatatttagccagaaactcctttaccccgatgtttcctcttagtaattttccatccactgacccctacacagctccttggccataaatgcccacttgcccatgctgctgtttggagttgagcctaatctctcttccactgcaaaaccccgttgcagtgagctctatatacctatcatgaagttcctgaataaagtcttccttaccatgcttcagcaagtatcattgaataatcttttctttaacaaaattgagatttaaggagtcacattcttcatcaaggtggagtattgtttccttccatggaaaagcagagacttaatggtatgatgaagctatcagagccttcaagacagaaggtgggaggatcttccaagaaacacagaggacaggcttgcttttgttagcagagaagatgcaggtttatattagggtcatataaggaagtgggaaaacacaagcagcatctcagcagccacacaggccttacagctgaggaatgttgttcacaactgcccaagataaaaagaggcaactctggtgacctgaccagttttgttgttccctcaattaagcatccctctcggttaagggtgcttctttgacctgcctttgtgtgtcttgcatccaaaagttggattggatcattctaattacatcattcactatataatgtgcaaaattgggcagagtttccacgtcctgcttgttaggcctagtccattgtctatagtgtattagtggccagaaaagcaagatcacatggcacaatgtatagctaaaggtatggcaggcagtgaagactttcaggcacttcatattgccatgctaatcaccagaactttttcatcttgaaaaactgaaactcggccaggcacggtggctcacacctgtaatcccagcactttgggaggccaacgcaggtggattacctgaggtcaggagttcaagaccagcctggcgtggcggaactcgcctgtagtcccagctacttgggaggctgaagcagaagaattgcttgaacccgggaggtagaggttgcagtga

SEQ ID NO: 588142 - DNA, 4001 bp, Homo sapiens
aagggaaagcagaggcagaaatgtgagggaaagcacatctcatgaccctaattttctccataaaataaaaggtaacaaacaggccgggtgcggtggctcacgcctgtaatcccagcactttgggaggccgaggcaggcagattacgaggtcaggagatcaagaccatcctggctaacacggtgaaaccccgtctctactaaaaaatacaaaaaattagccgggcgtggtggtagacgcctgtagtcctgagccaggagaatggcgtgaacccgggaggcggagcttgcagtgagccgagatcgcgccactgcactccagcctgggcgacagagactccgtctcaaaaaaatataaaaataaaaataaaaggtaacaaagagtaggtgtctgggagcttaatggacagtcgaagaaaaacaatatagaacagtggcgaagatcaaggtctctgaagttggactgcctgaattcaaacattggttctaccacctactcgctgtgtgacttgaggcaagttatttaacctctccaagccttcattccctcaagtgtcaagcggtattaacaattgctctacaccatggggttgtcacaagagctaaaggacaaagtatgtaaagctcagtgtctgataaaaagcattcaacactattatcactcttgttaatagcgaaggtagggcaagcaggagctgtggacatataaaaagatcatttgaaagcaataactgcggctgggcacagtggctcacgcctgtaatcccaacactttgggaggccgaggggggcgaatcacctgaggtcaggagtttgagaccagcctggccaacatggtgaaaccccatctctactaaaaatacaaaaaattagccaggcgtcgtggcacacgcctgtaatcccagctccttgggaggctgaggcagagatagcttgaacccgggagacggaggttgcagtgaggcgagatcacgccgttgctctccagcctgggtaacagagtgagactctgtctcaaaaaaaaaaaaaaaaaaaaaagaaaagaaaagaaaaagaaaaaaagaaagtaataactgtgtaactaagaagaacgagcacaaatctgtattgtctcacatatgaacaatccccaaaagttccaaacctagatcacagcaattccaaatagaaattttatccctgctttgttaagccactatcactggtatgtatggggaaaggctttttttttttttctttttttttttttttttgagacggagtttcgctcttggcatgcccaggctggagtgcaatggcgcgatctcagctcaccacaaactccgcctcccgggttcaagaacgtctcctgcctcaccctcccgagtagctgggattacaggcatgcgccaccacacctggctagttttgtatttttagtagagacggggtttctccatgtcggtcaggctggtctggaactcccgacctcaggtgatccgcccgcctcggcctcccaaagtgctgggattacaggcatgagccaccccgcccggccaaggactgcttcttctggcattccctacaaggcctgttgaggatgctgctaaggtccctcaagtgcctttcacgaagcatttctggcggaaacgctgcccttcccgacaagctgggccgcctccttggttggacagggcccattctctaatattttttcggcttgtgttgcgaccaaggtacatacaggtgtcgggagcacacgtgaacaaacgcaaagtgggtcgaagaccaacgcgagcgcccgctgaaacagcccaaggtagtaacaggggaggacggagaaagcagccgtgagagcagcgcatgaaagcagcgtcattcaaggcacatcactcaagggtaggagcagcctcggccgaacgctcacccgcggcattgagcccagccagcagaagagataggctgacgaccgccttacctccagaagtcggagacggacaaattcacgttactcatctgtgcctcaccgcttccggcgctgcgggatgacgtcagaggccggctgtatcgcgaccagtgacgtcaccagcacctctctaacggattggctgaaagaatcttgcccacttcccagatcaaaaagcgtccgccccaattgggttctctctgggccgtggtccaactgaggatcctggaagttatgcctgtggggaccagctctctcagcatctctctgcctgagggccactcgcctgtcactgcctcacagtctctgaattgggtgacatttcagacccaatccctctgtggacgtttctaggtggctgtgcagcttctcgatactccataaggagacgttcacaacctttaaggccatctctcctgctgcagacaacctgctgtagcactgctacttgctttttaaactacagtccgctttctcctttgtgcagggaggaaagaatggagcggtaagaggcagggaaacctgttttttgtagtgctgtgtacactaaatgaactgaggggcaatccgggagaaaaaaagcaagatgcagggataagatgcgtgtactgattttttacagcaattccagaaagttccctaagaatcatattgcagttattcaaaggcattttggcagaaggaacaatccctatctcggaggtaaaagtatagtttataatttttctcaagtacaacacactggcaaaaattctttggttgaattaggtttctgaattttctgctaggcccatctgtgcacttccctgtaaaatccagttttagcacagaccctggctaagtcagtttaccaagaaccaccaccaccaccccgccttatgtggttattctcaatatctgatcaggttccttattctccactatcccccagatgatgtctgattaccttggcctgtctccagcaagaatcctgttaggtatatttagccagaaactcctttaccccgatgtttcctcttagtaattttccatccactgacccctacacagctccttggccataaatgcccacttgcccatgctgctgtttggagttgagcctaatctctcttccactgcaaaaccccgttgcagtgagctctatatacctatcatgaagttcctgaataaagtcttccttaccatgcttcagcaagtatcattgaataatcttttctttaacaaaattgagatttaaggagtcacattcttcatcaaggtggagtattgtttccttccatggaaaagcagagacttaatggtatgatgaagctatcagagccttcaagacagaaggtgggaggatcttccaagaaacacagaggacaggcttgcttttgttagcagagaagatgcaggtttatattagggtcatataaggaagtgggaaaacacaagcagcatctcagcagccacacaggccttacagctgaggaatgttgttcacaactgcccaagataaaaagaggcaactctggtgacctgaccagttttgttgttccctcaattaagcatccctctcggttaagggtgcttctttgacctgcctttgtgtgtcttgcatccaaaagttggattggatcattctaattacatcattcactatataatgtgcaaaattgggcagagtttccacgtcctgcttgttaggcctagtccattgtctatagtgtattagtggccagaaaagcaagatcacatggcacaatgtatagctaaaggtatggcaggcagtgaagactttcaggcacttcatattgccatgctaatcaccagaactttttcatcttgaaaaactgaaactcggccaggcacggtggctcacacctgtaatcccagcactttgggaggccaacgcaggtggattacctgaggtcaggagttcaagaccagcctggcgtggcggaactcgcctgtagtcccagctacttgggaggctgaagcagaagaattgcttgaacccgggaggtagaggttgcagtgagccaagatcactccactgcactccagcctgggcgat

SEQ ID NO: 588143 - DNA, 4001 bp, Homo sapiens
ggagctgtcagagccagttccaccaccttggggctaatcttcctcttcctcccccaacccctgccctgagttctcggccagcaccgccccctgccctcacaccaggtatctcagagaaaggggctttcctcaccccaaagccaaccctgattctgccactgcaggcctaggctcccaacacgcaggtaggcaggcaggcactcacccactacaaagggatccccaggcctgcccctccagttcatgcagtccttgaagttctgcttctcactgatatccaatacctcacatccatctgagtctgcaacccttcccctaaaatttaacactcttcttttgtggtctgggataagcctgatgatcctggggctcagtgggaggactaacggctcctttgtgagagagtgaactgagacttgggagggaatgaggaggcccctctaggaaaatagaagacatcatcctcccctagcctggctgctctaaaacaggtggctggactcaggactccgataggagtgagggctccgaggcaggagagtgataaaggccacctcctattgccttcttggcacaggagagaggggctagggctggctgataggacgactaatcttatgggaggctgtggataaaatgccccctgtggcttccccacttcctattcttggaagccagaagtgggtttcagccctcctctgcccatagatcctgatcctcaaccatttggggatccctacttgcccttagttaggcttcctagtccacagtgggccagctggtctgtactacccagggctggggcaggaacggagtaacccactcactgcaatgtagcaactgaacacagaggaaaacaggtgtaaccacatgagcggctgaaaaatcagagtaactgggacaggaaatagaacataactggtgggtctgccagacctaagaagtgcaaacagagtcactcagaacaaaaccagggtgaaactggtgtgaccaaggagtaactaggactgaggagtaactcaggcagggaaatgctcactcagagaacccacagagtaaccaagaggccagggagtaaccagaatgcttgtcgtcttctgcacagacgctgacagcatctgtctggataacagacagggcctgggagtcgctgagcaccaggtgagcaactttagacacgcgtcctctgtgcctgggcctagcttcctcccacccttctaccgtcagaatctgcctcccttcccacttcgctgttcgcagcccatgtggcctgcaccctctgcccccactcgtgcaaactgtcctcactcacttcaacctttggactttttgaggcttaattattcattagaggccagacacccaggacccaaataacctaataatggctcatttgcctccgccccctcccctacatctgggggctgggattctgggaatctggaggggtgtgggaggcaggggaagtggctggctgtcccagactgcaagcgtgaccgctgcccccagcctgttggctgagtcacttgtgggagggtaaacgatcggcactatcactggggagtaacagctgtcattctggcaagagtcggagctgtcagagagggggttagaaccgtggggaagaggactttggaagtcagcttgatcctccgcggttaagcgtgggggtcacagctggggaggtgggtccaggctaccttggaaaacacagccccttcggggaagtgagagtttggggagtgcaagggctggagagagaagggcttccccggctccctccactcaccaccaggatgagggtccccaggcactcggccagcgcctgtcggagcagccggtagcggatgtggagcatctccccgcagcgggacaccagctccttctgtcgacccatggcggggcaggcggcggcgctgtcgggcgggcaggggtggcgggaggcggtggcgcagcgagcagcggcctccagcgctggtggctccctttataggagcgctggagacacgggccccgcccgccctgcagccccgccctgcagtcccggagcgccgaggagtgcgcgccccctcgcccccgccccacctcggctgggaggctggtgcggacgccgggtggagggagctgcgggcatggagtgtgaggagctttgagggacgggtggccttcggagggcgcttaagggaggggacgtcaagggggctgagaggcttaggcagatctgagagccaatggtgggattataggcagggttcagggccatggctggagaggatgcagctgtcatagagaccacctgcgccctgtgatcaccccacttccttgcgggcaggaggagacctgtcagaaagaaactggccgcatctctccaggatgactggacccaacagatcctcagttcgaggcaggaggaggaggctgcgagccccaagtgagaagcaacactgtctcttctgtcaggacagataaggcaccgacccttcaaggggacagctagtgtcagaggggcagcagtccagactcaggtgggcacacagacacacgtgctgagttccaaccagacttcatgggcccttctccctgtgctatgagcacgtcgtgtgtcgcatgtcctggccagctatgtccacagctgtgtctacacatggcggatgtcctgtgtgcctaattgtacggctgggcattcctcgtggctgtgcacatgcctgttgaacatggctaggtgacctagcttgtcacacgtgtacctgcgtgcattgctcacatggctccagaggctgagctgcagttgccccgacatgccacatgccacatgtttgccagcaggctgagtcccagctgtttttaaccctctcctctcccatctgacttacccccagccaaggaagagtctgtctcttttttttttttagacggagtctctctctgtcgcctaggtggagtgcaatggcgtgatctcggctccctgcaacctccacctcccaggttcaagtgattctcctgcttcagcctcccgattagctgggattacaggtgcacaccaccatgcccagctaatttttgtttttttagtggagatggggattcaccatgttgaccaggctgatttcgaactcctgaccacaagttatccacccgcctcagcctcccaaagtgctgggattacaggcgtgagccactgagcccagcaagtctgcctctttaagcaaacttaattatgggggagtcagccctatctgagggggatcatgggacaaccttgccctctctctctttttaaagagtagggtcttgctccatcacccaggctgtggtgcaatcacagctcactgtagcctcgaactcctgggcccaagtgatcctcccacctcagcctccagaatggatgggactatagggactatgtgccaccatgacactcagctaatttttaaaaatctgttgtaaaaatgaggtcttgctatgttgcccaggttagtctcaaactcctggctttaaacgatcctcccacctcggcctcccgaagtgcaaccttgccctctatgctgcttttaataacaaggaaacatctggtggcctgggagcaaacaacatgcccttaggctgagcttctatggcagcattgccagaggagatcaaagaaatcattttccagagggacttaatccaggtgggctaatgaccctgaggacttgtcccttgagggacgaatatgagaaataagggcccccggctgggcgtggtggctcacgcctataatcccagcactttgggaggccgaggcgggcagatcacctgaggtcaggagttcaagaccacactgaccaacatggtgaaaccctgtctctactaaaaataccaaaaattagccgggcgtgatggcgggtgcctgtaatctcagctgttcgggaggctgaggcaggagaatcacttgaacccaggaggcggaagttgcagtgacctgagatcatgccattgcactccagcctgggcaacaagag

SEQ ID NO: 588144 - DNA, 4001 bp, Homo sapiens
acctgtaatcccaaccttttgggaggccaaggcgggtggatcacctgaggtcaggagttcaagaacagcctggcgaacatggcgaaaccccatttctactaaaaataccaaaataataataataataattagctgggtgtggtagtgtgtgcttgtaatcctgtaatcacagctactcaggaggctgaggcaagagaatcgcttgaacccgggaggaggaggttgcagtgagccaagatcatgccattgcactccagcctgggcgacagaactggattccatctcggaaaaaaaaaaaaacctgaaaagaaactcagtgtggctggaggagggagagcagggggctggagtggggaggccagaaagctaacaaggctgggccttggccattgcaaggactggctcttgttcaccccaaagacagctgagcctgagagggtgagaggtgctgagtgcagttgagttgaaggccacctgcatgccttgaccctcatccaagtatttctgagcctcccctcaccccaggacccagcccaggcaacaggtggaagatgctcttcttctgggacctcagaggcgagtgggtgggtggggaggaggaggtcgagtggggacagctgccccaagggagaggctgaggatggaacagggagggcactgaagtgggctgggtgaaggacagggggctggagggtgagaagagggtggggtacttaccgcctgtgcccggatgcttgaaccatgttttgtctttcagatttgtagatgctgaggagccaaagagaggtcactagggctggaggacacagaacttggccccacacttccatcagaccttggtccccaggggagaagccctggggcagctcctgctagtgccactcccttaacccagccaaggaacagggagggaggagcggtgctcagccaatgaggcgacgccctggagccccaccccacccatgctggccccaggaccccagccccaggccagaccctccagtgctcctgctgaccttccgtgtctgcagcccggctttggactgtggagatgccctcagcctctactcagtggctccagcctcatatttgcgtgctatacctttaacctcaagtcctcttgctgctaacttaagctgcgactgtccaggacctgcacacacacacacatgcacgcatgcacacacacacacacagaaggtgaacacacaggatgaggccctgaaaactcatttcacccgtgtacctcacccaaaaattcccctttgtactcctatctttatctctaactgacagcatgaaggtagcccgaagtcccctcaccctgtctgtcctcctgattctctagcccagttccctctagctccagcacagactcttatctccagccctgactgccgaaaccctccagccccagctccagcccctcaggaggggactgcgtgggaggaatgactccagcaagccggcagctgacccgtctcctgcctgcacgcctcccgctgtggtccactgccggtggtcttcagctctctcctcgtcccacccccatggtctgctgacagcccagctcagtgcatccctgccatctctgctctaccgctggtcctcccaacaaccaacttacaggtaaggaaactgaggcccagagagagggtgtatgtgcctgtgtcacacagcaacacaggactgcaccataacaagaaagccgggacttccactcccagacggggctccttccccaaacaatccctcagtcacctcctccctgtatggtacccagggaatggcccttccagatctgggcgctgaggaggctgccccatccccaccctgcctggagccccactcactctgctgaaatgtctctgattctcagcctccgccttgggggcttctcagttacagcgcatcttgatcttgttcctccgtgactgtccctggctcagcttccacccccagctggggctcagctatccctgtgtccccagtccagagcctgcctctcagctctcccagggcggcctcgagcgctgctcctgctcctccaggggagaggtcagtaaggcaggggtttggctggtgccacttgaaccaagtccagatgcactgcccaaaataacatccctcgtccggccagcagtgccgtggagaccgagttctgaagcaggcctttgtgaggtcagaggtggagctctgggtgggcactctgggcctctcagtcccagaggaaaggcctgtcctccaagccaatgtgcagcctgactctggggccagcgcctgaggaagccctccctgagccccagccctggggaaggctgaagaggcctctgagcccccagcgctggggagagctgtgcagaataggactggaggtggaagtgttggagattaacagccaggtggaggggacgggggaggccctgggtcagtcctcagggaacccccattgtgaagggggaaagggaaactcaggcccagtcctcaggggcccccagtctgagaggaaggaggacacacgagccatatttgcagagaaacaccagcctgcgagaggaggtagaagcccaggcctggccctccgagggcccctagtctgaggagcagtccacctgtcctcgggaaaacacctcccttaggaaaggccagcaaggcccccgtaaaggacccagagctggatcgggacatcgggctcggggctcagcggtgtgggagctccgggaccgaggtgcagtcaggagagaccctgggggccagcagcagtcccagaggacttttggagccaaggcctgactgggtctcaaacaatggggcaggcagtttggggtttcagcaggtggcccagtgctgagacacaagggaggtgtttctggtctgcagacactgaggacgcttgctatgtggcgtggtggacggtgggtaagtcctgggaacttccggcaccaggctccatgggtgggaaggggcataagattcagttgtccaaagctcaggtctgggaatggaactgtcctgtagagggtgccaaagaccaggtctggaacctgcatagccccagtccccacccctgcacacaccctcccaccccttccagctttttctgcagatctttctgcaggggtgaggcagggagaggaaggggtcggccacagtcccggggcttcctagtcagaagccctctgtaaggcactaacttccctctgcagattcttttttttttgagacggagtcccgctccgcccaggctggagtgcagtggcacagtcttgtctcaccacaatctctgcctcccagttcaagtgattctcctgcctcagcctcccaagtagctgggattacaggcatgcaccaccaagcccagctagtttttttggatttttagtaaagacggggtgtcaccatgttggtcaggctggtctcgaactcctgacctcaggtaatgcacccgcctcggcctcccaaagtgctgggattataggtgtgagccactgcgcccggcctccctctgcagattctacgtgggctcaagattcagcctttcttcctcaggaagggaggggtgcacgcttggaaatgggagagtcctgccttttttcctttcccatgtgtgctcccagggccgggatgaggtcatgttagaagtggatctggggtcttggatgaggtcagcacttgggcagagttggaatgggctggtgtcaggttggtgagggagggaattgggatccatgctggggtcagagatcaggctctaagctcttttacagggcttgaccctggggactgagaggtggagaagacacagtcccatctgtctcacggcagagacaggtaagcagcaggtgacttaggacacaccagataggctggaaggaatacagacggggctatcccaagctggaggggtacaagggtcttccgttagaggtgacgtgggaactgagttttccaaaacgagcagggggatggggcaccggggcatttgaagcttgatgggattg

SEQ ID NO: 588145 - DNA, 4001 bp, Homo sapiens
ggaagcctccagcctgcgttgccgaggagcaagaacctacgtgtgagctgttgatggtcagggctgttgggacctgtgttttcagccaaagctacgacgagattctcatacctggaattcaacagtgggaagtctgaggggaagcagagccaggcagaattccccctgcctgatgtgcagatcaccctctacccatacttcaattgaaggccaggaaagatctgcttctggctactgtatccccttctttcatgtaggactcagaaccaggctcacaccacacagccctcttccatcccacactgaagagtcactggcagactagccatacttcaggaggccagattggaagatgaaagtttatcaacccaaggaggatgctacagacagcctgactatagcccttaactcaggcttaacccagagacagaaattctaacccaggccagccccgcatctgaaacttttccagaaaccgtgcctcaggccctagtacaggccccctcacttcaatttaaagttccacagttccagctgagggcctcaggctgcagaccctgggtactccaatgggttcacatttactcttgcaaaaggtttttagaagcaatttggctcagggtcgaggcaagagtttgggatcgaccccaaggcatcccacaaagctgagggcagcagtcatacaaactaaaagagagaggcggctggaatcaagagttcactcactgctggagccgttgcagaggcagagggagcaggtcctggagctgaaggcccccaaactcagggcggccttcctgaagccgtacaaacctccggaaacctttatttttctttagctgctcctggagtgagggagaaaggattggaagcagggagagaagccactccttatattgcattcatctgtatccacattcccagccttcagtaagctgtgctcctgagagaaactctcgtttctctacaaggaacttaccacagagctgagcacccagagggctctataaatgcaggaaatgtatgaagtttgggtctccagatgaaggggaaaggtaaggggcaagatttgaggtcatctccaggttacctgcagggtggtctgggacctctctgagttggcagcaaattggttatagagctccaagtggcggcagaagccctccagcccttggccccagcatcctccttccaggtagggaagcagctccctgtgtgggcaaggacagcaaaagggcagctctagaaccactcaagcaccacctcatttagttttcatgagaatagcactaatagtagtgctattaccccattgtacagatggagaacaagggcatgctaaggccctgggccaaggccacaggtgagctaactggcggactccaaatagaacctaagtctgactccaagctctgtgcacggccacaggccaggactctccctcctttcctctccctgtgccccttccactcactggctggcgccgtagatgagctcccaggagccaaacagggcctggcgctcaggtggtcgcagggtccccttggctttcaggatccccaaaaagtactgcggaaggagagaacattggttcttagcctagaggaagagaaggctaacgccaagcgcccccagaaaccgcagaagtctgcccaggctccctacatgctccgggttaccgacctcgcagagaccctcccacaccctggggtccctgtcctataatgggagcgtgtgccaggtcccccaccgtggccaccagccccagctgttcttggtagcgccgctcggtctctagcagctcccgggcggtgcaggcgcgtttccgctcccagcgggcacgctgctcttgcaccgggcaccgcgaaccggggcaggagagctccatgccctggctgagggatcgacacttccggctgcagtccgcggcagattcaaatcccaaccgctcgcgggcgggagccgcggaggcggggccggggagggcagcgcgcaggaaggagcatgcgcggcgagcggccggaccgcgcagggtctcttctgtccagccccaccgccagagcggcgctttaggtgcgcggcgccggccaaggcagggcagggcagggcaaggttgggggcaggtgtggagccctcctctgagtggcactatgttggagcagcagcctgaactttgagtcaggagacgggctgcagatgctggcaggaacttaatgtcctatctggagaattgggacggggggcggtcattacagtacacattctgtcctgggcccatgccaaatgccagggggtcagttgttcccagaattggctaggaaaaggtatagccatttgaaggaatgatatgaaagtattaaaaatggtgttgtaaagaagctatcgatatgggaaaacgcacatagtaagtatattgctgagaggaaaaaaagcaggctacaaaggtgtataatataatcccctttgtataaaacatatataaaatgttggaaggcaaaacaatcaaaagttaactctgttgccaggcacgggagctcacacctgtaattccagcactttgggaggcagaggcaggaggatcacctgagcccaggagttcgagactccatctctccaaaaaaaaaataaataaataaaaaataaaaataaaaagttaactgtggtttttatctccgggtaatggaattgaagataatgtgtttaacaaatgtgtattaagtacctaatctgtatctgtgccaggcactggatcactgaagctaaagggatgaatgggacaaacagggtgattttaaaaattctcttatacttctgcctttcccaagttttctacattaagcatgcattactttgtagttagaaaaaaaaagttattaaaaaaaacaaaatgtcagaaactttaggctccctccctactgttttggactcctaggaatctgggccgcaagccaagaaccagaggattgtcagggttctgaggtctctaccacctccccaccagctctgacattctaagaattctaagaaaggaataatgctgggcttagaccagggaggaataacttgaagggcttggatgaaggaaggggagagtttggatcagactgtaccttgggcttatgtcccaaggaaactggtggtgataccagataggtaaaggactggttacactgtctcaagtgaatgtgggacagtccacacactaagagctcaaacatggaagaggacagataatcccatggtaattggtgtcactgtgagcccaggtgatgagagtagaccacaacacctggggtgcagttggtgatgggtgtgtttgtgaatgctgccagtgtgtgttagtgctttgggtgggtggaagaggggtggggaatagagcctcctgtgagcatcggttggggaatcattcaactctagaagaggaagagggcaaagccgagaagacacactgaaaacagttggtgacaactaattccctggggaccgagtctcccacagagcaagtcaggcacaccatactctacctggaacagctgctaaactccgctcccacagccaaagataggaggggccaacaggaggaggttcagaggatagtcaataacccctttattctttaattatcctcaaattttgctttcaatccgatggatgctggagaagcactagggatgctttgaacaacaatcatcagtcattcaacaaaattaggctgggcatggtggctcacgcctgtaatcccagcactttgggaggctgaggcaggcggatcacctgaggtcgggagttacagttacaatggctgtgtgcttctttatgtgttgtcagagaccagcctgaccaatgtggtgaaaccccgtctctactaaaaatacaaaattagccgggcatggtggcacgtgcctgtaatcccagctacttgggaggctgaggcaggagaatcgcttgaacccaggaggcagaggttgcagtgagccgagatcatgccatcgcactccagc

SEQ ID NO: 588146 - DNA, 4001 bp, Homo sapiens
tactggtagtggtaccctgggccattcaaaccacccatctggggagtaagggaagagaggaacaggatggagcttggaggctcagcctgccctctggggctcagtcttcccccaccctcatgggaaatttagagccccaggaaggaagctaggctggggttgtataccagactgaggagacaaacatatatctgatgctctgattcattcatgcaaggacttcatggtgttcacatccctgtatgccagggctgggggtgactgaagggcagagatgctcctaacccacccctcaggcagggtgatgctcagaagctcctgggttgacacccagggcccttcagctcatcttctggtctgatttcctttcagaggcagttaacctgcctacagacgctgctatagaggcactggccctgtaccacctaggacctgtggggtcagagtttaaaggatccacaggccatctcaactcttcctggtaatctggagtcccacctcctgcatcaactcccgaatactagtcaagagaaccaccccttgagtcactgacccagagtaacagtccttgagtaacacctatagataatattccatcactccatccccataagaatcctcagagtataaaacaaacaaaatatccatgagtaataaaccccagatccacctttagagccacattcccacaaaaattgagccctaagtctaagatgttattacttagatccaagtaataacccctagaattatacctaggagaaacagtctctagaccacatatccagaacagagccctgagtaacactcagttttatactaatgccagagtactagtcacagatcaacacttttggaatatacccagaccaacaccctacaagtaccagaatagcacacctggagacacagccctgtgtaacaccttcatagtgacagccttgagtagtgtccttagaataacacccagaagggttctccagggagaaagaacctcagattaaggccctgtgaatgaagtcttgtcattctgagttgcggaggagccctttagtcatactgcggctgtagtggccatcccaggctgggaactatcatccgtggaactcaggccagggagatttgcatggggccagggttagggaggaggtgacaggaaagaaaggaaaggtgtatcagcctgccaagtgagtgataacctccattctgcttccaaagacagaggaagcaactgggtcacccccactggtcactggaatatgaccttgtgacttgatgtgtgagaaggtaggcagggtggtgctggcattggaatccccagcccctagactgccttccctacacctggctgggcatggtggctcatccctgtaatctcagcactttgggaagctgaggtgggaggattacctgaagtcaagagttcgagaccggcctgggcaatacaagaaaaccttgtctttacaaaagaaattttaaaaaattagccaggcatctgtctttccctccctgtcactatcctccaatcttctctctgtctttctataggtctccgtgtctctgtgtctcttttcatcttgcagagggtggtgggggtgggtgggctgctaatcacctggctgtgcttttgccagaagagagagatagggaagagggccggacattgagggcataggtcctacctgcttgaattgttcctcgtaggtccactcgtggggatggagtccagggggctggctagaaggcgagctggggccctgggcccctggacggctctcctcagctgcctcctcctctgccccggcttcctcccgcttctcctcatcttcttcagcatcttcctcttcctcagccccaacattccccaaggccccctcaggggcctgtagggtccggtggtcaggcaggggaggctgcggtggcagcagcgggcatgcaggggccaatggccccaccccctgggccagccgagctgcctgctgcttctgcagggcctccatgacagcttccaggcgcagtcccccagctgagggggtccctggtaccaggcgggaccccgaggaaagggccgcctgtgggggagggaattatgggtgctgggccctactgcccccagagccccccaacacagggggaggtggtcatggattcagggaagtgcaggggtcacaaggaaagaggcagaaagatggctttcccagaggtgaacagaaacaggaccagacccggggaatcaaatggccattgactgaggactggaagagtgagcagatcagagagggtgacggggaccaagagacatcgggaaatggtgaaggaagggagagagaaagaaaaggagaagggggatgtccgacagagacaatgacagggagatgtgaaaatagagatggaacagggtgacaaggagagacagaagtggggtgacacagagactgagagggaccaagatggagagaggcagaggtatcaggcagagacagggtagacagacagagatggagagagatagaatattgggtagagagacagggagggtaagagaggtagaggagcaacagataaaagacctaagtgacaggtagctcagagacggacagagacggagagacagaggcggagatagacaaatagacaggggttgagatatagggaaagaccaagacagcaggaaacggacagaagagagagattagaaagagacagttaaatagagagggaccgacagagacagggacgggaaaaacagccggagagaggggcagaggacagggaccaaggagtcgcggggatggagggcggtggggcagagcctgggacgggcacgggaccggacgggcaggaggcggcagagtcgcgacgcccggctccctcgctccgggcgccccgcggccgcactcacctgcctggcgtggcccgctgcccctggcgtctccacggcgctgcctttgctccgcccgcctcccaggcggccctggcctcggctgggtcccggcggtgcgctcccgccgccctgtgctcctctggcggctgtgcgctcactcgccgcgctgcttgcggcggccgcgggggcgggacccgagcggggcagggcgggcggggcgcatggggagaggcccctgtgggatctgccgctctcagctccccaacaggtgtctcccaccttctttccagccagcttcgggggcagggggcgctggaaagctgcgggggaatcgtgcgaaaatgagggctctaccgccaccggactccggaccagagccccgcccagcctcacaagtcgtgcccccgacacccacactcggcactgggcttccacatacaaatagccgcatccacacaccaacacaccttgtcacaagttcaggcgcatagcttcccagtctcacacgttccgtgacatggtcaccacagtgccaatggcctgggcacgctgtgatcaagaggggaatccctctgcaagatgctggggtgtgcgtggagggtctggtcagaatagaagcttctccctttgccttgagcacccctgccctgcctacgtgctgtcccccactgcgggcatgctgcggtttgcacacatgagtgcacatggtggtggacccacacctatgcactcacacactctcagaggtctttaagctgactgcacactcaccgcatgcagatacacagccacacacagtttttgtctcttttgacattctattatggaaattttcttttcttttctttttctttcttttcttttttttcttttttggagacagagtctctgtcacccaggctggagtgcagtggcgcgatctgggctcactgcagcctccgcctcccaggttcaagtgattctactgcctcagcctcccgaatagctggaattagctgggattacaggcgtccaccaccagacccggctaatttttgtctttttagtagagatggggtttcaccattttggctaggctggtctcgaactcctgacctcaagtgatccacccaccctg

SEQ ID NO: 588147 - DNA, 4001 bp, Homo sapiens
cctatacagccccaggacagggcccctctctgccctccccaaccccaatccatctatccctctccctgctcccctgtcctcaatggtctaatataagtccgattcttggtacatgatagagactcaataaatatcagttccattctcctccacctgggccccgtatttgccagggtttcagttacctttatccgttaacctccctttccccaaccccaagtggagcactctccatggtaacaaggtttctgacgcttctgacgctgccatgaatggagaaacgaccatcccctggatgtgctaagcccaggcctctaagcagcctcaaggaacctgtcaccaggcaggggagtcccaagacatgaccttcaacaaggttctgcacccagaccaaggcagcagctgacaggcttgatctcatctgttcaatgagagtcctgggccaaaggcctgaccctggagcccctttcagcactgactgtccatgaactaggccctacaccagactacaaccaaccttccctcctggggacccttcccttgaccccatttcataaggagggtggattgggagatcctgatggggcaggaattacaagcttgaatctccacttcggaaaacacattcctgttcaaatcaagtctgaaggttttcggtttaaaggcacactcaggagcactgccgggctccccctaaagcagcaggccccactttccaagctgagtcaactggttcaacaccgagaacctgatttatgtacagcatgggcctccaaccctgcccccacccgtgcggggggaggggacaggcttcctggaacaccatttgaataaagaaaaatccttccggtgagaataagtcagtttcctgcgctcatactgctaaaggaccaagcaaggctgtgacaatcacctctatttttaatcttttctaaatgctgttttctgtggccacaagaacagtcatttccaggcgtggggctccactttcacacttcgcttcaaggtgtctggtttttcttagctctgaactactagttttctccgctgcttcctgcaccagaagggtactggggggagccaagactcacttgttgagcgtggctgagaccaccaaggtgtccaggggaaccacagggtccccctttctcagcattaagcgggagggttagactgactgggggaagagagacacaatctcagaccccagggctgaaatacggcggccgcctccactccctcctgggttctgtcttccccacagccgtccacccacctatcttcacgccatgcagcaatcgggccccggaggaccgcgccccagcctccccgatcactcggttactcagatgcggctcacctccgccctgccgccgacccagccccgccataggcccgatttcctgcaagggagggacggagtgctggggccccaaggaagggacagcgtgaggggacgaggaggcaaggagggaagagggcgcgggacctgcgggggtgccgagggagcccgtccaccgggtccaggggcctgcgggacggcgctgcagaagaaggcgccagggctggggacgagggacccagggagactgggactcaagggagcacggcccagggaagccgggtcggcagggagctggaggctgacctgagggggccaagggtcggagacaggggaggcccgcccgaaagggcccgagaaggtgggaaggtgggaaggtgagaaggccgcgcgcaggcccggacgccgcgtcagggaaggatattgccgcaggagcccgtccacctcgctcgggtccgggcctggctccgccgccgccgccgccgcctcctcctgctcgtccacaaatttgttctcgtcaaattcgtcgatgtccacccggcggaagcgcgaggacagcgtgttccgggccatggcgggagctcggcgcccgctcagccggctccgctcgcggcccgacctcggctctgctccgctcgcaccggctcctgctcgggggcgggaagcggctgcccggctgctcccagcacctcctccaccgcctccgcgcgcagccgccgccgcccgcccacttccggcacccgccggatccggaagcgccgtcaggggcggggcggagcctggcacctggagtgcggtatgggatcaccgcagcctcccccacctcagtgtcccttccacggagtctctattttgtcactgaggatcgggcgcccggcatctgtgcaggccccgcctcgtgtgtgccgtaactgcgctggttccccggctttcccgcgcctccgaggagcccctggcctcagcggggccgggcgcgtgctcccggggtgatccctgccggtactggggaaggctgggcccccgggagaaggctcgcggctctacttctcgagtgccgggcaggcttcttggagaagaaaccttcgagctgatgactgagggatgagtaggagttcctgtgcccggggagtggcgcgggaggcgcctgtgtctcggagccttgaacgccaccacacttagtacgaggaggccgcctgtacacagaggtgaccctcttaaaggagtagggggctttaaatacgtttagtgcgatcacgggactgacaagacgttgaagacgttgtgactcgagggattctgcgaccccacgtgtgtagcagtcaccttggccaggcagttgggggcgccaggagagggagatggccctgtggccaccgtcctggcaggagaggcctggctggagaggcacatcttgacagaaaccaaattctcagaatctgagatgggggaaagcggtttagggaagtcaaggacgactctgaggtgccagatttggtgcctgggctgttatcccaggggttctgttaattgatcttagccttagggtaagtaaaatgggtctttttatataatagtgtgaaaactattttcatctaatagtactctttttaataaaagtcagtagttggaatgtgattcatttttgctgcttcgaatacctctcattgaactgtgtctaaagataaaaaaaatattgccagactatgatgcaaccttatcttcggtggtaaggatacagactcccatagtgggaaactagtggtgaagaagtctctgcctgtaatcctcagcactttgggagccgaggtgggcggatcacctgaggtcagaagtttgagaccagcctgaccaaaatgctgaaaccccgtgtctactagaaatacaaaattagccgggcgtgctggcgcatgcctgtaatcccagctactcgggaggctgaggcaggagaatcgcttgaaaccggtaggtagaggttgcactgagctgagatcgcgccattacgctccagcctgagcgacaagagcaaaactccgtctcaaaaaaaaaaaaaaaaaagaaaagaaaagaaaagtctcaggggtcctggaaacatgcaaagcccacctgcaatacagttccatatctgggaaaaaatatttgtgattcaggtctgccacgagacagcagaaattcatatccccagaacatcctggtcagaaggaacttgaacccagaaatgcccattttacaagtaaagaaacagcccccaaagaaactagtaaatggaataatgtcccagctcatggtcatggactttcattccagccagggagacacaatttaaaaatccatattatacgatgtcagggctgacagtgttgagagggaaaaaaaccatgcagtgcctgagtgtgccttagataaagtgatcaaaggaggtgtcctggccgggcgcagtggctcacacctgtaatcccagcactttgggaggcccagggggcagatcacctgaggtcaggaattcgagaccagcctggccaacatggtgaaaacccatctctacaaaaacacaacaattagctaggcatgatggcgcacacctgtaatcccagctactcgggaagctgagcggggagaatcgcttgaacccaggaggcagaggttgcagtgagctgagatc

SEQ ID NO: 588148 - DNA, 4001 bp, Homo sapiens
actgaggctggcccgtggcacgtggagagaattgcatcgggcccaccatgagtgctccgagaaccactgtcggccctggtcgcccatcccagtaacagcagaacaagaagtggtcctgcctgaaccccagccctggactgggccagcctgagctccagaaaactgctccctcccaggcctccctccgcgtcagccctttagacagccggtgtcctcacggctgggtgctgactgtcaccgacactcatcggcagagtaagtgagcaagctctggggcccaggcagggctgctgtcctcctgggggctgagggcctccctactggctcctagcaggattgacaagcatcctctgaatgaggaaaagaaaccatggtccttctgttcccatcccaggcagggctgggggaaacccccgggggccccggtacaccctcccacctcacttgcagcagcctgaatcatgtgctctctggcccatcagggcccatctcctactccttagctcacgaccctcctttttctccctcattcagaccagcctctgtgaggtaggaccatcagccagtgctccctcggctcttgggccagctgcccaaagtgctgggattacaggcgtgagcattcaacccacccaccacgtccacccggaggccaggggagcctgcacacccaggccagtcacgcaccgcggggccgtcccttccctgtggtaagcaatggcctgctcaccccaggccacgccaggggaaggacgacagggtcctgcacagccctcaaccaggatccagccggcctcaccacacaccacacctgtacccaagagatgtgtgtgctatctctgccctgccacggccacacctgcccccacccagaccccaaactcaaggttgggacagaggaagggaggctgtggggtcatcccaggaggcccagtggggccaggagcctgacagaagcacctaccacccggcttcttccgaggccccacagcctcaggcggtgcagggtcagggccacagcaccatcacctgtcccaggaggctgagaggacagaacagagactgtgggttctcagcaggcacaaaatcggtgctgttacccacgcgcgggcccagcggtcaaggtccagcggcaagtccaggggctgtggcacaggccaagcagcccaggtggttcccacaggaggccaaggtagagaagtccccggcagggacgcggcactcacagccaagggccgggcagaggcagcctcacctcgcgggccggccctcacctccagggcgccctgccagcggccactgcagcaacccgatacccagtccccgaggcccaggcgtccacctcggcggggggccggcgaggcctgctggcgggtggcagggggcgcagggagccgcagcaggtgtctgcaccccgccgggaccgcacgcccgcgccaggagcggctctgcagcgggagcgcctgcgccgggagccagggtgcgggaaggagcccagcaggtgcgagcgcggacggggagggtcgcaggcctgcgtgcgcccgcgctcagggcgtcctccacagtggacccgcttcaggccccgccgggaccccgccgcccctcggcgagagggcaggaagggcagacgcggaagggcggcgccgcccggacctccccggcgccgccgagcccgcttcccagcagtcccgggcggcgaagacagcgactccgcgggcccaacccggggccaggcgacggcagccgcttccgggagccctggccccgcgcaggtgcggccaaaggccctccccgaggacccgcgcccacctcggaacggcagcggtgcccccaggcgcacgcgcacggtcccagccaacggctccccggggctgtagacgacgcggccgtggctcaggctgatctcgaagagctgcactcgccccatgccgcggcctcaccggccagccgcgcagcgacgcccccgcccgccgcccgcgagtcccggctccgaggcccggccccgccccctcctatgccccgcccccatccgtcccaatcccggcctccacccccatccggcccctcccaggccctgccccgccccacggccccgcccagccccccggccgccccgtagcccgcggactgccgctcggaggcccggcccagcccctattccccgccccatccgtccgtgtggccccgccccctcgttattccccgcccctctgacagcctcctcgccccgcccccgcccttcgcccctgcctcgccttcccagctccgcccctgcctcggccgccccacccctgccccgccccccggccgcgctcatccatccccggccctggccctgtcccggctgggtaggtgctgcgctgcgtcgggcgccgcttaagggacttgaggcgcaagcgtcccgtgcgtcccccacggagggagtcaccgccgcgtctccgtcggggggcagggctgggggcggggccgaggcgagctctgagactgggaaggtctccccgctgcactctgctgcgggcagaacccactcctccgcccccaccctccgcccgtcccgcccaggggtctccctcaccccgagtcgcggaaaaacgtcacggggccgcgcgggcgtcctgggcggggatgctccgccgcgtaggacctgccccgcctcaacccccacccccggctcctgccccgcacccccaaccttctccgcacctacctcgcgtcccagcacctgtcgcgcccctccggaacctgcccgccctcccgccttcccggtacctgcctacccccgcaactgtcccggcccccaacacctgcatcgcccaaccccttccccccccgccccctgccttccccgcacctgcccggagtcccagcacctgccccgccccccgctatccccctccttgctggcctgatggggtgtgggcccaagggagccacacttgggcggaggcccttgggcaggggtccgcagcagaagggtcgggggccaggtggggcgaggacttggatcacttgaaaccaggaggaacacactcccatttatcttttttaaagggtccctttgtagagagtgagccgcggggggtgggactcaaatacccaggggacctaaggcgggagagaccggttgggtagtcctggagagggaaggcgtcgctcgacaaggaccagctcaccacggagtgggtgtgcgggccccagtgctgcgagtttttctaggacagccggtgaagagggtggccttctctgatggggaggacggacctagatacacatggtttgggggtgggagggtcatcacatgcagagtctgaggtgccactgatccccaatggaccaagtacttccgtgcatgagcctgggagtcaagcactaaaatgttgccatccctagttggtagaaggtaacaggtcagggaggaggagtctggcaccccagcaaagagaaaggggctcacaggctggaggggcccccgggccaggctgggagaggccctgaagccccaggcccagctcactcccttaggattccgatgtttccggaggtgggtctaactggccatgctccagacactttcctgccaaggctatgcacaggcagaattcccgaacaagagagaagggtgccatgggatggcaaggattgtggacagccctcccgaatggcagtcggccatgccagaagtcagaaagaaggtgtttcaccgggcgcggtggctcgcacctctaatcccagcactttgggaggccgaggtggacggatcacgaggtcaggagatcgagtccatcctggctaacatggtgaaaccccgtctctactaaaaatacaaaaagaaaaaaaaaaattagccgggcgtggtgacaggcgccgtggtcccagctacttgggaggctgaggcaggagaatggcgtgaatccaggaggcggagcttgcagtgagccaagatcacgccactgcactccagcctgggcaacagagtgagactccatttcaaaaaaaaaaaa

SEQ ID NO: 588149 - DNA, 4001 bp, Homo sapiens
aaaaaaacaaattggctcagagtaagtagcagaaaattaccttcccttagctctgggcacagtgccagcagccgcatttttgcattaatggaagtggggattaatctgggagctggggaaagtttgctaatcaatcacatggtagaagcagcaacactcgctcttggaacagaggtgggaagagccatgtgaaaacccgcagggggtgggaggccacccaatgggagtttccttagttgcagccacccaggaaataaagggggggaagtcactcctcagaggatggtagaagccaaggctggggacatgggcgcccacccagcgtcgggccgcgtttaagccacctgcccacccccggggctctcgctgaccttcaaagttgagattggccccatgccgcaagagaacgtcggccgcccgcgtcagccccagctcagccatcttgagcagggcgttgctcacgccttcctggtaaaagggagagtgggctttcctctccagcagctcagtgagaacaaggattcggctctcctcgctggcgacataactgggcctgggacaggagagaggctgagggtaggcacagctgtgggaccgggtgaccgcgcagcctgtgggttggtgggctttagtcctgctatcatcatcagcaagcagggccctggctctgtgggtcacaggggcttgggggaagctctgaagtagagagagggccacgctgcatctcttaatacgggagcagactgggatttgcggagaatgggctgggtctgtctgcgctctcctcccgcgttgcccagagtccggtcgcagacttaggtacaaagcctcacacacctgggctgctgggactgaagggaccaccagcctggaggccaagagcccaagcccgactttgatgcttcttcctcagaaagcccttccatcctcaaacccgcaggaccccagccccggcaacacctgcagccaggacagcaacacagcctcctccctcccctcacattgagaccttcagctgatattgatgaagaaagcctacgtttccaccagagtccctggatggcgagactcatcattaccacgtgttggaaataccaactgacaaccccctcaacacctgagccgagccccttccttctgctctcccctcccttccacctcgcgtgccgccgtacaattacttgtcagtctctcctctggagcacatgcgccaagaaggcgggggttttgctgagccactgatggaccccaggtgcctagtaccatgggcagtgaatgcagattcgctcccgacccctttcctgcaggtccacgacagaccagctcttgtctataaaaacgcaaactctgctacaaaagcccaccttcacactgctctggggtaacatctgaggcctcacggattccaccctgctcctctgccacgccggggggtggcacaggacaggcaggcgacagggtggggctgaggcgcaggccctgcgacaacccgcgggcctccgccctcgggccctccccgcccttcgtctccgccatgcaaggggcaggagtgggatccgcgcggggcagcgcgcactccgagccacgcaaccccggcttccgcccgtcccttcctctgtcaagggggacgcatccaccccgcccggcttgtggtgataaagtgggacgctgcggggtcggagcggcctcggccagctcacgggagggggtgagttaccggtccagagactcctgccgctcggggtcctggatccccagggagcccagaatcgcatccaccagcggctggtactcgaagatgatcctccggaagccgtgcaggaacggcatcgccgcgggccccgcgcagcagggccgtcgcgctttctgccgaggccgagatgcccagacgccgaccggaacgctccggcggccgcggaccccacctgctccgccagtccagcccctgcgcccggccgggtccgctcctcagtccaagccgcgcccccgccggaagtgaccctcgtacttcctgcccgcgccgactcagggtgggccatatggcgacagcgccccctgcgggctcggaggacctcggcgcgtcctggggcacgaccgccaggccgactcgggcgatgtccagtgggcggccccagcggagtgggagagtggaggatcgagccaagccagatccgagactcaggcgggtccgccccttcctgccagggcccggcccggctcggcttcgccctgcgatcccgcccgcgaccgctgggcgccgtccgagttccgccggtcgtgctctcggccctgccgctgccccactggccctgggcgcccctgagagctgtggtcatcagacactgccccttccggttcgggctggccctcgccttccctgaagaggggctgggccacctctgtcaccacccggcccgctgactggaatgatgaggaccagggtactcgcacgtcccctcctcagtttcttattctctgtcccggggagcacctggccaggacggctgctagccctctccacctctgccttgatggactcagtgaatcttgttttttgttgttgttgtttttgtttttttgggggacgtagtctcgctctgttgcccaggctggagtgcaatggcacgatctcggctcactgcaacctccgcctcccgggttcaagcgattctcctgcctcagcctcccgagtagctgggattacaggcgctggccaccacgcccagcttattcttgtatttttagtagagacagggtttcaccatattggccaggctggtctcgaactcctgacctcgtgatcctcccacctcggcctcccaaagtgctgggattacaggcatgagccacggtgcccagcccgaatcttgtgtattttttagagacagggtctcactctgtctcccaggctggagtgtagtgtagtgatcatgactcactgcagctttgaacccctgggctcaggtgatcctcccgcctcagcctcccgagaagctgggaacacaggagtgtgctaccgcctgtctctgaacttggatttcctcatctgtaaaatgggtagaatccccagcactttgagaggccgaggcaggtggatcacctgaggtcagaagttcgaagctgcagaccggcctggccaatatgatgaaaccctgtctctactaaaaatacaaaaattacccgggcgtggtggcaggcgcctgtaatcccagctacttgggaggctgaggcaggagaattgcttgaacccgggaggcggaggttgcagtgagtggagatcgcaccatcacactccagcctgggcaataagaacgaaactctgtctcaaaaagaaaaaaaaaaagtataatcacactcacctgagatgctggagccagcgcactgtaattgttggtggaagtggaattcagtgggaaggagccaaaaccctctggttcaggaagaaggggcggagtgggcagccgggtttaagcccctttagggcaacaccagcttgggcttcctagaagcagctccaggccgcagagtccacagctgccagcacgtttctgccttggttctcgctgtaggaaagaaatttctccctgggtgaaatcgggaaattctgctcacatggaaatggacatttccagcttgccttggaaaaaccacttttctggagtcgaggcacctccccttgggccatgcatttgagcctcctctcccacctggagtctgcgtgggggggccttgatgccttcttgcttctgggaagctgatgatgaagaggggtttcccgccccagcagtccacatcacagcgttggcctcctgggccttgctctgccaagttgggcccctctccctggaacctgccagacagcgagagttgcccagcccaggaaaaaaacatttaaaggcgcatttcaagacaatccgatgggtcttagagtaaacatttttatatttatttatttattattattattattattatttttcagacggagtctcactctgttg

SEQ ID NO: 588150 - DNA, 4001 bp, Homo sapiens
aaataaagcttaagaagcacataagctttcttgtttccatttaactggtctacaaacttagaaagtttatctaagtgaaatggtatttcctctcagacactattattaggtaaataagtcactgtgcttttaaatcccatgtttaaaggcccgcttggcaacttttcccctgggtttaaacatgcctatcagttcacaggtaccagtagcagatttcagcatataaatgtgatataacatactccatatatttcaccgaaggaatccaaaccaaattcagatgtaatcaaggcatagtcttgtaagctaacaaatgagttaaaagtccaacatgcatttggaaacttattcacagtaccatttgttcatggatactgataaagatagcactttccttaaaaagtagttaattttaccttagaagtataactagcattctgacaaagcattctagctgttcttccttttatactaattttgcccttcattaatttctccacatgtctagcaatcaagctactgtcttaaaaaacaaaatctactgcctctccatttttatgatgtttcccacagtgcctcaagacttgtgcttgtaaagttaattgtttttgtctcaaacctcagatcagttatcagaatatttgtttttaattgagtagttagttgtaacagaagactatatatcctctgttctttccactactacactatactccttaatgccaaaaaacaaactaaaaacatcaggatccttttatgtgtgtgggcttgtgctcgatttttctttcttttttcatttctttcttttaacagcttgattcttggatttaaacaactttatttttagggaaatacaaccccctcaggttctttatgactcagtccctacaccatgtggccactgtttcctgggtgccacacctctgaatagattaacatgaaagaatgctgtgcgctatttagattactagggagtagaatattgaatacattgcttaaattttttaatctaaaatttaatcagaaatttactttgggagtagacaaaggaaatctttgaaagtgttaaattctgactgtatacatgctgtgaaaatttcctaatctttcatattgaatatagtgctagctaaactattgctgataagtattctttcttggaattgaatagatttccatttgaacttttcagtgccatttcattataataaggaagacatttatcaaggaaaaaaatgaatattcaaatgtataagtaaaattgacatttcagtaattcacacattttaaatacacattagaaaatattttaaatattgaaaaatatatttactgtttcatttaatatagctgtgatatccccaaacttcatgatcattattatagcaatgttattttcctagataaacatacaagatgtttatttagatgacttttaaaatcaatcatgttaacatttatggtaaggcataatgacaggttttcacttagctgaaaaaaaaagtcacataattatatttaaaatacattcattataggtaagacataaaactagaataattttaggtacaaatttaggtttgtatttaaatgctgatttttaagaaattatagagataaactttggactttatcctattatttataagcatttattaataacattaatgtctccttagtattgactgtaaagtatacatcgatacttgtaagatagacatgaaacatacctgtcagaagagagtagtcctcctaaaagtagaagttatccaccatgtactacttatctataatgtaaatgttctcagacactgtgtaagaagaaaagatgaggaggtattacatttaaaagaaaaaaaacacccttcaacacagtcctggtgtggctgcaccctgggtgatactggaataaactgctcccacagattagtccatgttagtactgaggagcaagattaaaacttgttactgctcatgtgttttccatcactgtttgtatcgtagccaagacttctagctaaactctagacgtctactggaagattctgaagaagaaaaaaaaagaaagtttaataatgcatggcaactggccattgaaagtgcagtcggagtcattcaagaaatacctagttttaaaaatattagattcttaagtgaatgaatatttgtaaattacaatttcaaaaattactcaacctgtatagactaataaaatatttatcaatctgaataaaggataccaacattactgaagtatatacccaaacttcagatgtacctgagaaagaaccatactttttttttcttctaatgactgtagctattgcattatgcatacttctccagacttttttttttttttaagcttttagcactgctatagcatgtcagggaaactatggatgaggctccatgaactgctccctggactcaacatatgtgatataacacagacacacatgcatgtccaagtaacaccctcttaggatgcatacaactttcccttttcaagagaatattagctatggcctcactgacatttagggagacttagagcagggaagatgctatttcctgaaaataaatcattatttgtaccccctttccactcatccccaagagactgcccaattctacatcaactaagaccttcaagagaggacagttttcttttttttttttttgagacggagtctcactctgtcacccaggctggagtgcggtggcgcaatcttggcttactgcaagctctgcctcccaggttcacgccattctcctgcctcagcctcccgagtagctgggactgcaggcgcccgccaccacgcctggctaattttttggttttttaatagagacagtgtttcattgtgttagccaggatggtctcgatctcctgacctcgtgatctgcccgcctcggcctcccaaagtgctgggattacaggcatgagccaccatggccggcctgagaggacagttttctaaccctagtggcaaggacttactgttgtaagtgaccccaatggttcttcccaactgttgtatagatttggaggccagcaaagagcttttccagtgggttagaagacctgttctctactgtcatcaagagtctgaccatcgtttgttccctctctccagagaaatggcacacattgtgttaagcaaggcagctacagtcctaaagaatacatgtgcctcagatgtgcatagcagctggctatgtgttcatcctcccctcacttaaataaagtactcctccttggacctctaggctgacagttccaggcagctcggtagtcccattagtggccctctgtaactcaggccccatcctagccctgcagcaccttagggaatgacggccctcctgtttggtttagaatgctcatattctcatttattcaagtatatttcagttgcaaatgtatctgttaactggatgaattgggaacataatgaaaatatgaactggatttttaaaatctttgtatccagagcatctagtgtttgcctaaattccttcagaacacagtcataaacaggaagcccttgggtcaaattcagtttgtcctgcacaatgttttgtttctgaactgtttattgaagtgtatgttaccaaaaaaaaacatatcataatggtacaactcaattaatttttacaaaatgaccccaatcaagaaatcccagcctcacactccattctcatacatccagaatccctcctcttactcctcaagtcacagcctgagttcagcaccataggttatttcctgaactttatataaatggaatcatactgtgcattctcttttgcatctggcttttttcattcagtgacatgcttttgagatccattcgtgtcattgtgatacacagtagttcattcttgtcactgtatagtattctcatacatgaataagccacaaattgtttatatattcaactagattaattaccttttggagaggtactatgaacgttcctcagtctgtcatttgg

SEQ ID NO: 588151 - DNA, 4001 bp, Homo sapiens
gaagcgcttgtgcagcaggctgttttgggcctggctccaccccaaggctcctgcggccctgggcctgcttcccaagcactcaggaatggagactgtgctgagagtggggcctccccttccctctcacgacgtgtctgcccccgcaccggccaggcgctcagcaggcaggagtcactattcattcacttgatccacccccacagagcagaaccagaattacttctcagcatggtgcacagatggccccgccaggacagggtcccgcccccacccccaaacttccccgccctaggccttgggcctaaggggtctgggagggagagggagtttggaatggagactcctccagttcctgctcctagccaagcttcccagtccgtgtggctgcttctccctccctctcatcagaacctaaccccaggcacagttattgtgcaattggacccaggcccagcacccaacagtctacagagcccttagcagccgcacagtatctgcaaatgtttcctgagccctcagccccagccagctctaacagactgaagcttgggggccaggcactttgggtggctcgagcctgtaatcctagcagtttaggaggcccgagggaggagggtcgcttgagcccaggagctcgaggccagcctgggcaacatgacgagtccacatctctgataaatttttagaaagaaaagaaaatgaaaaggaagcttgggaatctggaggctgagccaaggcctcaccagctctccccatcactgggtttgtgcttgctgggagcgggaggatcaaagcccaagtcccctaggtcttgatctacccctggggagagaacaggtctgttcctgccctgagacctgcagcctgactcggctgctcgggagtggactctccacttctcagagaagaatactgaggccaggccagccctcctcaggaacagccctggccgcctgggagaggagtttcctctctttcacaatgaccctgcctccctggagggcgcagccgcccaggggccaaaggcaacagcagcccgaatagaaaatattcctggcactgcccctcccacagagcccagcccaggccagcaggaaaccccgccgcgaggccgccagccccaccggggagggccaggtggctgccgccccctgcagggaagggagccagggccaccatgcccatctgtccagggtaaactgaggctgcggggaaagcgatacgtccaagccccagaggggctggactcctggttttacgcagagaaatagaggtggagacagacggcgagtccgagagagggagagagaatcgggagcccccccacacgctccggactccccaggtctccatgtgggggcttcacgacacagaggaagccggatccgacaaggagtccagaaaggacccggctgcgcagggaacaaataacccgagccgctcttcggacccggggactcgcgcccccggggactcgcgcccccgccgcgtcccccacgctccagaaacctggaatccggtgccaggcgtttgagcatcgggagccccttccctcctgcctcggtcccagtccccggcgagtggcgatcggggtccgccctctgcctccgcgggccccggggcgggcgtcttctacgcctcctcctctgggcccgggaagcgggtgctctcggctagggagtgggcagcgagaggggccgagggctccttaccgggctcgggcagcggtggcaggcggcagagcaggactggcaggggtgcccatcccaggttataagcacagggcccgggggcagggccggtgaccggggacacgtggcggggacgcgcgccacagaccccgcccccgggcccggcccccgcctggagccgctcagcgttcacagccacctgcagatgggcggggcccgcctccccaggcctcgtccccacctccccccgcctcccaccaggtccgggcctgggcccggcgccggctcaccctcccaggggcgcgccggcgggggcgcaggcggctcgcggttcctggccctggcccgcgggctggaggcgccaaggagggcggcagtggctgcgacccatgtaactcaggggcggagggtggccgcagccgtccttcgagagacttgcctcctggccctggggaagcaatttaaacgcttcgcggtgggagccgggataaaagttccactggcgcagggagcttcgtgctcacttctatccggtgccggcagcctgggccttctgcagcccccagagccccctccctccccaaccatagcctctggtagccgagtaaggatgagaaaaccgaggtgagccggcgcgggaaggcccggctttcatcccttaggccagggctgattgctggcctgtcttctcagagcctggcacctgcccagactccagagggcacccagtaagcagtgagtaaaagactgtctggctgcgaacccactagacaggagggaaggttgaggttcagagagaagtctcttgcttgtaaaaagcagctgggagttgtgaccccaggcccgccttcaacagcttctctacctcaggagtttcccagcttggtctgccggctccaaagccctgatcactgcaaccacagccccagtaaaagagcaagtcctgggaccccatccaaggcagttgctccatagtgagcactgaccccagaagggaggactcccggtcctcagccggctctgaacctgggggaggtgggagccccaagccttgcccagccgctaccctggagtcagtgctccttttaatcaccatccactctcagcccctctgccagtcagcccccaccaccccctcaagcccatggcaagcaacagtagctgtgagtccttctagaaggaaaaaaggatcaaaccaattcacaaacaaagccacagctcgattctctcttaagccccttagttctctgacacttaaacctgggatgtggcccttgatggcaaaggggcccctggtgagccacgtggggctgggtgtacatgggtggcttgaggccccttctagatgggaggcggtatcacagctggcccccctcagccctctcacaggagcagctgggggtctcgtggagtctctgggcctcccacactagcaggaggcaagtgaggaacacctacacaatgacacccttgcagcagttgtgtgtccttggggcggtcactccccactgcagcctgttttctcattggtagggtcgccctggaaagagcaagcattctgttttcaccttcacgactaccctgtatgaagtacctgtgattgttatctcaatggtatgggcagaaacctgctgcacagaatgacggtgtatctttcccaaggccacacagcatgtgagtggcagagcggagctagaatccagtgtctgaagctctggctcaaaccctctgctttagctccagcctgagctgaactgaggtcacagtcccagggtcacaggctgctgggacctttactccttgccgcagaaatggttccagcctaggggacagacccttcctaactcacatgcaccagtgacatgagggacagtgaggtcacagcgctcctgagaagaaaacaggggcccaaactgccagcagcaccccgccccccacccccaccgtcctgccaccaacagcagggtgagtggttgcccagaggcagagaccaaggtgagggaggactggccagcttctgaatgagccccattctgcctggacccctccatcggccagggggaccttcaaccctgccctggcccttaccctgcagagcagtgctgagggccaaagtggggcgtggcccaaagggattcccccacctgagactggggcaccatggcctttgactttcatcttaccccctgcccacacctaggtcaggggtcctccaggagcctttgcaccttctaggtaagtgatcttggtggcattcctaaaaacaaagcagcacctaggcctgagcaggtggagaaacaaaggcactgg

SEQ ID NO: 588152 - DNA, 4001 bp, Homo sapiens
gatttcatccctgaccaacagcgctcctggctcactggcttcccccaacccaccaagttatccttaaaatctctgttccccaaatgctcagggagatgacttgagtaatcataaaactccagtctcccgcacagctgactctgcgtgaattactctttaactattgcaattcccctgtcttgatgaatcagctctgtctaggcagtgggcaaggtaaactcctcaggtggttccactgatataggtgatttaagtgttaaataaaaatctgttacattaaaatgctgaataaagagtgtttaaagcactccacaaagattattttttaaatgcctctgtgtaagaggaattctaatattgtgccaggatatgtcaagctataagataaaaattgagtgcatttcctagaatgcttattctactctaagattttgtgagaggtataataattcatttaactggtaataaacattaaagaagagtcaaacactgatttttgttttaagggagaagagagatttttttttttcaagacacttgcttgagctagatccccaggagtatttttaacactcctctgtaattagggaaacatcagtatgtctgtattgatacatatacacacatatataatatgtatatatgtaagactatgaacagtcctaaatttatactttgggctgataactgtggttttcaggaaaaaaaaaaattttaaacgggtgcaaagtctccccaactggtctaagtgagaaatcatttggcattacctctcccttatcccctacctgctaattacaatttttcaaatatagttatcattaagtgcaaactaccataatcttggcttatcttcatggcaaacttcaattagaaatttagaaaatggggagaaagagtaaacaaggttaagagagtgggttctcagatagaattgggtacaaatttgggctccaacacttaggtatatgtggccttgtgtaaccacctaggttacacaacaggtgtaggttaaccatcagctgccttatctcattaggtccttatgaggatttagtgagctatgcacctgaagtcctcagctgtagccagacagcaagtgttcaaagatgttagtcattgtttttgtttattgttttatcattgtgcagggtcacatagctaaggggaatttcaaatccaagtccatcctacttcaaactcctttgtgctcctaagctgtacagtatagtcaccttggagagtaggtgattggccccaaactacttcagggactgcaggtcgtggccagccagtcctgtatcagacctcgtccttgccagatgcctagtgccccagattccctcaaatctcaggccagatcacctcccacctggtaagattcctccaccttcacccgagcaaaactacacttggtttgggttcccgggtaccttcagtctgcagggacaggggctgcagagtgtactccccaagtctgcctctgctgtcggcctcccagctgagtaggcaaaacattcctttacagagcaatgtgttcatggataaacttgtctctagtgcagctctctgtcagagcacagaacatgaggccaaagcactgcccttcctagggagtcccggttctcgacttccccagaatggaagtttgatttttccgttggcccatttctcagatggaaaaacagattcagtaaggtgccaacgctttgctgaggactaccctggaggctaccgttttgtgaaggggtagacattgagactggagtcagatacgcattctggcttatctcctgacttactgagtgaacttgagcaggtccctttcgcccatgggcgtcggtttcttcatctgcaccaaggagacggaaaactggattacgtgtcgctaaggccccgggttctcagaggaaagctcacccctgcagggccgccttgccccgcgcgcttggggccagctgcacgacaagccccagcatgctggggaggcggggctcagtgacggacagggagctctgcgaattggcgcccggcaaggggtgctcaacggcgcgtgcgcagagggaggcaggcgggtgggctgccggcggtggactcgtcggagccgcgggcggtcaggtagggggcgggaaggagggttggggactggggaccgcggccggagtcgtgggccgtggctcagcggccaggcgggggaacgtgccggcgtgcagcggccgcgcccgaatggcagggtgtggggaccggatctggggggggcaggactagggtgggggtggggctgcgaggggcaggctcgggagggattcgtggggctgaggagatccgaggagatgcagctgggggaggggagcgaggggctctgaagagatttgcggttgcagcatctcgggaggtatgaggtaatgtcggggccctgaggaggaacggggtgtagcatgtgggagatgggagggaatcagggccctggagggacctgggtgcagaatttcagaaatatgaaggaactggggggccccgatgagatttgaggaaatctgggggcgctaggcatctggcaaggacagggtctgagatgataggagcaaggtctagggcgatcctaagtgctattgagaaagggttttcggagtgggctgagggtgagattgagggggtggggtgagttcttgagggactctatcttgttagcagaaagaagggagctggctgaggtgtgaaggcagcacatgacattcagtgcataagaggaaggagcagggtatgagggcagcacagtgcccgatggaatgcaggagatgggggctcagattgagggagagcagaaatctggggtgaggaattggggcgttgaactgaggtgcggggctgagtgtggcagagatttggaaatagggattaaacgatctgagtccgagggatttggggcatatgagtgaggaattgacgagggttgcaatatacagccccaaagattggaatttggaattgtaagagggttggggacagggtttggagaggattgaatcgtggggtggagatgtcctaactgggctataaaatcaaaggaccctgagtagatttgtggattggtgtcttgggctgctaaagagattttccttaaatcgctgcatgggagacagagggagttcaggggacccaaggacctaaaagtaatgtatgaaactggatgagtatatgaagatgagcagagttcaggtgctgaggaacaaagtgataaatcttcagttcagataatcctgaaggagtgtggtaatccctgtgaagggcagaatcttcttcatttattaaacaaagatccgttatcatgaggcaggtatggtattgccactaactccattctgaccaccggtcccccggcccactgaaagtggtaggctttggggaagaagaagtggaactattcaaggtcatctgcctaagccctttttccctgtacccccaagctacgatagcagatagaaagtgagacctccaggggaatgagtggaataatttatcctatataagatccattacagcttgaaggggcagtggctctgtgagtgaggtgtttgggctcggagacagacaaaacaacaacaacaaccaccagaaaaaaaaaagggaacccttaggtattgagcatttagtcctgtgctagactgtaaagcagtggttcttaaccaagtctggctttgtctcctaggagacattaggcaatgtctggagatgttttttggttgtcacagggtgggggatactactggcctcaagtgggtagattaaacattaaacataatgttttatgttaaacatttgacaatgtgtgggatacgcccttcccccccgcagtaaggaattatcctgcctaaaatgtcagtaatgccaaagttgaggcactctgacctagagtcagataccctgggttcaagtcctagctctatctcttcctgactttaagtcctagctctatctcttcctgactttgtggccttgaa

SEQ ID NO: 588153 - DNA, 4001 bp, Homo sapiens
ctcctcccggaacgctcggcacgctcaggttacagcctgcgagggtgggtacaggggctcgacccccgaggttcaagctcagagcgggagaaccactggcactcgctcaaatccccagaggtggtagcatgaaaggatggggagtgggtcacaaaaatacttttaacaatatcagggctaccaggagagtggagcgtagtccgctgattattctgtgggtcttttcaggcgagcaaggagttaacctcggaagttcagggatcgtaaaggttctcacctggaaggcccctcacctgcggtgcccgaggcggatcccgccgaggaaaagacccggggaagaagagctccgggtctgggcgagcccctggcgcctcacgggcgctgttgttggccagactccgacaaccaataaggccccgcgcccccaagaggggaggggagagcgagcaagcagcgagcgcgggagagctaaggggaacaacatttttgtaaacgctctccgagataattaagctatcaattacccgggtgggaaatcagctgcgcttcccacagctccactgaagggccgactcctccgggattcgcgcagggaaccagcaggcagcaagctgctggcgaacttttctgattaacttttccgttggagccccccacccacacccatctcctctcctctcctttttcttgcctttaagtaattattattagcccagggagtgagctgcaaggacaaaccggctctctgcctggaggtgggtagaaagggaaggcggtaacgggggtagagggaggctctaaacgtggagacctcggagtcggaatcccagttctcagcaaccactcaagtctctccagccctatttcacagatggccagaactgaggctcagagaagggaagcgacttggccaaggtcactcagcccatgcggaagccacgcttttgcgggttgagcgattccacacggaactactccattcctactctcatgaaaatccatctggaagggcagaacccgcaactccgaggcgagagcgagggggcggtgacggcgggtggccagtgacggtacccggagaagtgggaggctcgacctgaaactggcttaggatctgggatgctccggcccctagccagagcaccttcagtgaatggggtctccggcttccgggatggatcaagcagagctccaggtcgggactgagaggcagaggggcaggttcccactgcgggagggttggcacgcccccaggctcccgccgcgcgctctccaggacctcctcccacatgctcgtttccaaccacctgtgcgacctctgggcccctcctctaccctctgccaaccccactcggggcagccccgggcagggatccccagggcgcccccacccgtccggcatgacgcaggggctcggggttccttgggatctagcgcgtgccggcgcccagccttacccagggtgaagaagggcagctcggtgttgtccaggtcgtcctgcaccgcgatgcgccccggcagctcgttacgcacaaagagcaggaggcgcgactcggcggcggtgccggcagagccaggagagcccggggacgcggcggcggcggcggctccggccccggtcccagccccggccccggcgcgggcgccgctccagccgatgtcgctctcccgcagggcgggcagtgtggacaccgtgacggtcttcagccggcacgggctgtcgggctcccgcgaggcagcggcggtggcgccggccagcagcggcggcggcggcagcaggagcaggaacagcagcagcagcggcagcagtggcggcggccccgggtggaagcagagcctcggccgcccccggagccccgagccggggccggggctgagccgggcgccggcggcggccatggcgggaggggctgcggtgctgcgggcggcggcggcggtggcggcggtggcgaaggaggaagaggaggcagctgcggagacggcggacgccgaagcgaaccaggacgcccgagctaaggagcggagagagccgctcgccagcagcccccagctccgggctccgcctcccgatcggccctggaccgcccccccgcgccgcctcccggggcccagccgcccgtccccgatctccggctccccccgcagaccccgagcgtttcggaggctccgcccggcctcgtgcaagtcccagtggctccctcccctttcccaagatcccccaattccgccctcacagcattctttagccacaacacccctccctaaactccccaaattcctaatacttagggccccctcgggcccccccaagcccccctgactcaacccagttctcctggcttcaccccaccttcggctcaacccagaggctgcacctgggggcgcgccttggcccagccttgctcaaggccccgccttcttggggatagggagccccctggatagccaagacttaactttgtctcccctcaggcccaagaacaagtcctttctccaatctcctacccttttctagtctctgaaataacttcctgtagcctcagagcccccttcccacccacttggccacaactcctgcattcattctcccactgcccgcaaaccttcctctcccctccatccaggccttgtgctagcactaattgctaatggacagaggggcgtcgaactccaccgtctaacgccgaccccacaactgactgaagccgggctgttctggccccctagctgccgccctgcaagccagcccactcacgcttttttattttggatccctgctcccagcttggagcagctctacttggctgcttctgctctctgtgtgaaattcctgaaaagggtgtgaggtagagacctactattctgtctgtccttggctcccgggtcttttagatcctctgcccaagtcccagagaacgggagtgctcaccaattcttcacctgcagtctttctagactcaagttgagctaggtcctcagattcagcaccctttggtcttgggctgactctgtctctgacccacatacctgagaccctccagggagcggacacctctgcatgggtcaagtgccgtgcagccccttccccactcccctacttttcttcatcttccctgtctctgttttctgtttcatctctccattcatttccttccttctcatcttgactttaatcttacaaatgcttctttcctataatttgtgagcaacttctcatctctgtctagcttacccatctgcaccttttgtgctgtctctatgcattcacttttctcttagctcttccctcttctgtctcattccccttttctatctttaacccttcatataaattgcttttctcctctctcatcatatattttttaataacgttggataaaggcagagcactgaaaataaggaaaaaagcaaaagctgttttgcgaccttggacttaatgtgtttaaagcattctccaaatgctagacatgtacgtatgttagcttttttacatgaccataatccaaaaagatggatattatgattcccattttccatgtgaggaaactgagatcaggtggtcagggaggtgaagggattttccaaggtcgtatagcaaatgagctgaagagctgaggtttgaacagtaggcttcaagccttgactgtttcccttaaattacactgtcctcagtgaccttggaaaaccccacccatcaaagatgctgtaaaaggtaaatctgcataagcacagttggatctacttccctgtgaggtttgtaaggtatacttctcctgtctcagtttactaatctgtgaacccaaaggatgtgtggaggttggggtggaatctggcctttcaagtcctctaattctaaatggtctcctgcctctctgatgcctgctctagttcatttactcctccaaaatatgtcaccctgcctccctcagtctctcctttgtgtccttacaatccgccactatccaccgcaatggggctttctgattctctatgcccctttc

SEQ ID NO: 588154 - DNA, 4001 bp, Homo sapiens
cccactcaggaactgactcactgcaaggagacagcttcgactccctatgatttcatccctgaccaacagcgctcctggctcactggcttcccccaacccaccaagttatccttaaaatctctgttccccaaatgctcagggagatgacttgagtaatcataaaactccagtctcccgcacagctgactctgcgtgaattactctttaactattgcaattcccctgtcttgatgaatcagctctgtctaggcagtgggcaaggtaaactcctcaggtggttccactgatataggtgatttaagtgttaaataaaaatctgttacattaaaatgctgaataaagagtgtttaaagcactccacaaagattattttttaaatgcctctgtgtaagaggaattctaatattgtgccaggatatgtcaagctataagataaaaattgagtgcatttcctagaatgcttattctactctaagattttgtgagaggtataataattcatttaactggtaataaacattaaagaagagtcaaacactgatttttgttttaagggagaagagagatttttttttttcaagacacttgcttgagctagatccccaggagtatttttaacactcctctgtaattagggaaacatcagtatgtctgtattgatacatatacacacatatataatatgtatatatgtaagactatgaacagtcctaaatttatactttgggctgataactgtggttttcaggaaaaaaaaaaattttaaacgggtgcaaagtctccccaactggtctaagtgagaaatcatttggcattacctctcccttatcccctacctgctaattacaatttttcaaatatagttatcattaagtgcaaactaccataatcttggcttatcttcatggcaaacttcaattagaaatttagaaaatggggagaaagagtaaacaaggttaagagagtgggttctcagatagaattgggtacaaatttgggctccaacacttaggtatatgtggccttgtgtaaccacctaggttacacaacaggtgtaggttaaccatcagctgccttatctcattaggtccttatgaggatttagtgagctatgcacctgaagtcctcagctgtagccagacagcaagtgttcaaagatgttagtcattgtttttgtttattgttttatcattgtgcagggtcacatagctaaggggaatttcaaatccaagtccatcctacttcaaactcctttgtgctcctaagctgtacagtatagtcaccttggagagtaggtgattggccccaaactacttcagggactgcaggtcgtggccagccagtcctgtatcagacctcgtccttgccagatgcctagtgccccagattccctcaaatctcaggccagatcacctcccacctggtaagattcctccaccttcacccgagcaaaactacacttggtttgggttcccgggtaccttcagtctgcagggacaggggctgcagagtgtactccccaagtctgcctctgctgtcggcctcccagctgagtaggcaaaacattcctttacagagcaatgtgttcatggataaacttgtctctagtgcagctctctgtcagagcacagaacatgaggccaaagcactgcccttcctagggagtcccggttctcgacttccccagaatggaagtttgatttttccgttggcccatttctcagatggaaaaacagattcagtaaggtgccaacgctttgctgaggactaccctggaggctaccgttttgtgaaggggtagacattgagactggagtcagatacgcattctggcttatctcctgacttactgagtgaacttgagcaggtccctttcgcccatgggcgtcggtttcttcatctgcaccaaggagacggaaaactggattacgtgtcgctaaggccccgggttctcagaggaaagctcacccctgcagggccgccttgccccgcgcgcttggggccagctgcacgacaagccccagcatgctggggaggcggggctcagtgacggacagggagctctgcgaattggcgcccggcaaggggtgctcaacggcgcgtgcgcagagggaggcaggcgggtgggctgccggcggtggactcgtcggagccgcgggcggtcaggtagggggcgggaaggagggttggggactggggaccgcggccggagtcgtgggccgtggctcagcggccaggcgggggaacgtgccggcgtgcagcggccgcgcccgaatggcagggtgtggggaccggatctggggggggcaggactagggtgggggtggggctgcgaggggcaggctcgggagggattcgtggggctgaggagatccgaggagatgcagctgggggaggggagcgaggggctctgaagagatttgcggttgcagcatctcgggaggtatgaggtaatgtcggggccctgaggaggaacggggtgtagcatgtgggagatgggagggaatcagggccctggagggacctgggtgcagaatttcagaaatatgaaggaactggggggccccgatgagatttgaggaaatctgggggcgctaggcatctggcaaggacagggtctgagatgataggagcaaggtctagggcgatcctaagtgctattgagaaagggttttcggagtgggctgagggtgagattgagggggtggggtgagttcttgagggactctatcttgttagcagaaagaagggagctggctgaggtgtgaaggcagcacatgacattcagtgcataagaggaaggagcagggtatgagggcagcacagtgcccgatggaatgcaggagatgggggctcagattgagggagagcagaaatctggggtgaggaattggggcgttgaactgaggtgcggggctgagtgtggcagagatttggaaatagggattaaacgatctgagtccgagggatttggggcatatgagtgaggaattgacgagggttgcaatatacagccccaaagattggaatttggaattgtaagagggttggggacagggtttggagaggattgaatcgtggggtggagatgtcctaactgggctataaaatcaaaggaccctgagtagatttgtggattggtgtcttgggctgctaaagagattttccttaaatcgctgcatgggagacagagggagttcaggggacccaaggacctaaaagtaatgtatgaaactggatgagtatatgaagatgagcagagttcaggtgctgaggaacaaagtgataaatcttcagttcagataatcctgaaggagtgtggtaatccctgtgaagggcagaatcttcttcatttattaaacaaagatccgttatcatgaggcaggtatggtattgccactaactccattctgaccaccggtcccccggcccactgaaagtggtaggctttggggaagaagaagtggaactattcaaggtcatctgcctaagccctttttccctgtacccccaagctacgatagcagatagaaagtgagacctccaggggaatgagtggaataatttatcctatataagatccattacagcttgaaggggcagtggctctgtgagtgaggtgtttgggctcggagacagacaaaacaacaacaacaaccaccagaaaaaaaaaagggaacccttaggtattgagcatttagtcctgtgctagactgtaaagcagtggttcttaaccaagtctggctttgtctcctaggagacattaggcaatgtctggagatgttttttggttgtcacagggtgggggatactactggcctcaagtgggtagattaaacattaaacataatgttttatgttaaacatttgacaatgtgtgggatacgcccttcccccccgcagtaaggaattatcctgcctaaaatgtcagtaatgccaaagttgaggcactctgacctagagtcagataccctgggttcaagtcctagctctatctcttc

SEQ ID NO: 588155 - DNA, 4001 bp, Homo sapiens
atgagccatcagaacacaaactgtgagaagtcattctggaaatacactatcaagggcatgactggaaatattctgggaagaacaaagaactttccagtcaccggagcaagaacaaaaggcttcttctcattcccaacaccctcaaagaaagctttccaagtaccacacaacccctaactgcacaagtagaggagacatgcttgaaatctagttggatgtcagatagaataactcctatactaggagaaacaccaaggaattactaagatcagtatcttcgccttgcatggaaaaagaggcttctgagtcccaactatgttgcttcccagggtatggataaatcatttctctctgagcctcatttttactatctgtaaaatagggatagaagcatctttctcaccagacgggaaactggatacataaagttaaatgagacatagtttctgttctccagaagcttagtctagtgactgagccatataaacaaacaggttattgcacggcagtggcagaaatcagcacttgggagggactccaagcctagtccgggggacaagcatgagtcaggaaaggcttcccgggaagaagtgtttcctaaattgaggtctgatggaagactaagggtcagagaacaaaggggaggagaattggaaaaggcttctcacgtcagaagaaacagcgtgtgcaaaaacctgcaggtgaaagacatcatgctgcttctgagggaccacaacgattcagtatagctggaggaaagcaccaggcctgacccacaagagcctccccaacttcattaaggaatttgagctttcttctgcaggaactaaacgtctgactacaaaggcggtagggaaatcatatctgcacttatttatttattttgttccttaccagcaggaagtcacatatttgcattttagaaggatgactgattgcagagaggagaatggattgactggaggggaccagaacgggttcttccactccccagtctagattaaactcacctgttaaattctttagcaaccttacatttctccactccagccctcatctctcctgcaattaattaactgacccaatacctgcttccttcactgcgacactgaatgccacgttaggggagacaactgatgcactgggcactgcgcttgccacatattagacagaaacacacacacacacacacacacacacacactgcgcttgccacatgttagaaacacacacacactgcgcttgccacatatcagaaacacacacacgcacacacgccaacgatttagacaactacagtacctttagagaaactggtgtcctggactaagacgctggtagtagacatgggggaaaaagtgaaagatacgcaagccttggcgactgactaaatgagggagggagaagaggcaagcaggactccaggtttctagaccaagcaactgtgtggatgctggctcccttcaccgagactgaccaccccagagcggttaagtgggagagaagaagaacaaagagctccgtttggagagcccatttcacatgcctccaggccccaaggacggtaacccattattgtttccacgcccaatttaccatctcacatcgtggcttccaggcgatccgcaagccttccagagcctcagctcctcaaagcttcgaaacacacaaccttccgcgactatacgcacgcccgcaccccgcagtttttcgggcctaatctacccaccacctgaggcccagcggtctttcttcgactcgcgccacgccgggcagccccaccctgaaactcacttttgcgggcctcggacaccttctcggctgcccgcttctcggcctgcagcagctgctgaatcccctgagactgactagccatggcggcagcgattctgagagcaaggcaagcggcctaaggcacctcgaaggccccttgggtcagctgacacagccgcccacaatctgcgcttgctccttgcgcctgcgcttcgcccccgttgtcacgtgaccgcacagcgtagcatcagctgaccgctcttgaacttctgtgattcggcagaaatggggcggggcggggctgaggagaaaggagcggagctcctcgactgcgcctgtgcagtctactgcgcagtactgccctctactcctctgtccgctccctggcctcttttaatggctaccctgtcgctggttcactctgtagccgccctgccacgtatagtgtctgtttgcagtatgctcaacgtcaagagaggaggggccaagtcaaatcactttcctcctactctccacactgctctactcactccctttctgggactttctttggcactcaaaattttatcggggtagttcaggaagattcttgccagttccggggatagagtcttgggttgccagttaggagactcgggatcaagtctgccgctaacctgtgtgattttggacaggtcgctatccttttctgaacccgagttcaggaatggactggactgtttcccataaatatttgatgaaagcctgctgtgatcctagtccactgttgatattgaggacatagcagagagcagggcaaacaaggtcccggcggagctcacagtttatggacacagacagattaattaaaataaatagacaattacaaactgtgataaagtcatgaaggaaaaatgcagggtgccgtaagaaggaacctttagtaaggggagaggaatatggaggtgtctctgaatgctgtaccaaggaagtggtgtttaagatctgaaggccaggcgcagtggctcacgagcctgtaatcccagcactttgagaggccgaggcgggtggatcacttcaggtgaggagttcgagaccagcctggccgacgtggtgaaaccccgtctttactaaaaatacaaaaattagccgggcgtggtggcgcgcgcctgtaatcgcagctactcagtaggctgaggcacgagaatcgcttgaacccgggaggcggaggctgcagtgagccgagatcgtgacgctgcactgcagccagggcgacagagcaagactgtctcaaaaaaattaaaattaaaaaattaaaataggccaatcgcggtggctcacgcctataatcccagcactttgggaggctgaggccggcggatcacgagatcaggaatttgagaccagcctgaccaatgtggtgaaacctggtctctactaaaaatacaaaaatccgggcatggtggcgcgcgcctgtaatcccagctactcaggaggctgaggtaggagaatcgcctgaacctgggagctgaggttgcagtgagccgagatcgtgtcactacactccagcctgggtgacagagcagactccatctcaaaaataaataagtaaataaataataaaaattctcaaaaaataaaataagatctgaagaataagaagttacccaggaaaggatagtgggggatggaggcggtgggagatgattaggggaaaaggaccagcgtgtgcggagttggggagggggtcaacttggcacggagacatctccccatccaccgtgaatagggaaataggaagccatggtttgagtttacagtatgacgggcccttgtcatcgcttcactcactcctcacattaactttgatactgttactaattccattttatattgaccaaactgaagctcagagagtcgcaaagtctctgagccaaaagtcatgcccctattaacacacagacagggtatttgaatccagtcagggctgcagagtaaaacctctgagctactgcttttctgccggaatcctctgggctgaggaaaggaccaggtgacctcttagagtccactgagtgctgagaacataaaataatgccagaatttttcttgatacaaagattcttcactccaggagctggattcatggctcaggacattttcatttgattgacgtggtggggttggaaagaacagaatttctatccttttctgatgtgagaaacaggactggaaagagttttgaagat

SEQ ID NO: 588156 - DNA, 4001 bp, Homo sapiens
cgtcattcttgccaattctcaaaggaggcggggtcaactttaagaaaccatgatgtatgtcctatctcatcaggaaatcaaggctaaagaaaaaaaaaaaaagaaaccatgatacccaaaaaaattttcgtttattatcttttattatctgatattctctcttctgtccattcagatcctaacttaaagtctgtccagacattctgcacaaatattcctttaattgcattcaagtcataacgaccaaaaaaatagaatatggtgcatattagtagctgtacttgcaatccctttatatctaacatattgttggtacacttaacggaagtgaagtcccggcatgactaagcttacccaaaagatgatggcattcaggctctaatcactccagtgctagtctatgcttccagctgaatttcttactattctgcttatgccacacttgccttatgttacgtcccaaatacaccacacatgttcacatctccatgcctttgaccatgttcttgtctctgtctggaataataagtaaggaataaagtcattcatcacactcctgaagcactgctacgtgctagtggcaatttacattaacaatctcatctcatcttcataacaaacctataaagttggtattgtttttcctgttttacacgtgagataagtctgcccaagaaccctcacaaatggcaaaatccactgcctattaaagaatgccttggaacccctttcaaatggcgaaaccctgcaggtattacagccctttcctcttaccatgccttgaaagttcacacagcctactaataaccaggatctgcttcactacactaaaaccaatcacgacttacacgcttttcacttctgcttaacagattataggtgctcaacaaatgcatgtcaaaattaaaacactggtcctctggcttaacccggaggttaagggtggaaactgctattccacccttcacgacccttttagcttttccctgcactgccagtgaaaggaactgagctgtaacagtattccctaggattgtcagcctccttcaaagccttcaaagctctgtattgtattgctaatgatgtctcctcccgtagaaggtagctcaagggcaagatccataccatccacattcttatcgccagagctgaggaaaataaaaagtgctcaaaattgtttaaatgaagtggaacagtccctcaagactaactttctaagagaaaatgaacaagaggaaaaattgttccagctgagcagcttcaaatttaagattctccgtaataataaaaggcagtttcaccgcagcttttacaactccaccactaatagctgagtttacagaaagccattacacagcaacaataaagcctggtagcaaggattaaatccccagggtatatattgaccttggcttgtctggagcggagggcgtaagctgcacttctgtttgccgcgctgaatgcggtcactttacaggtaagctgctcgggggtacacgtttaggttattaaaagcaagaaataggtgcacaaggaagcggccacgctgggtgagtagggaggtgagaaaggggagggacccaggttcggtgcgcctgcctgacctcgaccccgcgtcctgccggcggacgctgcaccttatgcccgtcctgagagcgagcggccgcccgctgccccgcgcctgcccagcgttcgcacctcacctcggttctcctcctccaggtgccgcacccgcagctcgtcctccgtcttcatctcagagctgtagccccttttcggggcgggacccccggccgcaggtacccagccctgggcccagatcgccgggcccgctcgccggcctgccaacgagccgggcagcctcaaccccgggcagagccacgcactgcaagcggccaccaggcgggcgccgccagcatgcagggatcccaaggccccaggtgccgccgccaccgcggccgccatgttgtctgtttacggcgtggacctgcgacggccgctccgcccccgcccggcgccgacctgccgcgcgcacgcgcacggcgtccggacccgccgcctcgctccggcttggccccgccctccggagccgtgttcccgcccctcactgccccgccgaagcccggtgacccgaggccttgccccattctccaagcgagattggatggtttgtccaatacaaaaggaaagaaagtagttttccaaggttatggaataattcagggaagacttttctataagaaccacccggagggaattatctccccgtactccctggaccatgccctgcggtcctgtgttaagtaagctgcaaaagtgaacaaaaaagttttgtctcctcaagttggctgaaagtgtggcagcccatcgttggtcactgccttacttatggatctcaggttgttggtttagcgtccctgataagcataaatgatgtttactacgtggcgttcaggaaaaggatgagaacagcaaacaggcaaaggagttctttctccagcccacccactcgtaccgatgtcccatggcccttcctggacggaaagagtcttacaggggttcaaacaagccatacgctgagatgggatttagagtatgtagctcttccagaaactcgggatatcaatttagtgtgtaggtactcatcaaagcacgttgcagtataattaatgctacctagcttttatcagatctctaatgggaaagcttgcatttaagaatactgggcagggggcggtggctcacgcctgtaatccaagcactttgggaggccgaggcaggtggatcacctgaggtcaggagtttgagaccagccgggccaacgtggtgaaaccctgtctctactaaaaatacaaaattagccaggtgtggcggcacacgcctgtaatcccagctactcgggaggctgagacaggagaattgcttgaacccgggaggcggaggttgccctgagctgagactgcaccattgcactccagtccaggcaacaagagtgaaactctgtctcaaaaaaaaaaaaaaaaaaaaaaaagaatactgtttgaaaagtgtgctgctatgagcatacgtctagtgccacagaaatttcttgtattttttagtcctaagcaaaacatccttcattatgtcctcaacttttatccaatgtagaaacaaaaagtagactgaattccattactgcatctgctgtaaaatgatgttgaaggcacttttatttttatttttattttttattttttgacaggttctggctctgtcggccaggctggagtgcagtggtgtgatcgcctctcgctgcaacctctgcatctcaggctcaaatgatcctcccacctcagcctcctgagtagctgggatcacaggcacacaccaccacacctgggtaatttttgtatttttagtagagatgggtgtttctatgttggccaggctggtcttgaacacctgacatcaagtgatccacccaacttgacctcccagaatgctgggattacaggtgtgagccaccatgcacagcccactttttattctatcttttgtaaagttccatgcaggaaaattttcctgaagtttactacaaggaaaactttgcttcctttgtatctttcctcttttctgataatgatgtacatgttgactgctgggtgttgtgatttttattgttatggtttctttctaatttggtcttgtggtcaccagagggagggtaaatctggaggtgacagggagttcagccagtggaagggggtcaaggaaggggcacttgtggagctaaagcctctgttggggtccagcgtgttacccaagcagtttcccatggaagttctaattggtgagtttagaacaagcaggcacaagttccatggagtcaccctgtcactgtgaggtggtcactggagcccatctacacagtccatgtgggttatggaggtcaacaggtgagtcaagcaggctgcatttacctgtcccatagggagatggtcaccaggaagcagttgcat

SEQ ID NO: 588157 - DNA, 4001 bp, Homo sapiens
agattttgagaaactcgatagcatgtctcaagtcagacacttagcagcaaggcagagtccatttcattttatgggactagtctgcttcccagaataatcatcaaatgcaaaggaatttaattatctgcttaaaaaaacaagcccccattattaccacagttcacgtctgaccaattccaagatgttcttcccaaacttgatatgaacacattgacgcaattactggcgaaattgagcaagagtatgtagtagccagggctctgtgggaaagtgacagaaaactcctattggcaggatgtcatcctgcctgccagggcccctcacttacaacaattatctaaaacctagcattagaaatgagaaaccacctgtgtggtaaccctggaagcaacctgtggttgccttgggcctgtgggcctgtaggttacaggtcaaagagaagtccagactaggctcagccagctgctatgaggaatgcaaactcacctactcaagctctctgcctatgctgaaacaggctagaggtcagagttcagatcatctgggcaagataattgagactcaggctgctaccggaagtaccagaaatgggcaacgtggtgttgactggttatattttagccctctaacacccagagtacacaagctctctgcccctgggagagatccctgctcacctaggttttgggtacccataccaggaggaggctagggggaagggctctcggtcacgatccacacagaggaagaaatgaacacacagtgacaatttactgagggcttaccctcattaattaagcccttatttaccattgttcacaatatcttccaaaacaaccccttgaaagggtgaccatttattatcccagaagagaaatatgaggttcagagagaagtcacttggcccaaacgatcaggagaaaaacccactcaggagagtggctctatggcaagacacgtgaaccgagaggtcagtctccttccccaccgggagcctcacgtcagtccccaaaagggagtggattactcgaggtccctaccagagttctcagtgcaaggctgctcgaagccctaagcagacccaaactccaaaacttcctgagcctcgggccacagcagggaagtctccaaggccttctctggttctggggctagaggggcctcgggacttccctgtgcggtcccggccccacgcctccaacaggactccccagggacccacctcgcaaaccttctctcccatccagtcccaagcctctgtctgggatttaaaactctgatccagaagagggaggctggctgtcgtagaagagccagcctgagggaatgtctgggggaccctgtcggggaaatccgggggggtcccaatcctccgactggcgccgacccgagtccttaccaagcagcggggactcctcagggcaggcgggcagcgacagtgcggtggtgtggggcactgggaccgaggtcaagttgctagcggggccagggccagaatccacgactgggctggagtcgccacccgggcgcggctgggaggaggcgcctagaggaggcggcggccgggcccctccggtccggagctccccggaggactgcccgatggcggcggcactgttcgagccgccctgcagcggtgtggagactccgaccagttggggcaggcggctcaggtcgcggccagccaggtagtaaacgagggtgacgccaaggtgcagagcgcagacggccacgagcaggcggcaggcccgctgtagggacgcgcctggcatcgcggcgctgccgctcaggagcggctcccgaagcctcatcttcccgccgccgctttaagaagggtgtgggctacaggaggggaggcgacccgcccgcgggccgcccgccaggcgctgccccacagcggcgactaggggagggcccggagcgggggcgggcgagcggctgagagctgagactcctccagccagccagacctgggagcggcgagaagccgcccgaggcgccggcggagaggggaggggcggggccccggcgaaggcgggggcggggccgggcgcggggttttctggacgagggcgggaaggcggggcagcccgtggcgggatgggcgcgctgggcggggcctcgggagggtgggcagcgggcggggcgccgtcgtggggtccccggagtatgactgcagctccgacgcttggccgcgcaccgccctcttcctcccgagcctttgcggcggagcttcggtcgcgttgagccgcgcctcctcttcctcctccacgctgccctcgacaggccgcgccacttcctggggtgcgaagggactcgggtgcgagcctgggcctgcagcgcggcggcggagagaacggagaggacagctggcgggtggttatctggagtggtttggggccgcggcggcgttctggccagtgggccttggtgggctaggaagagaggcagaaaaaggttacccaggaaacgggcttcgacgccgggcgaggagtggcacgttcgaaaccccctccctaactcagcccggctggaccccgctgcttaacggggggtcctgcggcaaagaaagtggacgggttgccacttctgtgcctccccatcaggtagcctgggctataaggggctctcagaccagcttggttccagatgtgtgtgtggcgggagtcctgtatactttgaagaggagagcagcaagaagcctctaactcccaggccagcgtgcaggagatcagccggcgttacagtctacactgggctacccactgtcccatgaagtagcagttctccccatgtcgtagagtggggccccggcagattaagaaactttcctaagagcccacagctggcaagaggcagaattctggctccgaaacccatgttttctacaggtttaccctttgttgatttgcaagtaagggctgaaggctgtgtgggtgagagacttaggcactgaagccacttgacctcgatttgacccagaggcctcaggccctgagtgagcagagacacctcaccccagagaaagactcatggaggtgctgtcagtaatgtggatagggaagttgagggctctggcagccaaccatcagggaataacagtagctaccttattttgagagtttgctgtgtgccagtactatctgccatgaagtaggtggtgttacggtgtccatttcacagatgagaaaataaggcttatgagttgacactttggttgtgatcatacagaatcaactttcctcacttgacttcctggacaccaggtccttctgatcttcctcacttcactggccatttctgtctcctctctggacttcttccccagttgctgaaggccccagccatagtccatgatgttcttttgtgtctacacttactgcctcggaatgatttataatatccaaatgctgatcactgatttgtctccagcccagatctcttccctgacctccagattcaactgcttattttactggcatctcaaacacaatacatcttgccctcagcaacctactccttacacaccactcccgttcttacctccctcagagagtgatactattgtttattcagttccccagaatctaaaaggtgtccttgatgtgcttctcttgctctcaatgccatttgcaagccctcagccagctttgtcagtgctaccttcaaaacatcaaaattcaccaccagccaactctgatgtaaccatcctcgatcaagccaccatcatcttgccctgggttatatggcagctactaattggtcaccctgcttccacctcctccattcctcctccctagtctgttttccacagagcatccaggaaatctttgtaagcataaatcagatcatgccattttgttcagaaccaaatccacagaaaccctgttcaatctggttcctatttccctccccacccacatctgtcactctaccatgctggacctgccttagccacactagcctgatagctattccttgaacttgccatatttcttcct

SEQ ID NO: 588158 - DNA, 4001 bp, Homo sapiens
agctgaaatcctatctctaaaataaatacatacataaaaataaaaaagaagacagattgtcaaactaattgaaaaagcaagtggttatttttcagaaacacattgtcaaaaaaagacagattgaaagtaaaagaaaatatatgcaacagtgtttgtgttgcatatatgtgtatatatagatgagagatgagacagacacagacataaatacatgctgacaagaatgagcctacagagagagaagtcctgagaatgataattcagtggtgagtaaacattgaatatgtttcctgagaagcttaaaaataagtgatactatagcttccaagtaccgtatttcatttgttttcttgtaatcaagaaattgagtacttaagatcatacagaaatacatgagagtcagaaatggaatctacatttccaactcttagtcaaattgattagtacttcaaaaagaatttatcaagagtctacatgtcatagtcactgacagataagatgcagttcctactctaaataagcttaaggtatagtatttcttctacatattgttacagtaggtagctagtcatgcatgagtggggcaggagagggttgcccccacccaccagaatgtcaggtgactatcaggtgatggtcactctgcttctctaaaataacaattggtcacagccagcaccagggagaggcagtttctcaactgataaaaacacctgaaattgataattggcagctttcaggaactgggcgaatgagctcaaacatgcacattaagagtcaaaatggcagagtatgaccttccaggggcattccaccagaatttgaaagaaagcctcagataagcatgcataaaactccagtaaacacactgtgcatgcccacatcccaagcacaagcagggcaccatgcatgtgggtggctccccataacccttaagggaaggatgaagggaaaggggtgcaagatgccagaagtaggccagcatataaaatcctaggttcaaggatgaacgaggcacttgacctccaagatgcctgcttgggtctctcccaagtgtgttttcctttctttcctgttctaaagctttttaataaacttctgctcctgctctgaaacttgccttggtctcttttactgccttatgcccctcagttgaattctttctttcgaggaggcaagaaatgagattgctgcagacccatacagatttgccaccagtaactcagatattcaccacccctaacaatattatccattcaatttatttctatacaaatatcacatgcatcaaccagcgtgcccaaacagaaataagtcaattagaaagtcattaactttagctcaaacttatacttgctttttttggtattttttaacattacatttcactaccagaaagcattcctgaattgcataaataggtataacatatattcaaagcttcaagaaatattttcacagaatctaattctaacatggcattagtcttacattaaaagaaaattacccttcaaacaaaatataaataggaccacagtacagtttcccagaataggagggcttattctataaaattctaggcaatagtcttttaaaagagggagaaatattgatggggatggggaagacagaataaagaaattttaacaaatgacttctgatagcctttcattttcctcagaaatataaatttcagctcaatatcatcataatagcaagtccctactgacatcctttctaagcaaatcaaaatgaaaagacacacttatctgagcactctgggcaactctacagctgagattatgaaatgaacaaaaagactatttgtcctcatgaactgctaaaattccaaacactgaggtaaataaactctgatttaattcaagagcagagattttaacttatttccaatcggcccaaataaatagtcctgattaaaatacaaagtacctggattcttcctcttgagccttcttttccagcagtagagggaaaatgacagacaccctaccaaaacttgcccagaaggccaaaacctcaaatatgcctttggaagtataacagagctaacttaagtgctaggtcaccacatacctcttgctctagtttcctattaatttttaacagttattgaacccaataaatgtatcactattttccctcttcattttctgttctctctaaatccgtccctcttagggattgccactacattttactcacattattttaataattttctttatagaagttgtttgacccctattggcaccattagggcatatttttcttctgcaataaaatactcaaggtaacttctggagggctctgcatttgcaaatggtttctttcctgagacaacaaaagatgaaaactacaaatgtgatcacagtaatgagtaataaaatactcaagccccactttcagaatttggggaggaccaaatctcctactaatcctcctcaactaattcacatggtttcttgaaatagctacagaacggagtgttagtaggattttacatgacaataaaaggactatctccataaaagtactggatcttttttgaggtgatagagcatttaaaaagtgcaaacttaaaggaaacttaaattcaacttaattttaaggaagtctgatcagccaaatactccataaaaaacttgaaaactattaagctactaccttgcaagacttatgctacagatacaactgattaagaattattaactgggatacataaaatattcctaaaaaagtaatgtctaaaaatctcaggtgaatatgagaaaaagtcttaaacaggtacttaacagacaataggacacaatcataagcttatgggaaaaggcttaatctcattatcaaagaaatgcaaattaaaatcatggtgtgtatttcatacctaaaaggttggcaacaattaaaaattccaaaaataagagttggttaggaagtgaatcactcagactcaagccctactaagggaatataaattggtaccaccactttggaaagcaattggacattgtctaataaatgtgacaatatgaataacttttgacccagcaattcttcttctagagaataaaaataaatgaattacaactacatgcaataacctggatgaatcttataaacataatgtcgttagaaactagtcataaatacacataaataaatctttcaaatttgtatttgctgaactaaaactataggccacatttttggagtaaatctttaaacaaaagcaaggaaaggattactgagagtctggattgtggtgaaaaattacattaaaagaatggaagtaagtaaatgaaaaaaatacatacctagcaagagaacctgcccccaaaatttcagcgtaggttctattttccctaagtgtcggctggtctgagaaataaagagaaagagtacaaagagaggaatttacagctgggcctccgggggtgatgtcacatatcagcaggaccgtgaggccccgagccacaaaaccagcaagtttttattaaggatttcaaaaggggagggggtgtatgaacagggagtaggtcacaaagatcacatgcttcaaagggcaaaagggagaacaagatcacatgcttctgaggccaataaagatcacaaggcaaagggcaatgcaaagatcacaaggcaaagggcaaacttagaattactgatgagggtctatgttccactgtgcatgtattgtcttgataaacatcttaaacaacagaaaacagggttcaagagcagaaaaccggtctgacctcagatttaccacagcaggattttttccccatcctaataagcctgagggtaccgcaggagaccagggtgtatttcagtccttatctcaactgcgtaagacagacactcccagagtggccgtttatagacctccccctgggaatgcaattcttttcctagggtcttaatatttaatattccttgctacaagaagaatttagcgatatctctcctacttacacgtc

SEQ ID NO: 588159 - DNA, 4001 bp, Homo sapiens
cttacattaaaagaaaattacccttcaaacaaaatataaataggaccacagtacagtttcccagaataggagggcttattctataaaattctaggcaatagtcttttaaaagagggagaaatattgatggggatggggaagacagaataaagaaattttaacaaatgacttctgatagcctttcattttcctcagaaatataaatttcagctcaatatcatcataatagcaagtccctactgacatcctttctaagcaaatcaaaatgaaaagacacacttatctgagcactctgggcaactctacagctgagattatgaaatgaacaaaaagactatttgtcctcatgaactgctaaaattccaaacactgaggtaaataaactctgatttaattcaagagcagagattttaacttatttccaatcggcccaaataaatagtcctgattaaaatacaaagtacctggattcttcctcttgagccttcttttccagcagtagagggaaaatgacagacaccctaccaaaacttgcccagaaggccaaaacctcaaatatgcctttggaagtataacagagctaacttaagtgctaggtcaccacatacctcttgctctagtttcctattaatttttaacagttattgaacccaataaatgtatcactattttccctcttcattttctgttctctctaaatccgtccctcttagggattgccactacattttactcacattattttaataattttctttatagaagttgtttgacccctattggcaccattagggcatatttttcttctgcaataaaatactcaaggtaacttctggagggctctgcatttgcaaatggtttctttcctgagacaacaaaagatgaaaactacaaatgtgatcacagtaatgagtaataaaatactcaagccccactttcagaatttggggaggaccaaatctcctactaatcctcctcaactaattcacatggtttcttgaaatagctacagaacggagtgttagtaggattttacatgacaataaaaggactatctccataaaagtactggatcttttttgaggtgatagagcatttaaaaagtgcaaacttaaaggaaacttaaattcaacttaattttaaggaagtctgatcagccaaatactccataaaaaacttgaaaactattaagctactaccttgcaagacttatgctacagatacaactgattaagaattattaactgggatacataaaatattcctaaaaaagtaatgtctaaaaatctcaggtgaatatgagaaaaagtcttaaacaggtacttaacagacaataggacacaatcataagcttatgggaaaaggcttaatctcattatcaaagaaatgcaaattaaaatcatggtgtgtatttcatacctaaaaggttggcaacaattaaaaattccaaaaataagagttggttaggaagtgaatcactcagactcaagccctactaagggaatataaattggtaccaccactttggaaagcaattggacattgtctaataaatgtgacaatatgaataacttttgacccagcaattcttcttctagagaataaaaataaatgaattacaactacatgcaataacctggatgaatcttataaacataatgtcgttagaaactagtcataaatacacataaataaatctttcaaatttgtatttgctgaactaaaactataggccacatttttggagtaaatctttaaacaaaagcaaggaaaggattactgagagtctggattgtggtgaaaaattacattaaaagaatggaagtaagtaaatgaaaaaaatacatacctagcaagagaacctgcccccaaaatttcagcgtaggttctattttccctaagtgtcggctggtctgagaaataaagagaaagagtacaaagagaggaatttacagctgggcctccgggggtgatgtcacatatcagcaggaccgtgaggccccgagccacaaaaccagcaagtttttattaaggatttcaaaaggggagggggtgtatgaacagggagtaggtcacaaagatcacatgcttcaaagggcaaaagggagaacaagatcacatgcttctgaggccaataaagatcacaaggcaaagggcaatgcaaagatcacaaggcaaagggcaaacttagaattactgatgagggtctatgttccactgtgcatgtattgtcttgataaacatcttaaacaacagaaaacagggttcaagagcagaaaaccggtctgacctcagatttaccacagcaggattttttccccatcctaataagcctgagggtaccgcaggagaccagggtgtatttcagtccttatctcaactgcgtaagacagacactcccagagtggccgtttatagacctccccctgggaatgcaattcttttcctagggtcttaatatttaatattccttgctacaagaagaatttagcgatatctctcctacttacacgtctgtttataagctctctgcaagaagaaaaatatggctctattctgcctgaccccacaggcagtcagaccttgtggttgtcttcccttgttccctaaaatcacggttattctttctttttcaaagtgcactgatttcatattgttcaaacacacgttttgcaatcaatttgtacagtcagatacaattacagtggtcctgacgtgacgtacatcctcagcttaccaagatatgaggattaagagattaaaataagacaggcgtaagaaattataagagtattatttgggaagtgataaatgtccatgaaatcttcacagtttatgttcagagactgcagtaaagacaggtgtaagaaattataaaagtattagttttgggaactgatacatgtccatattaaaatgaaatcttcacaattcatgttcctctgccgcggctccagccagtccctccatttggggtccctgacttcccgcaacacatactatgcaacaataagcataagaaacctaaagtagtaatgactaagattataaaatatatatatatcatatatctatatgacaagatcataaaaaccataaatccgaataatggatttcaagatttatgtggcaaaaattgacagaattaaaaggagaaataggaaaaataacaattccataaccatgagtgaaggtgtttaaatcccttttaacaattggtagaaaacttgaaaaaaatcagtaaaggcatagatttgaacactataatgaccttaccctaatcgcctcaacaacttcaaatgtacacggcatgttcaacaagataggccataagttaggccataaaatctcgatacatgtaaaaatactgaaatcatatatctcaatgaaattagaaattaataacattaagccatctagaaaactcccaaatatttgaaaatcaaacatatttatgtcatgagtcaaaaagaaatcacactggaaattaggaaatatttcaaactgaatgataaaggaagaataatataatttttaaaattataaaatgaagccaaagctaaaaaattgataagccacaacctagattgattaaataaaaacaagataggacacaaataacaaatagctcaaaatgaaagtgggcctattattatagatccaactgacattaattagggaatattatgaacaattttatgctaattaatttggtaacttacatgaaatcaattacttgaaaaaatttattgaagaataaatgagaccaagaaacaataattaacgaccaactcaataaaccaggattggatcctggattggaagtgaaattgctataaaggtcattactaggacattggtgaaatttgaatatggacagtatatgattattgttacatcagtgttacatagtttgaatttggtatttcatgatggaaagcaaaactttgatgattgctccagtctgttactgtacagctgagattaactttggaattcta

SEQ ID NO: 588160 - DNA, 4001 bp, Homo sapiens
ccaggtcttggacaactggttcactgctgccctgctgggaggtaacatgaaggtcgtgcttctcattgcctggggagaaagaaaagcatttgacgaatatgattctttcacatacaccaatataggatgacactttatcacatttatttacccagccttcaaggcccagctcatatgccacctactccacagagcctgcccccatgccacccagctttcctctggtgacctcctcaagtatctctgtttcctctattataataactaacaatatgaatgatatctgctaacattttaagcatttcatgcataatctaatttaatcctcagataaaccccacgaagtagatctacctattacttcttatttcacagatgagcaaactgtgacttcaggcaagttaaggactgcctatggagactcaactgttggaatcagaagttgatatcagatctagctgattcccaagcccacctttttcatcacaagccatctgcttcctgtggcttgactgccctgtaccctgtattgtattggtctcgtctcgcttgctgtaatgggcaagtgactgttttcctccaagtctctcccactgaacacacttgagtgcatccatgatttgtgctaagtaaacagacaaatgcatacgaacagcagagcctttctttctgaagaagagacgccaattcttttccagggatgcggacagcaaggagggagcctgtgtacagtacattacaccaaggtttggttcccccaacagctccgtgaggtcagcaggagccagggttaccaaatctacttcacagaggagaaaccggattcttagaagaagccgtccatcccaaggtcactcaaaaccgcaggatctagaatccaggtctccagattcccagacccttgggcctcccctagctggttctagagaaacctcatggactcagctctccggtgtactgacttcatttggtggtgtgtcaactccaacagtaggcagacccaaagggtgcccagagtacaacgcttggacccacggccaactcaagcggcgcacacggagaaggcactcagcacacgaggagcaccccggcatgcacgaagttctgacttatcacacacggagcagtcgtagaccacatggcccaatatatgcctgacacaaagggcacaataactgcgcgggcacacaaacacaaccaggcccacgacgtaaagcacggagaagctcaaacacccaggatcgcacaaatgaccagagacaaaatacaccggccacatggaaaagtgtacagacacaagcccgggacaaaagacagttccacggacacaaccaataacccacgcttccggacgccaggacaagcgcaaggtcacacgcttctggaggacacgtgactaaacccacagaccccgccgggctttcgggacctgcatggagcccacctggcgcccgacactcactgtgggtgacagtcacggtgagcccagctgccgccatttcctccctggtcacctcctcgctccgggtcgactcctcgtcccgggtcacctcctggctccgattcatctcttcgccctgggtcgcctcctcactctgggtcgcctcttcactccaggtcgcttcctcactcagggtcaactcctcgctccgggtcaactcctcgctccgggtcgagcggcgccgggttttcttcttcatccgcggcctgcgagcgccggcggcggcgcccctggtgggtcggtcatgcccgctggcagtactccgggcaggtggacgcccagagggaggcggaccacgctgggccgggggctccgactggcgcggctcccggcctggccgaagggcgcgcagccgggaacccagccgctcccggtcgcctcgcggtctccgcgcccccccgcgctgagccaggcccgcacttgttgaccgcccagcgatggaagctgagcgcggcgtctcacaaccccgcccgactacttcccagccccgccccggcctgccggccccgccctcgccctatgccgcgttagttgcctccaggccccacccactcaactgaggccccgccttgctacagtaaaacccctcccactccttctaccaacaccccgccccctgcaggctctctccgagagcaccaagtccttttgctctccatccccggaagacccggctgaaaatccggaaaaagaatcgggaaacgccaggaggcatattgcgcttgcgcacggaggggccggaagtcgaggcgggagtgactctgcttccgtttctggttttgctctagtgtttgggtttcttcgcggctgctcaagatgaaccgactcttcgggaaagcgaaacccaaggctccgccgcccagcctgactgactgcattggcacggtgggcatttgatcatgcataagtaggctcaggacctctgacacacccgaccccgcccacccccagccccgggcccatattcttccacttcatttcgggtcctgggccccttacacgtcgtccctctctatctcaccttctccccttcatccctgttacccaagtcattcctaacgccacaaaccagggaacccctaaccccatcactgccttgccctgccagcacccaacccgttttgatgcccattgcccgtccactcgctctcgccttgatcctctcacctcacccagccctaggcccatacacccttcccacctcatcctgcctgatcccttacccttcttccatctgtcatccccagtccacatcaggactcagcttgatatcctaggtcaacatatctgtgccttcgtcctggatctcagtaacacaaaactcagaaccctagcccctcagattaagccaccatccccgatttagggaatggcattagatctacaatcagctggtttcacttggcactggcccatttcatgtgcctcttggaggaactctcagcctggctagtctctgattctagggaaattccaactcaactcagtgattctcaaattattttctgccccaacccacttgaaggctacctggtatatcagaatcggggcagtgtggcggggggtaagagaataatttataaagcccagggtttctggttgggaatacccttctttgtgaaccactgtttttcacccttccccttaagctcctcttttcttcctctgtattccttcctctctacctgccccttctggaataagtgtattgcagtaactaccagtgcatttgatattttcccctaaggtggacagtagagcagaatccattgacaagaagatttctcgattggatgctgagctagtgaagtataaggatcagatcaagaagatgagagagggtcctgcaaaggtaaggtgggcagcaactgctgcacaaggtgctggcagagcctagttttagcacctatagaaatagggcctagttcggctgggcgcagtggctcatgcatgtaatcccagcactttgggaggctgaggcgggtggatcacgaggtcaggcatttgagactagcctggccaacatagcgaaaccctgtctctactgaaaatacaaaaacttagctgggcatggtggcaggcgcctgtaatcccagctactcaggaggctgaggcaggagaatcgcttgaacctgggaggcggaggttgcagtgagcagagaccacaccatagcactctagcccaagtgacagtgtgagactccgtctcaaaaaataagtgaaataggacctagtgcaggggctgtgagcatccctacagaagagatgcttacagtctggtaaggagaaaacatgtgagggtgtatcctttagggaggagagtttgcaatcaaatatggaagggaggctggggattgatctggtggaaagagatgctggtcacacgtctaaaagcatgtacatgagaattagcatattatactgagaaggtggtaatctggagaggaagactaggctgtgctcaagatcaatgacttgctaagctggtcaggttaggttg

SEQ ID NO: 588161 - DNA, 4001 bp, Homo sapiens
tcaggacatatccacaaacgaattcttggttgggaggagagtgttaaatgagccttcctaaaattttgggaagacttggtccaaatagggaccaggaagtatggcgctgggggtggggtgggggtgttgggggagggggcaagacaataaagaagttgcccttacagggaaattttgtctcttgaaaagatttctgggaatcaattatgtgcttgaaagagctctgaacagcctctgcccactcccagtgatctgctagatggggacgtggggctgtctcccatgaagccctcatactcctcttcaccttctgccccttgacttctcccttagaaagaactttgtgcctctggctttgaaaaacagctaaagtcgaggtagtgactgggggtcagaaacaaaattagggaattctttttttttcttcttccctttcccttccttccttccttccttccttccttccttccttccttccttccttctccctttccttttaaccctgatctcatctccttggttacgatgggatgaaaatggaacaaacaacaacgaagattcatagaggtaaaaagaaaagtggaggggcaacaaccccagtgtagcgggagaaaaggctggttactcaggaatccctggaacttgcataaaacccggagttggttgctcaaggcacttaaaatcaaattcaatgagagccattggggggtgggtgcagggtactgccctctgcactagccccctgacctgctcccaggcagcttcctggctgaggtttctgctttgaagtgagtgcctcttttcatgactcacagaacccggatcacactgggcccattgggaggaaaagccctgtttttcttcctgtctggaaatgtagattaaaaggcagaaaattctgacggttctcagggctccagctgaaatttttctgctgtattttcactctataaagcagaaccctttcagtcttccattgcttctgcacggtttcttcctagagagccactggcctgattgggacctgctcctgtccaccagcactgctggaagggcaggggtcccagtcgaagtttagaaagtttgctttgtgcattttggggaaatctcctctcgggcacgcagtatccctcccctgcccacactgtctccaccagactctttgttgctcaaaggcataaccacaggactggctgaaatgttctgaggagaaccactgctcaacctgagccctgggggagcccccaggtgagcgagtgcatgtcccgccatgtgtattccttttaaatgtcagtttttagatacatagcatccccccaagttttcacctcctgctttcttacctttatactcagagtccgatgaggcgttgctgccacttttgtccagcttgtctctaaagtcctccgcggccttggccgcaaggcggcccccaggctcaggggctgccggctgcccgctgctagagtagggtgcacaggccgcgagtggtttgcagtcggcaaggatgtccctgatcagaaaggaggaggtgacggtgcgcgactgggccggggctgagagctgcccgggctgcaggtgggagtccaaacctgggccggatgccccgccaggccgtggggtccccgtctccaaacagtcccttcctggagaggctggcgaagagcagtcgctgctgctctctgagcgtggactcagctccaggggcgaacggcagtccccgagcaaggggtcccccttgggaagggcggggctgcccgcgcggtgggagagaatggagtcgatcccaaagccattggagccttccatagccaagctgcgacctgtcctccccaaaagctccccacccacccccaaccccagccgccgctgcccctgcccctagctgcgggctggcatggggaaggcgggcagggagcctgcgggcaccttggacggagttcagccttgggggagcccgggagctctgggccaacctcctctgcgcattagatccaaaagggctcagtgcgtcttctgcagcatcgcgccgagccgccgagccgagggggggtggtgggagtgtcagggaggaatgggagggagggcgcgccaagttggggagagcaaagggggagacggacggcccgagggcccccttggcacagaagaaacgcgaggatgttggaatctaaataaagaatggcgttttaaaaatccaaaccgcacgcttcttccaggcaagtggtggctgagggtggccaggtcagcaccgcagatagctgcgggcccgggccgcgctagcagcgggcggaaaggagcgcacctggcggcatcagcaccgcggagagcggcggcggctgcccgcggctcatgactctccacctggccggggaggtcctctctccgcgccctcgccgctccgggggcccgtcagcaccgtggacagcgcctccctgctcctcggcggcagctctctgccggtccgcgcgcgccttctcctcccccccttcctttaaaaaatgaacttgtgtcacttttactttgggtctgggtttttttttgttgtttcttttttttcgttgtgttgtgtgtgtttttttaaggggactcgcccacgtgtccccggagtgatgacgctgattggctctggccgattttgggggtgatgtcacggctccgcaagccgctgcccgattccctttcagtttgattaaaagagacaccgaattaattacagcacagacccaactgtttaccggcgatttccacacggtttgctttcattaggccggtgacgaagctcctaatgagggtgattagccaaggggggtacggctggaggggagggggccgagccgactgcgctgcggtgggctgggatgtgcgctgggctttttttttttttttttagcgttccccgaccctttcccacagttattcaaattattcgtcggcaggtctattgtagatcctttttccttcccccgtttttcttcctccagcagcagaaagggactaaaaccagcggaggaagaagtgtggtgtgtgtgtgtgtgtgtgtgtgtgtgtgtgtgtgtgtgtgtgtgcgcgcgcgcgtcgagaaccccttttctagtgtggggaagaaaattcaagttatgttgtttgcggcatttctgttgggctctcggtgtttcccatgtaggacaatttgcagtcctgtctctctggcctcttgggaccctgtgggcctggcgggagtggggaaagccaggtgtcttcctgggaagtgacgagaccgatggcttcacttcagggcgaggttggaggacttgggaagatcttgtcaggggcgttagggagacctcgagaaatccgtgtggctcaagggaggcagctcaagggacaaagaaggcagtaacccgcccaccccccacttatggcctctcccatgggcacctcttggggggccggtgctgttgtacctctgaacaggacccacgcaagagcttccgagtgcgagtgtagacgcctgctaacggcttcttattccacgcagagccagagctcgtccagggatgcattttcaaggcaactctggaaacgtggccttttcattgtgaatcatgcgccccctcgcccttcccaccccgtcacgggctccagtccagcgcctttctagggtcagcccccggcgttggggcccaggaccgcgggcagatccgaactgtgtcccgggcctggatcctctctgcacagccccagggatcgcaacccgggtctgcggcggaaagggcggacagagcggagcccaaacgccttcatcgaggtcgggcgggtcagaggcgtccttttaccccccgcaggctcgggaagccaggcctttccagcccggcctgcacgcccctgccaccacccccagcccccaggaaactaccccggctcctacgtcgggctcagcgaccgagaccgcagcaaatcgtaaggcacccgcatgccctctaaacgcagaattctcccgggggcagcctggcgtggtc

SEQ ID NO: 588162 - DNA, 4001 bp, Homo sapiens
cgccggtggcgcagatggagaccctcctcaacgttgccgttccccagatttgggagggagtatctcctcgaccctgtccgtgttctgtcctggagttccccaggcctcagctgcctctgagatctcggggttcctgatgaacatgtttgcagctgcgagaaactcggagtgtgtcttgtctttcggggaaagtagaaaccaaaaagaaaacggcagctggtcctaagaagatggcgtttgctccaaccaaatcagccttgctgcgttagaaaaagaacatgcacggagcgtgcacatttgctcttccgtgcgtggcacaacagccatgcggtggccaggagtcatctgggccggagttgggtgcttcccggaaattccaaagtaccctgagaacctggaaattattgttcacgttttctattttcagacgcttccccatgcagatgtttccattttcttcagtcctaaaatgattgtgtgcccgcttcaaacgaattagtagcaacagagcagatggagacgaaaggtagccgaatggccgagtcccagctggacttagaaggagcgcgctggccctgccgtctccaggctagggagcaccgactaggaggtgggggggtgcagggaaggcgacttgaagggctggggtcccggctacagcgtaggagcctcccttccccgacaggcctgtcactgaggtgcgagtcctagcctggctggagtcggaaagggcagggcaaggcgcaggtaaatgtggggcagaggacccgtagggaaaaggtgggagatgggaggcaggccgaccccaatgagagaagcgagggaggccgaccggcagacggttggaaagcgagatagggaaagacaagacgagggtggagtgcgatggagacagcaccatcagggcagagcaggccccgccaaattagaagaaagggcagaagctgaaaaggtctgcgcaggccgttcaagccctgcagaggcccagccgacctgaaaccagaagggacagccaggcagctgctcacagtcaggcctctggccccaaggcaaggccgaagcaggtccgcactgcggccaaggccgcgttcctcgcccgctggagctcccggggactccgggccggcttgggcccgcgtcagcacccagccctcgggagcgcaggcctcctccccagaggtccgacttccctgggttgggcagccgcggccactcccggccatccctctgcggcgaagcccaggcgcccgtggcctgaggtcgcttccacccacgagagtccgtagcctggcagtgcgcctgcactggggatgctcactcggggtccccgggctggaggccgaagggaagcagtgaaggaaagagcgaacaccctccccgggcggcccgcgggcacgaggcctggtttctgtgaggcctggagcttgcaccctccgcctcccgcctggagggctccgagagacggtcccagaacctgcgctcccagagcagcttcccggggctgcttcgatgccggaggaggctcggggcgcccccgcggttcagctcgctgtctcccgccaagcccggcccgcgaccccgcggccgccacacgtacccaggtggctgtggaagggccgcgccgccagcagcgcctgcacgccgaacttcagcagctcgcccgccgcggcagcggcggctgcgggcgcggcgcccttgggcccgggtggctccgtgaggatctcctcaatcatgaagctgcgatagcggtgcggccggtggtccgcgcagccctcgggcgggccgaagcgcgcggcgcccggctcccccggccgctgcatcgcggcgcccactgctgcgcccgcggtttggcggcggcggcggcgacggcttggctccggcgcggggcccgcgcggggctctaggccggcccgcagctcggggcggcgcgcgggcgccggctcatgccccctcccccgccggccggccgggcggaggcgcagggcgcgggcggggcgcgcggggctcggccggtcgaacccgggactgcgccccctccccacgccgccgcgcctcttgcccggccagccccgcgtcaccgccccgccccgccccgccccgcgccgccgcccccaacccctaggctgagccggagggagggacccagaagggagggaggcggaagggaggccaaaaaggagggggccacgtgaaagaggccggccgaccgagaccgagggagactgagcggagcgcacgccctggaaggagagagccggagagttcgggaggcaagacccccagagacgagagtcggagggatcaaacgacacaggtgagagaaggggcagaggcagacggcgtgggccaaacaagattccagacagtgatgtgagggcaccagagacgccaccgagatgtgcgcagagagaccaaaagaggcgtgagagccagcgggctgtgacgtgacggagggcacagaggcaggcggggcagaggaagggggcggtaaagaaatgggaacagctagaaaaccggcggcttgatcggcttttaggtagccccggaaaggtcgggaggaggaggggcaaaggccgcgctcctcagctgggaaggaggtggtctcaagcagcctccagtcccgggctcaacaccgccaacccggcaagggtgaggcagcgttcagggatgcaaggggcagagcggtagcggcacctgtgcacccctcccacctctgcctcagtttaccatgtacggcctcatttctctccgggctgccctgagagaaaaatgttctccagccgagatttgcttgaattggaaattcaagtgatccatggacacatcctccttgacagcccccagaagactgtaggctggttacatccccctagttagaaaaggaaaaggattcgaggagaagggaaggatgcagctttgccttttcccagctttggggcatcaagaaactgttactgggcggagttggggccagggggccagtgggtgctctgagagtgtaaagaccaaactctggtgggacctggctccattgcggagcctcaaaagctccaacatggtggaggaagttggcagtaccttctctagatctttctttccatccttagaagagtataagcccaagccgtggagtgaacaaccccaaagctaccctacgctgaactcctctctttggtcctgccactactggtgaaaccactgaccctttctgggcctgtttccttacctgtcctgaggagatgctgacctttggctccagagagactgtgagaactcagtgagggggtcctgcactccgagggtcctgcaccctgggagcccttaggtctgtttggagagaaaacagttcctccaggcaagaggggagaagtgtccccaggaggttgggggaggagcatctgccctcctccttctcaggaatcacagggcctacctcctagccccatccaccattgccagtcagcgcctgatgcactgggggtgtcctgggccacccggacttcctctgtgagctccatgtggggcctcagtctttacctcaggtaactagggcttaccacacctacagccatgccccccacccaagttgaagtcctttctccagctccagctgctggtggggaggccttcaggctggccctcagtccctggcacctgccccagactcgggagtgggggtggggggcaggtggggactaggaagtggcccagatcctttgtctgtagggcctggagtgaggacaaagactaccttactctggtaagatcccagtcccaagagcccactgtctctccttcccagttgttgcatgactttctgaactcagagttaccattgggactgaaagaaggtggcctcaatggccgccagttgcttcggactccctcggagagtggtgctgtgagcctacatggttctttggaaagggtggagaggggcgcactaagagcaacagtatcccacactgagcaggcctcctcctgagagaccaagagaccag

SEQ ID NO: 588163 - DNA, 4001 bp, Homo sapiens
agcggctcacgatgcacttggtaggaggaagagggctgcttcactgtgtgcagagggaaaagcgccctaacagatagtgctgcctgctggagagggtgagccccgctacaggagaccagaaactggccgagtccactcccactccatattctcagagccccctgcctccctatcacacgccccaccctaagatggggactcttgcaagagcagctgcatctcacccctcttgtagctccagcgccactggagcatgcattgcagaaggtgccaatacctgctgacagacaacagaatcgagtcctgagggcgatgggggaggacccagctcctgctggcccagggtcagccattgactggtactaactgagcacctgctctgcccagacatccaagcatctgcttggattcattctctgctctccacagacgggtctcctcagacacgggggaggcaaggaaggctgcaaatgatttaggcacctgtctgggctgactgggagcagaggtgccaggtgataagcctggaaaccaagagccaagggctcaccaggacacactcaagtgggggaagggagcacaccaccaagctatactcctgaccgcacaccagtcctttccaaatacatgaccctcacaacaatcctttctgggcacgcagtactgcactcccattttgcagagggggaaactaagactcacggagggcctctacccaaagccacatcactagcaaggggcacagcctggatccaaaccctggtgtatcctcccagaaagcaattcctgcaaacaacgctatggagtcagggaacgggagaagagaagctggggaaggactgtccaagactcccgctgccctgccgcctggagaccctcgaccagcctggtggtctaacctactctccccccagtgggaatgacacagaccactgaggtctccgtccaagaggaacacagcaagccacagcgaggggaagggcccgagaagcggggctggacaggaagtgggccagggaagtcatgctagctggtgggagcgcaatcccggccatgaggacacagcgctgggcctggggcaagggtactgggggacccatgccaggggcaacctccacgtgcaaccccgagcccctactcacttaggccgctgtccacgacctttccccacctcggaggcactcatgaaagaagcagaaacgctccgaaagtagctgcgcccagagaggggaagtgctttctctgaaggtgacagagccgcagccacccagacccaggcccaccctcggcctctcccagcgggtcaccagcatccgtggcctcagctcccggctcagccactgccctcccaaccccaccccacactcagacacacccggaacagcgaccaccgcaaagcatcagcccttacgaagccccgccccgccggggccgcccaggtccgcacagaagcaggcgggcagctgcaggaggcgacaaggcgcccggacccctgcattagcggcgtctgcaacggccgcggcaccggcctgctagccaaggccgggcccactcccacatactgcccgtgccccctccgccccggcggcccacccctgccggcccccgcttggcaagctgaccttggccgccctggtgccagggacgacgcccacaggccccggcgccgggcgggggtcgcagggcagggcggctcggctcacctccttgagctgctccatctcgctgcggatagcctcatagtccacctcgagctcctcgaactgcagcttgagctggtgcttctcctcgagcaccgccagcccgtactcggccgcctggatcttctcacgcgtggtctcggccagctcgtgggacagccgcttcacctcggcgcgcagccactccggctgcgcctccatcaccagccgcgcgtactcctcctcctccgacggcgccgacatggtggccgagggctgagccggctcccactgaggctctcgcaggccgggccctcctcagccgccgccgctgccgccgccgccgccgccctgccccgacggccgcccgcccgcccgcgccgccgcacggctcctcccctccggcgcgcggggcccgctgggggctggagtcctgcctgcgctccgaccacaaggtccatcatgcccggcgcccgcccggcccccggctatgattggcccatgctctgtgaggggcgggccctcgggcgcagccactgacgccaatgtggcccagggggctgtggggacagtagtcccgctagcgcaccgactacaaaacccgtccagccccgcgcccacccgtccccgtccgtgattggcctgcgccgccagcgtcgagccggatgtaccggcgccttgcagtcccctggacggcggtcgagtgggcgcggccccgcggccttccccacactcagagccggggacactgctcggtcgccgggcctcgcgctcccctgtgcctctggcagccggcggccacgcggggtggcaagacggctgccgggagaacccccagggggaggcgggtgcggggcggcaggactgggctcccgaccgtgggacgaacaacgcggacagagcccgggaggccacgagctagaagcgcatccgagagcgcgggtgaacggctgctgctggaaacccgtggacggtgtgacgcatgctctgtgcagacgtctgggggcgggaggaggacgggccagcagggggcgcccaggggccagcgggaacctcagcaccgcccctcagtccttcaaggtctatttcttgggaataaagacatttccattaatacagggtcataaacgtggtaaatataattgttgtctccgcatctatttttaggcctgacttaagttgtttgaaagccagtcgtacccttcgccttggcgtaggtaacacttctccgtatatggtggtgtgtgagataactcgtttattctttatctcattgacctaaagcgcaacacaccccacagccgctgaccgccatagcacctaatggccagtatcagtgcagatgagttcacccttccctcgtattttctttagccagtccacaggccccaagggaaatcctaaaggatgatttccatggaccctagcacagccatagtcccttccttcccaccgtctctcactgcccctctccatctgcttgtccgcctctcttaggcatccctaacctctccggaacctaagaataataaattccttctgttttgtaccttttaattttactttctcattgtatctcacctgaaccccacacccattcggttctcctagagagtggctatcttggcttatggtcactctccctcaagaccaaattagaaagaagccatgacagcagaaatcacagcacacagggtactgacactatctaatgcacagtccacactctaattgcacgagggcccaacaccatactggagagtttcagtattgtttttgtggtccaggatccagttgcattcagtcgtcaggtttcctgagtctcctttgattgacctttctgaggagtgcagtgcacactggtatatgctcatggggtgatgaggtgatgcgtttctggcaggactgtcactgaggtgttgctgagttttcagagcaccagccgggaggtatgtgatgtcgatttgcatttctctgattgatgctgggtttttctttggtaattagtgtcatgagtgaagactttgcaaccatagatatagcctatgactcctcaaaccttgacccactggttttggcattcatgactacttcttgcctgaaataattattaccatactgtctgcttttttttttttttttttttttttttttttgagacagagtctcgctctgtccccaggctggagggcagagatgcaatttcggctcactgcaacctctgcttcccgggttcaagtgattctgcctcagcctcccgagtagctgggactacaggcgcatgccaccatgcccagctaattttttttttttttttttttt

SEQ ID NO: 588164 - DNA, 4001 bp, Homo sapiens
agggattgtgtgtgtgtgtgtgtttgtccaaaaagtaaatgttctgttaacttgtacaaggtctcactactagggtacatcttcagatcagacacactaagtaacgtgccagaaataaattcctcccatttaaagcatgtatgcgtgtggacagtaacacgtgaaattgcagaatacaaagcagtggaaggcagacaggcttagccacagttcaaagtcattaggatataggaatacatgtgtagacaaatagttaacataggctagggtaaagggaagaaaaataatacctgccaccggcttttacagtgttcttgtgtaaaacgcccgttagaagaaaaactctcaagctctaaacagatatatttaatattgttgtgatgtctcacttaaacacggctttcaacaattccaagtgtccacgaagtatataaaaataaaacaggccactttttgccactttaatcctgggtacacaggattattttatgatgtcttttgtacgtcagttttacaacagcttgactctagggtaaatgggaaccatcataaatcgcacgctgctttcaaaaccactttaatttctgtcagcgttactgtaaccacagtcctgggctcttgcttttgtgtgtgtgtgtgtgtgtacgcgcccctgcatttgacagtcccatctcctacactccagttgtgactttgatcactgaaacaagagatgtcacattagggagcagggaagaggaaaaaatgccaacccgctatctcacctgtattctcatatgttccctctatatacggaatacaccatgtcagatccccaagtgggggtaacaatagcgacgctgggaggaagcaaactaaaaagaagggagtggtcaagccccatttctaacaaatcacttccccgaaagcggacagagcggctcatcaccaggcgaactaattgcacgcttcctcgctgcaaagaagtcgcttctcgtagaggggctgtgctggagtctcgcttggcaaagccagcccatctcctccaccacttgcacttggaactttttttcaaccttaaactcacttcacaggagatttcacctagggtttttcagcatatataattttttattctgctccctccccaggccccaaatcccaccctccagtcaacgtgcaagtaaaacaaatcggctcctatagaattgcacttcgaaaagagccgtctctgcaaggttgattttcctgccctgcgttctgcaccttctccgtaaagcctgcgggagcatttcctcccatctccatttaccacgggaagattccgaatgtgaagacaaggggagaggaagagtcaacgtgccgggcccgggcggctgcgccccagcgcacccggcacccacgcccagccgccggtccctcactcggcggcaagttgtaaaagttcccgtaggtcccagccgccttcctctcttccccgagctcctgccagcgctccattcatcccccactcccctccacctcgtccccccagcccgtccccaacgccctggagcctcccctagccagccgctcaccttcgcgcggaagccgcgagcggggccgaccttgagaagccccctctcacgtgcaccctcccacctagagctcgcctcagaaacttggggccaagtttaggggaggccactgggagcgcagcggggatcaggtcggaccggggttctggtccccggcccgccctcctcagcgccccttgcccctcacgccgcgggccggagggcggacacggcccccgggcggccccggtggcgctcgggcgcgggggtcatttctgaggaagtctagaataaaagaggaaggagggtggaaacttcttaccatctcggcatgctggttgtcaagtgcagcccccgcctcttggtctcctcttagcggccgcgcctggaccagcccctcggccgccgctggctccctccgtctcggcctttctctccctccccctccgagttcctccgggcctccgctctcgccgcctccgcctccccgcccgcccgcgcgcgccctcgccgcggcccctctgcgctcaggtgactgatttacactcgcgccggggtcgcgctcgcgccccgagtcccagccggcacggttccccggctcctcctcgggacaaaaaaaaaaaaaaagggaacggcttgtcccgggagggggctgccctgctcgcgggaggcgggggaccggcgggcgaggtgacctcggcggccgtgcaagccccacaagtttttcctctctctgcagaattgtcgtgactacaatgttgcttcccttttgcaaaataaaagtcggtcgttgtgttgtttgtcctcagaggtccaggggcttggggaaggaggatgtatgtttctccctccccccaccgccccgtgacttctttgggggcttgtttgttgtttgggttgttcttgctctctctttctggggatggaaaaaacaactttgtggggatggaaaaacaaccctggcgcccccccccccccccggggagctgcgggcgtggaggtagaggtggccgctagcgcccagctgtcacacacacacaaaaaaaaattgcggggcgggggtggggagcggagcaaggagaggaggctgcgaaacgccgaggaaagggcgcgaactttattccgactgcagcaaaccgcggcagctctttccttttcgggcactcgggcgtctctgtcccctttgaccagttcctcctccccagccccgcacgccccctcctcccctgccccttccccagcgtcccagccgcggccgacccggctccccgcgaccctctcagcccagctcctccgcgcgccgctggggagaaggcgagtgaggcggaggaaaacccagcggacagaaacctgggacgcgaacgtgctgggagaaaaggccaaaagttgcgcgcagctgggggaaaaaagtttttctggtggcggagcgttttgtgccggcccagacgccggcttgcggcgagggcttccttccctttcccgtggtctgggccgcgggcctcgggctggagaggaaggaggctgtcgcgcccgcgggggaaagaacagtcacatctgtgggtgacactcagccgacccaagtcaccctgccctggagactcagaaacgccgactacagcctaagcgcgcacacgcctgcagctgaacgatatttcttaaatacaggcaaaacacactccccggccgcaagaatggggcgggggtggggggggagcttaatcatcatcatctaactaacgtacactttgtgccaaaaacatctccgagttatgcagatttatcataactacagcaaactttctggttatctaacatgggaggaaggcataggtttcaagcatactccctgagcactaagaaatcagagaatcggcgaagacttggcagaacagcaggtatggttaccggttcctagtgaaaagtgagaatcatcccttcttcccttctctcttcctcaaacggagagagagagagagagagactacttaattgcattcagaggacagaattaaattcctttgaaaatatgtagccttggaattacatggttttattttctttgcagagtccggtcttagtttaatataaattttcacagtaactgatttttttaaatttttcgggagccgctgatgagagtcccaagtagccacagctgtcttgaaaatgtgattaggtggccgggcgcggtggctcacgcctataatccaactttgggaggccgaggcggacggatcgcctgaggtcaggagttcgagaccggcctgaccaacatggtgaaaccccatctctactaaaaatacaaaaattagccaactgtggtggcgggcgcctgtaatcccagctactcaggaggctgaggcaggagaattgcttgaacccgggagatggaggttgcagtgagccgagatcgtgccattgcactccagcctgggcgacagagggagactccatctgcaaaaaaaa

SEQ ID NO: 588165 - DNA, 4001 bp, Homo sapiens
aggcgcgagctgttgtcaaaggaaagtaattactctactttctaaaaacaaaacaaaaataaaaatggagtgactgcccactcggagaaagcttttgaaatccctcctccccggatgtcccaacggcagggctcaggctggagctgctcccacagtctttccaggcacccggtgccctgctgaggcaccgggcctctgaggctacccggaaggtcagaaagaaatgcccctcgctcgcctgcagcccgtcctgttacagcgtgtgccttatctttcatgatcagtaaccaccagcacccatcaaggcctcaacagagaaaacggcaaacacagacctttatttgcaaatgagaggctgcatcagggctgccagggaagaacccggagggagggctccctaacccccgaggccagccccttgcaggggttcagaccttccttagaccccgttggaagccagtaacaaactactttccccagaaaaatgccatacaactttgcatagattccaggatctccccaggcatactacatggacccaggaaaaaaaaaaaaccctccattttaaagaaaagagtaaggggaaaagcctacaaaagagcagggtaaaaagaaaactcttttcctcttctgttccttctcacagggtagggcgggggaggacgggacacacgaagctgcctcttgcagttccagcccaattactctgcccaccaatgcactacagtctcccctcctggttaacttttgcagacaatgaccaagtttaatgtaagggggagaaatcccagtatctatttctgagcagaaagctttcaaccaaaattaaagatcgcaaccactcaaggattgggtcgaacggaggaacccacacgatggacgccgggtccctgcccccggtgggtctcggcgggccgagttctcgccctccagggaaaggaggccgcgcgaagcccccatcccggccctgcccccgaacgagcaaccggtggaataagacttcccgcacgccccagctttattcacagagagcccaccagggccatgtgggtgtacacggttcggggtgcgcatttctccccggatgggcttgtatcacgttgtcactccggcgccccccaaaagtgggaaggaggggaagcacccccgtccctcccgctccaactcgccctcgcccggattaagcgattttcaggctgatttcaaaacgggaactgggtctccccctggtttgggtgcaataatccggcaactcaggggggctcaaagtcagctctgggcccgtaactctgggaggaggccgcgcagagcccagggccgagcccggccttgccccccgccccggccgcggcgcgcggcgacggtccccaggcgcgggccccagcaacggctcgggagcgaggccggcggaacaggcgcggggaaagtggccccgcggagcgcacggccgcaggccggggccgccgcgcgcaccttccccctccgcgtcctccctgggttcccccttcgaaagatggcgggcggaggaaagggggaaaaaaatcccttccgtgagggagggcgcgcggaggccgggctggcgcggggcgcgcgggccgcgccaactccgggctgcgcgccccggccgcagcgacgccccgagtccgggacggaggcggccaagcgggagcgggaggaggggagcggagcccgcgccaccgccgccgccaccgccgccgcgaccccgggcggccgccgcgctttgttgcatcgtggccgcgcacaaaggcggcggcggcggcggcggccccgggcgcccggttcacccggacgcgccggcggactgcgcggggcgctcggggccgcgctccccggcccagcccggcccgccgccgcccgcgccgcccgccgccccgcgcgcgcaaggaagcaagagaaaggcgtacttggcctcgcggctccggcggccgtcccctcccggcccgcgcggccggctcctctttggctcgccggccccggcagcataatagacgcgccggagccgagcagggctcatgcgctgcgccgcggcgcctggcgggagtcgtagtccgcggccgggcccgcgccggggccgcccaggggaggccgcgggcgcgcggactacatgtcccggccccgccggcgccgcgccccgccccgggggcccccgcccgccccgccgacccggccgagagcgggcctggcccggggggcgcgcgggggcggggctcggcgcccgcccggcagggcaacaacgctgggaccccgtgggccgttccccgcccgggcccgcacggctctcctcaccccgtgtcggggacagcgcctggcggcggattttccggtgccccaggacggcatggaagaagcgggcacgcagccagcaccgcagcccccgtccgggcaccccgaggcccgcgggagccaccctcgaaccccggccgcgcacgggcggggcggcgcgcacctgccgggagcccgtgtttgtaaacaaaccgcgcgcctaattagcctggcgggagcgcgcgcgcggggcggggggcggggcgtcggtgcgcgcgggcaggtcggccccgcccggggaggagccgcgctctgccgcgccctccgtgtcaccatctcccccacccgacttgctggggcgcgggcgcccaagttcgctgttgctggagagggcgccaagtccccagagctggcgaagagttaggggtgctcccagctctgcctggggaccttctcgccccaagccccggtttccccatctgcccagtgaggggcgggaactagataccaggttcccagcctgagattccgggagagggccacccctggccctttttctgtatcttgaaaggttcagcccgtggacacgttttgcatcttgttttgggtgatgacgactcgggtttacacataaatcaagttgtgggggggggggttttgttgtttttttggtttttgttttttttttttttttttgagacgttagtttcgctcttgtcacccaggctggagtgctgtagtgtagtgagtggctcgatctcggctcactgcaacgtccgcctcccgggttcaagccattctcctggctcagcctcccgagtagctgagattacaggcacccgccaccacgcccggctaatttttgtattttttagtagagatggggtttcaccgtgttgactgggctgttctcaaactcctgacgtgagatgatccgcccaccgcggactcccaaagtgctgggattacaagcgtgagccaacgcacccggccacataaatcaattttaatccagctgtaacttaaggtggttacacgttgtgtacattagaccccaataaaaacgtcaaaaacaaaacgaggttccttggtgcctgctgaacctgccaactgcaaggtcgagtttccttgtgtgggctgcacccaccccaagcccctggggtccccaggtgtgttccaagttgagcagcagctccactgcctgaaatgcacacatctatgcaatattcacaaagtgagtgccagcacagagacaattcatccccatgctcacccagaaggcaggtgttctgttccaggctgacaggtaaggaaacaggctcagtgaggcaaagggtcctgcccaaggtcacagagccaatttgcaggacggctgagacccaaagccccggggtcttaggaagagtttgcaggggaagccaacacctttcccaatcctgtccctctgtttctgctgggagcccaggaccttctcacactccagggcaaggctctaggacgaggttccagccttgcctttctagttggcaaaatggacaaagtgcagtcctcaggcgcaggaaggtcggggagggggaatatgagaggtgaggatctgcaggcagttcccttagaactaccatcctggttgtgtccccaaacccccggtgcagttcctcaacctacaggcttctgtgttagccaccttggaggctgcaacccattcctgctgtctgcat

SEQ ID NO: 588166 - DNA, 4001 bp, Homo sapiens
cagtaaaactcagcatttttgctgagtagggcaagcctttaagaggcagctgggaatcaaatcaatggctggccccagagcccaagcccaacagtaccaagccagggtggccaagggacctacctaaagagcctcccaggagatggaggaaagaagaaagagggccttgacccaaactaccttcctggctgagattcctccaccgcccccctgcccttggcagtattttggagccaagtgagagacgcgaggtgcaaaccgacagcagtttaagtcaattactgccacattctgtcatgggttccacactcacagccccttttcaaattgtagatctccctcagtactgaaacactctctctctctgtctccctctctctcgctcttgctctctctctctccctctccacctctctgccttctctcaatatccccctaactccaggggagccatggagaggcatatttagggagagactctctgggggcttccccgcctgaaatggggaaagaaagacgaatctgtcttaggaaagtgccccatccatctccttccatatcatccacagccgccccagatgaaatttcctctgagaccctttgcaactgtgatggatgagcaagtccccgaggacgctttctcctttcccctgagggggatccatgcaaacttgccagatcctccccaaaaccaacagaagccggaggggctctgttgattgcaaacggggatgcagggtaaatccctatcccagactttccaagccccagataaggagcccaccgctgacttccccctttctctgtcacccactatccagtgtctccaaattcccatcagaatcttggagtctgcccagtgtagaatttaaagtgacagcgtctcatttgcctcgggggttggccatgtctctttcatattaagctgtgggtcccagtgtagcaggattccaccgtttggaggaattttccttcaagcgtaccaacattgggctaaataaggtgccatctacagccccataatcctccccaaaccccaagcccagagccccaagaggaagtccacagcgggtttcccggtgactacgtgatcctatagtaagggtcccattccgtgtaagctggagagacctaattaaaaagacacacgagggcacacatacaaacacatacgtacaaacatgcacacacacatcgcgccgtaagtaggttataggacctctctctcttcacccctcccttacacacacggacacacacacacaccacgaacacacgcatcaaacgcaaacgacgccgcacacgcaaacacactagcaccacatcaagttcccaccatggtgcacacgtcgggagcgcgcggggacacacacgccactcactcaaacccgcaattagccctttgagccccaggcacaggaaccccctccctagaactggagaagacttggaggcggcggggcggccaggtgaagagcggacaagggtgccggtagggggaggggcagaggagcgcggggacgccccgaatgcggcccggggccgggtccaagggcagcggggctgcggggcgctgcacccggcgccgccttacctggagtcaatgtccgtctttggcggagagctgcgggaggacgctttttattcggctcggtgggaacttgggagagccctgcgtgcagctcgcattccgggcacggcgcggggactgcaggcgtgggggtacctggctcctagcagcctggctcatactcagccgtaaagtccccttcgctggtcccgaggacaggcatgaatcccggctccggaaggcggtcactactccctctgcctcccggctctctcgctctcgctctcgctgttgctcgctcgctctctccctctctcgcgggttcgctcgcctgcgctctcctcctccccgcgcgccagatcagtttgcagccgtggggtccgggagcgaggcggctggcgaatggagagggaagtccaagtgcgccgcggtctccgggcggggagcggcggaggccgggctacgccgggggagggacttagccggcgacggccgaaaatgaatgggggagcggcggccggggggcggggagggaggagctgaacgccggggttgcttccgaggagtgttttgtacatctttaggcggaggaggaggagaagcgagaggaggagagacgggaggccgcctcgagggaagggcggcccgggtgggctggggctgagccgtagggagtttcgtgggtctggggcgtgtagggtgttgtgtctatgcgcacgagcatccaaagggaccgcgcatacgcgcaaacccggaatcctggtgcccttaagcgtgactgtactgtgtgtgtcgcgagtacctgagtgtttctggggcggcaggtgtttccacggccgcgtggatccatcgagtgtgggttttgtctcgggagttgcccgtgtgggtccgtttgtgtctgcgcgtctctctgtgagtgtttgacactgtttgtttctctcggtgtgtaggcgagagcccacgtaacctcccagaatgaagcaagagcttctctacgtaggcaggatgtaggagggagaagctgaggggacacgaagttctctggagaccaccagaggcggggaaggggcgagggtacagggactaagacatgaaaataaaaagcaaaatactctgcaatcagcctgaatgcaggctggggctgctaacatagggcctcttcctgaagcagaaaataaagccctcgtatgataattcccacacagcgcacatttggtatgtttgtttactttgcttcccttctgatttaaaccaaatcagcaatgcagatccctagtcccctgaagattaggcaagaatagaaagcattaaggctaccagatggaggggcaggaagtcataggaaaaggtgttggaatatgtaaaagagccagattcagtagaagtgcaggctccagagaggttggagtcctgtagctgtctggtcttggtgaaatcacttaccccttaagcctcaattccttgtctgtttaatagaataataatatatctacccatctaatagggttgatgtggaattgtaatgagttaatatatgcaaaggcacttagactgctcatgagttaatgtatgcaaaggcacttagactgctccctgacacctagtgagtgctcagtgcatgttgtctgcttttatgattgccattgtatgttttttgtttgttttttaattcaaaggatgataagagagagatgtgaccaccagggaggcctagaacaatctaggagccagtgaactaattggaggaagaggagtcttgaaacaaaatggaagagaaatgtttgagtgatgaactgggaactcgggaaaaattatttaatcgacaaagagaaagggagaaagagaggagaagacatcgagctagccagaatgatcctgggtctcagaaggtcaggactgaggggagaggaaagggagaggaggagcagccagtgcagagcttctcagccttcactggaatcccaatgaggaggagtcagcaccacggacagctctccagccacaaacccagtcagcgatttctattttcgcctggtggaaatttctcccttttttcttgggcaactttctctttcccttggcttctggtccaggttcaggtcttgaacacaggttccccaggtcagttctgactttgattctgaccacgaagaaatacgcccaccacacacactccttctcccacccaccgcggtatgaaaccccaggtcactatctcttgcctctcctcctttctttcttttctctctctctctttctgtctgtgccccattccttcctttattcgtccctatctttctctttgtttccccatcatcccccagctgagatctacttccatgactgttagtaggcaacagctgccctgctgataatgcagttctgaaatcaatctgagacaacgtagtcaggcaacttcaggtgaagacca

SEQ ID NO: 588167 - DNA, 4001 bp, Homo sapiens
aggtccaaatacaaagttacagaattgagttgactaggaggaagctgtgatcaccatgcaccatggactaagagcactgagaaggcttctgaaaaaccacagggcaggaatccagaggtaggagagcagtagaactggtgctggttttggtaataatcttgccctagggtgagatttatttgctgactggatggatagaggaaggaatgtgcaaaagacagaaatctactctaatttggtggaagagagggtaagacccacctcccttcaggcaaaggagataaatatgcatacggcctcagaggggttcaaagaaggttccctagggtagtaccgaaactagcaccaggcctgccacctgcccgaggcttcactctttccaccactcaaatccagtcctgatagctacttttaaggtttccatgacattctcacccccattagcatcacttcctccctccaaccgccgaagcaaagcagcagtttcctcttgcctagtcaatgactccctgggtcccacccctgaacattaggaagcttggaggagttactgccttgttccgagcctccagtgcctcatctgtaaaatgtaggtaggaccccttcaaaggcgtggtcaagacagaatgagatgacagacatttaagtactttggagtttgcaaatttttttgtccattatgcaagttgattacaccgcgttatccaggtttatttttgtcatcattattgttgatagaggtaacaggtaggacgaaccaggagcttttgggtgttgctgaaaaactgaacccctcccgagcccagcaccctatataagatgtgtttattacaggtcactctgggtaggcgaagtccccagccagagccctcaggcttcacagcaggggtgaactgcagagtcgggttgggagaaacaagctgtttaatcaaattgcaaggaaatccccaggggccacagagaagcccaaggtgacttcgactctcccaatctcagcagctcaggagaatggtgatgacaaggaggtggccaccctggagccgagctggaagtggaggtggcgagaaagcctgggtgaaggggaatcccctgatattctccctacccccaccgtttatccagctgaagcccttaaaccagcctgaagtacagtcaaggccaatcctgaaagcgaaaaagagatcaccgcaccagaagccagaaggggttaggagcagggggaagaggcgaaaggaggaggggggctttgagtccaggggttaagggatacggtcgcgctggattttatcagtgtcagtttccacaggggcgggagctggggcacaccctgcgctgagaactggagcagctgagcctttcatgccagccccagcttcctcaacagagcaatggaaggggcctggggagcctggatccccttatcgctaagcattttacccactatcttatttatttctcacaactctaataaatacgcgctattattattgttgttgtccccaaactacagatgaagacactgaggctcagagttacgtgactcacagggagtagattcgaactcaggccagcctgacttcagaggccacacccttaaccgcctagtcctacagccaaagccaccgaggagcctaggctccggggccgggtgtcgagtccgcccagccccaggctccccagtccctgccgggtcccgccaggcgcgcccggggtctccggagccctcgccttccggcgcccacacccgctcacccgcagctcctcggcgcgctcctccgcccggcggatgcggtgcccccggcagcgaccgcccaaccccgcgcaggcggcgcacacgggccgtcgctcggagccgcagaaccagctcagagcctggccgtgttcggggcagagtggccccggcccgggcccggacccggaccccggccccggctccgcgccctcggcggacatggccgtgcgcccgccccgtgcgctccacctgtcgcaggtggcggcgggcggggcctggctgaccccgcccccggccctcccggtgcgccagcgcgccccgcagctgcgcctcctcccacccaacccgcgctcccatcccgcccggggcagcaggtctctttaaattccttgttgaatgaaatcgcgattgtatgcgtatttgttctacaacaaacataaaactccaaatattactgtgaccgtaggaaactttattgagcacttattaagtgccaggctttcgctgagagctttgcaagcgttctgttatgtaatcccgaccactgccctttttgagaggcagctttagatgcctagcttcaagcaaggctctgctgagaaactgcctggttcaaatcccgtttggctgctcactgggtgggaactccagctgtaaaatggggtgagagtacctgcctcccagacgtctgaggagtaaatacgctaaatacgtaaaacaatatctggaacatagcagctgcaatcgctaagtgtctactaacagtgcgaggaaagtactattaggatcccatttttatggaagttaagtggcttgccaagggtcacagttactaattggtagctatgagattggaacctaggcagtgtgacttaaggttactataattaataattttttaaattgaacattgaggcccagtgagaaatatctgtattaggctgattttcccaaagtatttacatccaaactttttgaatttgaatatttgagttttctttttaaactagcattgaaaaaaagtaatgcctttttatttcgaagaaaacaaaatatgcaaataagcatgtggaagaaaaatccacccactcccaccccagaaagaaaaactgctaacatgttcctgagctgtttagggcttttcccaccctcaggatcttatatattagtctgagcccagattgagccctctgctggggatccagtctagtctgtctgggcatacaaggagaacgctgctctccagctctaaattcttcttcttcttttttttttttatttttttttatttttttgagatagggtctcactgtgtcaccctggctggagtgcagtggtgtaatcatagctcactgcagcctcgacctccccagctcaagtgatcctcccacctcagcctcctgagtagctgggactacaggcacatgccaccgtgcccagctaagttttgtatttttcgtagagacagggttttgccatgttgcccaggctgatctcaaactcctgggctcaagccatctccccccttcagcctcccaaagtgctgggattacaggtgtgagccaccgcgcccggccaccaaccccaaattctttcttaggagtcttggcagaaagctgggcactctctcaaaaggggaagggcccaggccttcaggtgtcagagagtactctgagtgcatcagaactgaacacaggcgggagctaaaccgaaagagaaacattacatcccatagctcacaggggctctagcacctctactctgaagcttctctaagcaatggccacacaaaggagatagaaccctttccttctcagccactactgctttagcacctgaggggtaagggcagctaacagccccagagctacccagagcggtacacagtggtgtcatcatccaatggggacacattgtcaccccagatagacaatattacaccatatgattagagagaacactgagtgaaatatagtcattggtttcatcccagctatgcagcttacagctatgggatcttggtcaggttactcacagcttctgtgtctgttttcttatctctacaacagaggtgataataatactatcatctaccttagagggctacttcaagaatgaaatgagatcttgtctacaaagtatttactttgggtgtctgatatacagtaggggataataaaaggttttattatatgtgtgaggatctgtaaatacagttgtagcaggtttcagaatgtaaattgtgtgaggttctttggcgacaggggtg

SEQ ID NO: 588168 - DNA, 4001 bp, Homo sapiens
ataccagtccatggcttgttaggaaccaggctacacagcaggaggtgagcagtggggcaaaggagcattaccacctgagctctgcctcctgtcagatcagtggtggcattagattctcctaggagcatgaactctattgtgaaccgcacatgcgagggatctagattgcaagctccttatgagaatataatgcctgatgatctgaagtggaacagtttcattctgaaaccatccccaccccaatcctggtccatggaaacattgtcttccacaaaacctgtccctagtgccaaaatggttggggactgctggtctatgtgatggtagccgtcaagcaaaaatacatagtgtttagaagcccctaaaagaatattctggaaccaccctttataaagattttggttcttattgacttatcagtagcataatctatccatataaataatttcatagttttctttgtctttcaattgctgcagaggagcaggagcttgcagagaggcaagaatgttattttggcctctatctggaatgctctttcctcaaatatttgcatggtttgcttcctcacttccttcaggctctgtttgagtgcagcctccttaagagaacctttcctggccacattttaaaatagtgccccataattattttttaattctcatactctgctttatttttttcttcataatactacctacctgaccttacacattctttcattggttcattcattcattacttgcttctcccactagaatgcaagctctaggaattgtcttaccgtttgctatatctgcagtgcctatcatatgtttagatgctcaataaatatttgttgaatcaatcaatcaaccaattaattaaagtgattgattgccatgttgtaaatggtacactctgacttcttcagagaaagtgaggaaataatttttattaagggctagtagaaagaattcagaataagtctggacaagaatcatggaacccaggtcctagccctagttctgccaccaatttgaagtcacttaatttcagtctctctaagccttagctgctcgtctttcaaaaagaataaaggcaggatgctaaggtagttgagtgcttgtggccatgtaaaaagatcacagatcagaaatacgagggtgctaaaaaagaatgacatcctaagtatgtgtttatatataatatatttacatgtatacatttatgacaaaatgaaaaaaattgaagtgataaacaggagaccttaataaaaatcctgtttctctctctctagaactgtgacctttggtcagtcacttcccttatctggacttattctcatatataaaatgaataggtttgattagatgatctgcagttacttttcagtattaaaatatttctagatataagatcattatttttaaaacattacttaaaatgcatattatctcaataatgacactaaaaattgtgaaaagtcagctcataaatgtatggtagaagtcactacaacaacagattttcagatcacagtattagattgactcctaaataaccctggtttaactgtgtatagtctatgaaaaacacaaagaaaactaaacaccaagttaaaataagcaaaaaatgtcaagaaagtttattatctggagtttcttttgtgcttttttgaagaggaatttgaataatcacttaacgtaaattttaataaataacaattccataaaagctgtcatgttgttagctactcatcaaatcaaaatgcttccatgactttctcattcagagatgatactattcacttgctgttctcagaagtagcaagttattttcaagttaacagaatctgttaaatttaactcttcattcgtcataactaagatgcattgaaaaatgaagatagcttgttttacttacgtttgctcctgtccccaggttttccccaggaagattaaaaaacaaagtattcccaaaaggcccatggttggaggtagcaggaaaccacggatataacacttttgaggatagtctccttttaaataaactgaacttgaagaattcagataatctggttaattattaatgtcagaaaggtgaacctctaagtgggaaaactagaattggaactaaaacaccctttcatgcccaggaatacagatagggagtactttacaggaacttacacccagggaatttatttttattaatacaaataaagggaccctaaaatgggaatttggcactatgaagagtggctcaaagctagaaaccagtaagcccattgctttggcctttcttctcttgcccagggcatttgctttgatgttgcatcatctgcaagcatacatctggcaggtccactctaatactgatgaagacccacctggactcagtttcacactgaaatgattttagaaggggcctggtttagacagggctcacaagatgatctttttttggtgacctgaatggcagtgtccttggtgctgcaaatggtctgagcataacctagctctgcaaaggaggtctagggaattgttccttggtctgtctcagtctagagaacactaggtggaggaaagttgtgactggcaatgaaaacgccatgtggaggatgctgtcgtcattctctaagtattggagaatagatattctccaatatttattaaggcatataccactcgttcaaagtttgtctttattcagatatagaatatctttcttttaaagaaaacacatgttatacttttcagtgaggattttaataattttaatataagagctccagaaaaacaaagcttcctataacaattgagtctagtaattaattcacaatatactaaaattttatctttatacttttttttttttttttggagacagagtctctttctgtcgcccaggctggagtctagtggcactatcttggctcagggcaacctctgcctcccaggttcaaggcattctcctgcctcagcctcccaagtagctgggactacaggcatgtcccatcacatccagctaattttttgtatttttagtagaggtagggtttcaccgtgttggccaggctggtctcgaactcctgacctcaggtgatccacccaccttggcctcccaaagtactgggattacaggcatgagccactgtgcctggctgatttttaattaagttaatttttatgatgttttatgttcattagaatttttttatttactaccttctcttttttagtactatttttaccttaatatataatatgtactcttctttaaaataataaaacagatgtctctaaacatatttctataatgagatatttatgatatataaatgagatatttatggtcacattggcattctttgctttgaattaataaataataaaccaaaaatatttataaacactttaatgctgaattcactagggaaaaaaggagcacaaagggaaatttgatatacaaatttcactaaaggtatctcttgcatatgtcattgaaatgacaaacatttgccactattgtctgatcatctagcccatttatttcaaaagggaatctgtgaaatgattaagctgggttgcaaaagatgggtcaagttaaaacaaacagtacttttgccatcatttttgggaaatgaaatttaagagagaacaacaacactcaaatcaaggtaggtaatatttgtattttaagtgcaaataagtttgtttgcttgagctatagagtaaatactgataaccaatatttgcaagccattgtcctgtttctctggtagaaaacatttagagaatgatggatctcaaagattctcaacagaactgaagtttaacaatttatagattctaagctgtgtttagtcaaaattttttatctaccttctaaatgtggctcacagatgaacttttgaggctgggcacgctggctcacacctgtaatcccagatctttgggaggccgaggtgggtggatcacctgaggtcaagagttcaagaccagcctggccaacatggc

SEQ ID NO: 588169 - DNA, 4001 bp, Homo sapiens
ggaagagcagcccgggggctgcaggacaatggcccaggcaagagcagccttggagtgaggctggacgcccccaggtcccagcagggcacaagatgggcatatgccagagaggatctcccctcccaaatcccaagagccgctgaaatcggcccagtgcccactgcgtggactccagccaacagggagcgccgggcttttaaagaggcggggtgggggcagagagggccttggtggtactggcgccggtccagagtggacagaagagtcagagaggggtctgagacatttaataagtaggtaccactccacccactgtcctctggggcagccggcagaagatcccctgccctgggtggcagggccctgatctgaggctggtttcacggaggacaggcagcgggcaccccactggtggggtcgtctctcggggcactgacttctcagcactggagctgtgtgccggcctcacctcctcacttctgcagcagagacgagactcagccggtggcagtggcccccctcaccacgccgccatgcttgccccgctgtgcactcaccgtccaggacgtggaactggtctgcagcctcgcagaagcctgggggcccaaggcaggggtcaggctggacatcagcccagagagtgggggtggctgagctggggacctgctggggacactcaccgtacttggggaagtagaagatctggtcctcagtcaggtgggcctcctggacccgctgctcaaacccactcaggaccgagtcgctcacagggagcgagcgggctgcagggcagacagggttcctggggtcctggcaccaggcggcgtggagggctctggaaacggggtctgtgtgtcccctgccccctcggggccctctccctgctcccacaccaggcctgtctgtcactactccctgggcccctgcttagcaggaggatcaggatgggagaaaggaagtgtgtccccatgggctcacccagcccctcggggtggcccagtgagtgtgcagagcttgagcgcctgcctggtcacagaggctggcccccacataccgtagagcttcactgacagctgccccgcccgctccaggtacaggacagcgaaactctggtagtcggtctcagcgacaaccacgtgcacagcccctcgggcgtctcgggctggggcagagccacagtagccatgtcagagagccacagtggctgcgtcatcccccacccacatgccctgcagcccctgcctcaccttgaagcaggaagcggccgaggacccctgtgtctccatagagctggcgcacctgccagcagatcccatccctgggggggcggggaggaggcaccacaggctgggagaccccaaccaggaatcctagtccaggccacagccggggtggggtcaggggccagagcagggctgaagtccgggggctgagaggagggttggggttagggtgcagggctgctctgggactcacagctttcggaaggtactgacagccatggctgtgccctggggagccacatgcagtgtggtggcctcggcccggtggccctgctcctgcaggaaacggcaagcggagcccacagccacaaggagccaggtccctgcaaactgggggcagaccatgggagaactcgagggcactgtgggagggcccctcacctgcttccctctacaccccccacaacttcacctgcttccctctcccccgcaacaacttctacctgtctccctctacccctcccacaacttctacctgcctccctctaccccccccaacttctacctgctgagcatcaaaattggccttgggctggatggtgctgatgggggatgcgggccggcgtggcctctgaggcttctggcccagcgagccagctgccaggagcagagtcaagagggtcgcagtcccagggggcagcatggtggcggcagcagggtggcaggactgtgggaggccaagggtagcaccaccaagtcccaggacagagtctactctgctgtcacagagcccagcccaggaagtccatgtccatccgttgcctccccaccccccacctccagcctcctcgtgagcctagcttcgatctgcacttcctggcagggccctggcaccatgtcctatgtacaaagtccgagttgacctctggctgtttatccatttctcctgcacccctgatttccaccgacagtccttagccctttacacgttatcttccttaaaccatcacccagtggtcttatctccatggccaacgtcacggggttcatgaagccacttgctcagggcccggcaacagggagcgccggaggcgggtcccgaaccagcgttcgttgagcctcgcctgcaaccccgcccacgaccgccgcccgctggccacaaggggcgctgttcccaatgcgcccgagtgcgcgcaggcgcacaaagaaaagccggccaggccgccggagcccaaggcgcaggcgcacgaggggcggatgcgggctacccgcgcgctctgccttcctcggccatcgatgcctcggggctcgtggcgtcgggcctggcgggctccccgttgggcgggggcggcggtccgagcggctgcggcagcggaagcgggtccgggtcgcgcagggcgggggcggcgcagcgggcggaggcggccgtggtgagtgcgcctgcggccctcgggggtcccgccttgtcgtccccgcccgccttgggcgagtgcaggagccccgaggccgcccgtgcgctcgtccccgccgtccgccccgagcccgccgggcagagctgctccagggccgcagggcggaggccactgcctggccgccccgagcttcctctcggcggaagcccgtccccggacggcgcctggtgtccccgtgcctcgcgtgcggcggtccgggccctggcgggctgaggggcgcccgctgccggccgcaggaggccgggggatgacgcggcggagaggggccggcccggcccgcccggagctgccgggtccttggttgggcggcggtacccgggcgtcccctgcagacacgcagccccgtggaactcccggcgggacggttggggctggaggaacaggacgcccgctctcggcctcccttcccgggcctgggctgagggcagccgttggtgggtttcagggccgcctgggcagaatgtcacgatggacgagggcggcacgcccctgctccccgacagcctggtctaccagatcttcctgagcctgggcccggccgacgtgctggccgccgggctggtgtgccgccaatggcaggccgtgtcgcgggacgagttcctgtggagggagcagttctaccgctactaccaggtggcccgcgacgtgccccgacacccaggtcagtggcgtgtggggcccctacccacgttctgcagccagggccccgggcccctgcgcttgggggtcagcctggctgggggcccgccccgcggccccgcgtgtccatgctcacccccccacaccctgatagaggcctgtcaggacacagcgcaggcgcccctcagagcttggaggccagagggttcattgggtcacttggggggtggggggtacaggggtctctgtgagctacagggttgaatcccccagccgaggcctatgccatgactagtgggttccaggggcaccacggggcctgccaggactgctggggccacactcggctcatggccgtgactgcgaggaaggcccgggcccaggactgacaactgcccacccgcagcggccatgtcctggtacgaggagttccagcggctgtatgacacggtgccctgcgtggaggtgcagacgctgcgggaacacacagaccaggtcctgcacctcagcttctcccattccgggtaccagttcgcgtcctgctccaaggactgcactgtgaaggtgaggacggccaggtgtcctgcacaccccacccagctctgccgcagcacggaggtcccaggacccaggcgttccaaccaggtggtggtgggggggggggtgg

SEQ ID NO: 588170 - DNA, 4001 bp, Homo sapiens
ccaaaatctttcaaagagacaccaaaggggaaatggtttgcgtaccacacacaaaagatgttttcaagcctctctgccgggaggtctcatggtagttgcctctggaatatctcccttcccgctccctcctttttatccttatcagagaggtgggagcgctgggcctggccccaggagacaggggactgggctggatccagcctctgtcctccctagctgtgggctcctgggtgcattgcttaactactctgtgcctcagtttcctcatcttcaaattatagctaacaatcgcaccacctgcaaggggctcttgtgggaattctaggaaataatccccatgaagtgcatgagagaggcaggcacacagctagactgttgacgtgtgagctactaatatgatttctctctgcttccctcacccacctttcctttgcaccccaccccagttaggagctctgggcagtgcctcctataggtcagtatgtgttttctaggtcccaccgctcagcggcagctccacccactgtcccagacagcacagggaaaaggccagggatggacaggcagaactgggaactttcttaggaggggacaacagggcctgggaccatgtttacccctgccccctctaaggttgcatcctctcttacatgggacacacaaagggcagtgtcccccgggcatcagtgctctgagggcagagccaagcgaatgtccccttagggcctgccgatgtgctggggaaacgtggttccccacccatgaggctgctgcttgctccaagcctgggtgccatggccaagatggctctacctggctgccagggtcacagagcagaggattcagatgtctcacttcctgagggtctccaggccaggccctggcaacacagctgtgaacagccatgtggttcctgccctcatggagctcacagccctgtgtgcaaagcaggcaatcagggcctaagcatggggtgcgaaacccagagtgggcagaagaggacgggctgggcaccagagaggacttcccagaggaagaggcactgaagggaagggctcggatgggaagaaaaggggttccaggcagaggccacagcctgggcaagggcctgggagagaaaagtggtgggttccaggagctgcaggcttcctcgcccacctcccccgacaggtgaggtttatcgctcaaggccacatacgccatctcacgtggtccccgctgccacctggagaggtcagagggcaggaactcttactcccaattcacactgggacaattcccagctggactagaaccccgatctcctgactcctggctcaggtgagagtcaacatgcaaggctgggcccacagcagccctggcatttgaccagcagccaggtaggcccaattttcatcacctgcctttaacagatgaagaaattgaggcttagggagagcacaacacccctcaactgccgcagtttttgtctgtctgggggccctaggacaagcctgaggtgcggaaaagccctccctgggtggggcaagaaacagagctgggaacgggtgacttggggtgaaggaaggaggggagcggggatgggttttggaaatccacactgggcagggaaaggcgaaggaatgtgggtgagacggggtgcgccagtcccggaggggcccagggcctcaggcagccccctccctccttgcctcccaggtgagaccctaacttcgcggaagacgacacccctcagctgggcggggaggagggccaccgcctcctggccacccaatcagagacattcccagtctgatggcggaggccgccagggccaagggctcccagggccttccccggggaacccccgagacctgccccggactcggaggcccaccgcgcatcgcccgcccccagcctcattagcaccgacacccgtcgtcctcccctcggtttccgatggctccagaatttaaaggttaaatcctaacctcgtctcagcagtttctcccggctttgcctacccagcgccagttgctggtaattatatgcatctccgagcagccaatcagctgtcagactgacagatactgatcttttcgttttatttttagctctgtgcttccccctctagttgcaaaaaaaaattctgtttgttctgtgtgctgctgcctcgctcccagccctgcagccggctctcatctccgccagccaggcgggagcaggcagccgccggggctggagcctgcggtccccgcccgaaagcggggaacagaacgtgcccgccgcccccgagctgcggaccgccctgcccagagcaacccccggggctgccatggggaagggaggaggccggggcgctgtgggcaccttggatgcaaacacccgaggagctgtgctcagtcttgggggccacgcacgggtggaagcaagcccgtacctgcgggctgggggcttggagagaaagacacacacagagacagcgagagacagagagacgtacacaggcagagacaagctagactgagggcggaggggaaaaaagacaagcactttcccccctggaagcactcgtcccccatcccccagaaccgaacagaaggggtcaggaatggcctcagccccgccctggagtggggctcagaggggagtttccagccccgggccccccagagctcgggccgggaacctgggcctcccctcccaggtctgctgcctcatctgccacggaagggcgagtgaagtgctcttcggggtcatttgtgagttgttctgcaaggttctgtgggccttcctggagactggcaggtgtaggggcctggccggagggaggccgctattcatacagcttctctggagggagagacagcaactgagggccagggaagctcttaggtcccagtgagtctcccagacagtggaggggtctgatccaggggggccggccctgaagagtgatgggaatgattgtgaagtttccttccatcctcgcggctctctacaatttgcaaagtgttcactttgccctagtggcctctccttctgccccacagttagctccagaatggagtgaaataggggtctgggaggcctggggaggctcacctgttttctgatgggccctggggccggcgtcgggggagtgtggcctaatggttccgtctttgaggtacaactcacctggttcaagccccagggctgctgtttaccagctctgcgaccctgagtgaatggctcgagctctcttggccccagtgtccccattgggaaggtgggcccccaccccaccctgcacccccacagggtggctcagggccagaagtcactccgtctgggtgctcctcccggccccggcctccacgggcccggcacacttgtgagcaggtattattagcttctccgttttgcggatggggaaactgaggttcatgtgactcgtaattggcagaactgggactagaaacacccccccacttttggcttccttttctctgacaccacagatggcgcgctgagaaaaaagagaagagcgggagaagggaattaggagcccgagagagatggagggaggcagaagcgccgtgatcaattacttgggctataaatttctgctgttttgcaaagtgagcacacagcctccgagaggcagagctccctgggcaggctctggagaaaccaaacagagccaagccctgcagcaggcgcttttgatggtgggaaccggggagggagaggggtcgagctcaagggtgggtgggacaagctgggggtgcagcagagggggccaggggagggccagaggagaggaaggaaacccaagtgtcagtgagcttgggagctgtgggagccccctggggagggatcggcttcgtgcctccccggcattctctcccgctgctgggggtaggagaaccaggcctgggcacaagatcgtggccccctgccactgcattcgaagctggtacagggccagggcgggggcgacggggggcaggaggccctttgaacctcaccttccttat

SEQ ID NO: 588171 - DNA, 4001 bp, Homo sapiens
tggggcaggagaatcgattgaactgggaagtggagattgcagtgagcggagatcgagccactgcactccagcctgggcaacagagcgagactgtgtctcaaaaacaaacaaaaaagcccaagaagcacatagataacatggtttcactgttgtaacattgtatctgtactttgctacacatggataagtagctataattgtttggacaagcttttgctacaatgtttgctgggattgttcctgtcttctttgtagttttctttcatttttattatgaaatcaaaataattgaaaaatgaaattaaagcacacagaaaatgctcaataaaaaagtcaaaaaatcaggaagatcatgaagttctagaggtctaagttaagagatatgaggcttgggccgggcacggtggctcatgcctgtaatcccagcactttgggaggctgaagtgggcagatcacctgaggtcaggagttcgagaccggcctccccaacatggtgcaaccacgtctctactaaaaatacgaaaattagccaggtgtggtggcacacttctgtaatcccaactactcggggggccgagggaggaaaattgcttgaacttgggcagtggaggttgcagtgagcagagatggcgccgttgcactccagcctgggcaacagagcaagactccatctcaaaaaaaaaaaaaaagagagataaggcttgccttccataggcttgaaatttacctaagcaggaggtcagaactcagtttgctggctccctcccttctctgggcctcagtttctccatcaggacaagatgtttggacctactggtctgtaaaggccctttcagataagacatctctgctctgcctgcaggacaactaccgtgggccacaacctgtggccctccccaagaccccagctcaccgcggtcctccttctctgccgctgcctcctcctcttccaggcgctttgcctgttcctcctgtgcccgctgccgctccagttttttcatcagcttgagatccttccatttttttttctcctctttctctggataaaagaacatcctaattggccaaggagacagttcccactcattgggtcagcctggactctggagagctgctgggtgagcagccagagggcagcaagggagcctccccagggctcccggcccctgcctccccactttgtgtgctgcaggacccagagggaacaaagttggtgtctttctccagggtttgactgagcactggtggagtggcctatgggaagatactcttacccacccttacttactctgttgcttccattttcgccactcaatcctttggccgtgttcaccctggagaaggagtggtaggaggattatgagtgtgaggctgatggtcacacctggagggggtccgtttgctgcaccatagccagcccctccacacggggcggcaaggaagccaaggaacctctgcgaactgctgccccagaaagcggcaggagggcagggacccgctgtatccccagcgcctgggacccagcctggcacacagaaagcactcaagaaactgtcgaatgagttcccacaaaacagaagagaaaactgaggctcagggtacagcactgcccacagtcgccctggaagtcagaaaagggctccagaagccacgaaagggctccggattcagcatccggaggcgagcagggtcccgcctccgtaatccagcgggggccagggagccgcagggggttccggagaggacacgggcgctgttcccatcctgctgaggctcacgcggcaccttcgggggcttccggcctgggatcagcgggaagcaggcagcaggaggcgcggcccggccccggcgaaggcccccacgccactggttctcacgcctccaccatgctgccctgcacggggtcccgccgcccgcacttaccgggccgcacggccgcttcctgccgcgctccgccatgttccgcacacaccgtcggtcccgcctctgccaatgagactcgcctcttccggccacacctccattaagctgtccaatcggagagccaatatcgcccaggggcgtggcctgggcgcccgacgggctgcaggggtacgcgggctggagtaggttgggcagagtaggtgtccaaataggcggcatcgcgggtactgtgctgaattttggatggctcggagcccccctctgagttgggacaaatacaacactcagacctctgagtagttcacttgtttaaaaataattttttttgagacagggtctcgctatgttgccgaggctggagtgcagtggagcaattctagctcactgcaggcttgagctcctgggctcaagggatcctcccaccttagcctcccgagtagctggaaccacaggtgcgcagcaccacgcctagctcctggaaggctttatacatggggaccctggggccttgagctgtagtgtgattcagagctgaaaatgagataatttactccaggtttcttatagattcgttcacgtactctttcttttttttgagacagagtctcgattcattgcccaggctggagtgcaatggcgcgatctcggctcactgcaacctccacctcctgggttcaagcaattctcctgcctcagcctttcaagaagctgggattacaggagcgtgccaccatgcccagcaaatttttttgtgtgtgtttttagtagagatggtgttgatgttggccccgtgttggccagcctggttgaactcctgaccataagtgatcctccagcctcggcctcccaaagggctgggattacaggcgtgacccactgcacccggcctttttttttttttttttttttttttttttttttttttgagacagagtttcgcttttcttgcccaggctggagtgcaatggctcgatctcagctcacaggaacctccaactcctgggttcaagcgattctcctgccttagcctcccgagtagctgggattacaggcatgcaccaccacgcctggctgattttgtatttttagtagagatggagtttctctatgttggtcaggctggtctcgaactcttgacctcaggtgatccgcccacctcggcttcccaaaatgctgggattacaggcatgagccaccacgcccggcctcgttctcttttaattaacagactatattagttgggactacaagtgtgagccaccatgcccgactaatttttttttttctttttgtacagatagtgtctcactatgttgccagggctggtctcagactccagggttcaagcaatcctcccaacttggcttcccaaagggctgagattatagacttgagccattaatgccttttattttttgagatctagtctcactctgttgctcaggctgaagtgcagtggcatgatctcggctcactgcaacctctgcctcccaggttcaagcaattctcctgcctcaagctcccaagtagctgggattacaggcgcctgccaccaagcccggctaatttttgtatttttagtagagacgggattctccatgttggtcaggttggtcttgaactcccgacctcaggtgatccacccgcctcggcctcccaaagtgctggaattacaggtgtcagccaccgtgcccggtctcgaacttagatttttttttttttgagacagtctcgctctgctctgtcgcccaggctagagtgcagtggcgtgatctccgctcactgcaagctccgcctcctgggttcatgccattctcctgcctcagcttcccgagtagctgggactacaggtgcccgccactgcacccggctaattttttatatttttagtagagacagggtttcaccgtgttagccaggatggtctcgatctcctgacctcgtgatccacccgcctcggcctcccaaagtgccgggattacaggtgtgagccaccgtgcctggtctcgaacttagatcttatactaaatttgttgtgatttttgacaggtttattttgtaggcatgactgattaaga

SEQ ID NO: 588172 - DNA, 4001 bp, Homo sapiens
aaatacgtccacaacattctcaccccagaatggctggcccagtgtcccaggtgtgcaggagacaccgcactagtccctctgtccattcacctggaccttcatggggtttggtgtggggaggttctaggagggccatcctggagcctaaggtcaagctcaaaaagggtttggcttccccaatggcccacagactcctgtgcccaccaatacaacttgcccacccacaagctgtgccgtcagccagtactgcctcttcaggttacacgttaacatctcataaagtacaattccaaaaaaaaagtagcccttcatttatttgcctcagaactgagcaccgtaagttgcaggagatggttgcgtgtgtgtgtgtgagactgctgtgcgtgtggttgggtgtatgggggcagggtgatgtcagcaagtctatatcctcctcttttaaaacactccactcccaaattcattcactcatttagttccatcctaccctctcccaaagcgattttgggaacctccctcctccccatttgtgatgctggaactttggcctcctccctgggtgcacccctccccgtctcattgttgacctgttgagaaccccaggtttttagcctcttcttgaggccacccaccccctgccccccatgcccggtcttgcatcccacttacaggcatctcgtgcacggtgggggctctgctcccgtaagcctggttactggtcctgtacacggagacagccttctgggtcctggtagatgagaaacactctattttcattcatttactctaattctgcacaagccacagccttgtatttggttgacggcactcccctggaaatgcccccatggaaagagcaatatgcccgggctggtgatgtggcctcgaaggcagcctctgggagtacctggctgatgaccgttctgaatggcccggcctccccggccccctctgcttgccactgtccctgctcttccaaggcaggccaaagccctaaagagcaggcagccagcaagtgctgatccccagccctggcagggcctcggcacatgctgcaatttctgggtaacctagcttgtcaggagcggaggcttggcctccagaccctgccacccagagggtccctctgcctctgagcccccaccctcactgaggctatgcttctactggtaccactgcccctacctgtcagtaggacaggctactgagaggctgcaggcccacgacatagctttactttatactcctagatcttggccaagttgttccttctacatcccagtcatctcaatgcgagaatgaggatactaacagaccctgccctagaggactgttgagggaccaaatgtgtgatgagcacggcaagatgtttgcacctgcctacaggaattgagtttcttactacttcttagcctgcaatgccctgtggcagctcagagctggctgagtctacagcaagacagtggaggtgctgctgtgctcacgccccgcagcggagtttcagggtagagaggagaggagactcacccgacacaaatcagtggagctgagaccacaactgggctttctccccccacggccctgccccccactgcccttatccccacttccttgtatgaggctctagggagcacggtcgccgctcactggcgggcgatgacagcgcgggccccggatgaccactcgatcttcttgatttctgtagctaggaccttgggggtcttgcggggtctctcacacacggggctatcgagcagtggacgccaggaccaggcgggccccagcttcctcacctgtagccccggaaccaccccgggttgttgaacctgcccggcaggtccgcgctcacgcggtagtagtcgctggtcctctccggcggggccgtggccttgggcgccacaggctccgcgcacgctctggggcattcctcagccattgtgcctggaggagaagcgggactcggcggcgtcctgttgccaagcgacggccaggtcacgtgactggggagcgagcggaggggccttaaaggcgccgcgcgtgggccgggttcctctgcgggtgggtccggaacctgccgggcgactccccaagggccgggaaggtcgggacggcgagagattccctgctgggaccgtcgtgtgaggcagccccaggcccccagccacccgcggggggaccgggccaccccagcatcagggcgtggactcccgggcgaaagaaaccccagggcctgggaccccgccagccgggtgacggggtttaagcactgcaggtccactcggcaggcaacgattggacttttgctgtccaatgtactccagggatgctatgccccccagcaccccgagtctaaattgagacccgagatctggctaactttatgaaattctcctaagccaaatatcgtttaaatattacaaacagttttggagagcgagaggttgcgcaggacgtggttcacagctcacttggcgggaggcgagggtccccatcgcccagcgggcttccccaagggtcaggggcctcccgggctggccggtcccattagcagggcggggcgagctgcagggcgaggaccgtggctccactccccgcccgagactctcaagcccaggaccccgggccctgacccctcgcgtgccccgcccccgcagggaggtcccagccgcctggggacagcgctgtggctcctccgggcctgtaggcggcactgcggccccgcgcggatggcgacggaaggggaggccgctcggcctggcctggagggagacctcgctctgccccgcgtcccagccatggcgacatcctcggccgcgctgccccgaatactcggcgcgggtgagcgcgcgcttgcgggaccctggggaggagcatgcgaggaggatgcggaggggcgcggggacccgatggagcggcggggacgtggaggggacccggggcgagcgcggaggggactcggggagggcgcggggacgcggaggggacccgttagggacgcggaggggcccgttggggatgcggtggggagcgggcgtggtgcattcgggactcggcgccaggacctctatctacttccccccaggtgcccgggccccgtcgcgctggttgggctttctcgggaaggcgaccccccggcctgctcggccgagccgcaggacgcttggaagcgcgacggcccttatgatccgcgagtcggaggacagcaccggtaacactgggcgcccagccgagttgggtgggaacgaggagaggccggcagccgcgggggatgcgaaccctagaggggcctgggcgctgcacgcggtcgaaactgcgcgctccgctgggctcctcccactcccgtgctcgccgccgctcggtcctgcctgacgtagcacagcgggctgaggccaccgcctcaccatggatagggtgagagggagcgggcgggccagtggttagcacaggcttcgctccctaggggggtgtcactggaccaccgaggcccggagccccgagctcgcccaggcgggcccaagtgacctgggggcactgggcttggagtctgcccaccttgctggactcctgatggggactttctggctggccacctgagaccacaaggcggggaggtgccagaaagacctgagcaacccgctgggcccctctctttttctcctctgtcttccaagtaagaccaagggacggggttgaccaggttcgaccaggcttacccaggagcaaggtcgggatcagaacctggctccagccctctgtttcctgaaaaggtccctgtgcttccaggtctttcctggggctgctgggctcccggctccccacctcggtgtcacagaaggcacttgggagcaggggtgggcgggaactgcgctctgcctgtctctgctgccaccggtgggagacgcagcgtcgctcctcctccctgccgtagatttcaacgacaagattttgaatgagcccctcaagcactctgacttcttcaatgtcaaggaactgttttccgt

SEQ ID NO: 588173 - DNA, 4001 bp, Homo sapiens
ccaggacttgaacctgaatcagtctgatccccagaagcaaggctcttagccacaatgcctgctgcagtcggccagctctgcatccctccataactcttccacactttccaatcccaagtctttgtacctggcatctcccttacctttttccatccagtaaccttggtgttttctcctcagtggacccttcttggccctgagccacatttgtggccctctctttggtgctcctgtaagttggcccttgtcccactgagtggtcaaaacctagtaacatgtccctctcctccacctctgtattcccagggcttggcaaatagtaagcacccaataactctgttaaatacatttgccttgaatatattctacctgatatctcagctcaagggaagtttgtgaatttcaagggaagtgtgttaatcagtatcacataaccaatttagtggttttcaatggagtaactgaagttacttgaaaagttttttttaattaaattaaattaattaattaatttttgaaatggagtctcgatctgtcacccaggttggagtgcagtggcacgatctcggctctctgcaacctctgcctcccaggttcaagtgattctcctgcctcagcctcctgagtagctgggattacaggcgcccgccaccatgcccagctaatttttgtatttttagtagagactgggcttcaacatgttggtcaggctggtctcgaactcctgacctcatgatctgcccaccttggcctcccaaagtgctgggattacagtcctgagccactgtgcctggcctggaaagttgttttacatcataatttagttgaccaacatctttcaaatagtgactgcacacagagcatttcaggggtgggggctgaggaagcagtcttgcataggggagtcaggaggccagggctcccatcttggtgcctcctcttcctgggggtgacttcccttctctgagcctcagtcttccccatctgtgcaatggggatgacatcaggacctctctagtaagactgctgtgaggactcagtgagcaccagcccatggcctgcctggcaccacgagggactcagcattagctgtggtcacccacagcatcagtcacctggggaagagctgccgcctactggtttgtcttttaaggtcaccctgagactggggcggtgcctcacaacggggaggaaactggttgtaacataagaaaatgacgggcaggtgaacatggctctgaatgaagagttagaggatctccccccagcactatgtcacacacaaaactggctctagaatagaatgtcacagccatggagggggaatcaaccttccccacttatatttggggaaactgaggcccagcatggagaaacaactgggctcatgtgctgggtgagtcagtggggcacaggtgccactgccaggaagtggaagtggggcctgggggtccacccgcctgccagagggctgtttccaccctttcataaagcctgtgatcccatggggcaggagtgaggcagggggacgtggggattgcctggggtggggccacgagctagcatcgtgggcccagggttctaggagctgggaaggtggggaaatccatttaccctcaaaatcttgaaacctcccaaaggtacgtatgaggaaatgaggctggggtcgggatggggtctggacatcccaggggaggtcagaacacaggcctaaggccccatggccaaacctgcatgggggccacctgggcatgggcttctgacccagggcaccagactcctgcccgccagcccacgcaccgggctagccggtcctccaggtctcggatctggatgtggtagaactccttcatctccttggccagaggcggctccacggccaccaccggctccttcttgccccctttcttcttgacttcaagctccttgcctgccttgctcacactctttttgggagccatggctgatggcaaccagggctccaggccccaggaagaggccaggtggttgctaaggaagctggtcccgtacatagcaacaggccgagggagtgaggctgggcttaaagggaccctgccctcttcttgctgggtgccggtaccaggtcccactccaaggcagatggcatcagtgaggccccaggcccaggagtcccaggccatggcaggcaggatgcctggctcccagggcaactttttgggcttctggggacaaccctctttctcccacgtggaaataagcgccatggggaaagttcatgtgggtcagggccctggaaatcgccatcctttcctttgtgctgatcagaagatggacgacactaaccctgggcacacaaagcctgttctgcagctgtggcctggggtgacagtgtcctggcatgggtgcattggggcgtccagctgatggggccctggctggcagctgggtgcctctatgagctccatccccagccccaatctcagccagccatgcctgtgtgcctgcctgtgttccccaccagcccaggcactcactccgtgggacagcgggcaggtcctttccatccctgtcatcccagggcttgtcacttagcaagagatggctatagcaccaccctgaaaaactctgacaatagccaaggggaatggcagtggtacttcagcaaatgtggtttcttggagcaactagatgttgtgagttgtaggacccttggggcaggggcagggggatgaggagagcttggggtcacggtgacgggtcagaaacacagggaggtgggggcatttttactgttggtgatgagaaaggtcagagaagtgattggttggtcaaaagtgggctcacatttgggctctgtctgacctccagtgggtccttgggccaatggcctgaaccctgctctgtgaaagagttcacaagaccgcatctgtaaagttccctgtgcagggatacggtccagggatgctgggggcacttagtgagtggtggcccatgaagctcccgcccactttgtgtggtaggcaggcctgcctggaatttccgacagccctggacctcgcctgtggtggtctgcccttcccagggtgcctgttccctgcaggcagggcagccctgggagggcacaaatgtgactggcagagggaagagacccccatgcttctgcacaggcctcagcctgagtgcacttacaagtgagggagctctggctgcccaggccttgtggggagagcggggaggcctggcccagtgcccttccagctcaatgcgatggccctgctcctgctggacattgccccctcccccgcctgaacagctgctcccacaggagcctaggcaggcaaaaattcccacagtgctcccagttgaccgggggcctccccgtgcctcccccatttctattctcttttccccaggcccattgcagggggtagctctgaattcccagcttaatggggcccacagcccctcgggcagcctggagcccacagagggtgtcagcttggagacctgccctcctcgccttcatcagcaccaggatggctttgtcagcaccacgtggcaagagggacgagctgaacttctaggcagggaggggacgctgcagggtggagggagagcactttctggggtttgcttggagactctccccaaagctccctactttggaccataggccgctacttgccatgggggcactgtctcattatcgcttctccagctgccttccgtagtcttggagactgaggctgatgggcccagagctgctggagctgtgagacacaaaccctgcaggagctgggtcttctgaggggagtcaggcagtgcacaaagccatgcagactgcagcaccggccaaggacagtggacagtggcctggggcactgtcacctctgggagactttggagggaagaaacctaggccctggggaagcagggaggccaggcatcattaaacatgcccttggccaggtgcactggttcatgcctataatcccagcactttgagaggccaaggtggg

SEQ ID NO: 588174 - DNA, 4001 bp, Homo sapiens
gcaatgctattaattatcccataggtatgaggtgagaaaatataaaaacatgttcaagggagctgtacatgacttaggcctgatgcatctcttttttatgaaagaatgatctcaagcacaggttgccatttgtgtaacctgaagtaggtatgccaccactcattctactgttccttctattttttgttacattaacaggttttcctaacaaccacacaaaaaaaaaaactttagtaaaaacctaggaaaggacaagtctagtaagcaaagttatagaacaaagtgaggatttaatgtaaaacatttttaaggaatgtcaaaattctaaagttattagtaaaatatggcaaaagtataatattgaatacctggtgaaaataaaattcttttttaatgttattttttattttaagttctggggtacatgtgcagtacgtgcaggtttgttacataggtaaacatgcgccatggtgtcttgctgcacctatcaacccatcacctagggattaagcccagcgtgcattagctatttttcctgatgctctcccttccctcacctcaaccctcgacaggccccagtgtgtcttgttcccctccctgtgtccatgttctcattgttcagctcacacttataagttacagcatgcagtatttggttttctgtttctgtgttagtttgctgaggataatggcttccagctccatccatgtccctgcaaaggccatgatctcattcctcttttttttttttttttaagacagggtcttgctctgtcgctcaggctggagtgcactggcacaatctcagctcactgcagcctctgcctcccaggttcaagcgattctcgtgcctcaggctcccgagtagctgggattacaggtgtgcgccgccatccagactaatttttgtataatgttttcagtagacggggttttgccatgttggccaagcaggtcttaaactcctggtctcaagtgatcctcccaccttggcctcccaaagtgtgagccaccatgcctgacctgatctcattccttgttatggctgcataatattccatggtgtatatgtaccacattgtctttatcccgtctatcgttgatgggcatttgggttcaaaagtcataataatagcaaaaaacatattcttgatgctgacagcagggacatggctaaatatggcacctccacactgtggagtatcataccatctctggagaaaataaggaagtcatcaccagcttgtataatgggccccacttatgggtcatagtccccaggcttggtcagtccccaacccgcaaggccgtccctgccccctactgagcccactcctctgcaggaggccccgggggctctgctcccgcccacagtaggactgaagggccaccaagtgggtccagccgtccagctgtcagccaggcctggcctcgggcagtgtgggccgccatgtggtctctttcatgttttcactccttctgccctagaggacctgcgtcctttggtccttttgctagagcactcagctgtctcaggctgtatgactgcagaaaatcgcgtttcaagggaataaatctgtaagattttatggtgaatgaatacttcaacctctttggattaccgcatggtccatgctgatcccagaggcctttacttacccacgtagtgtggtggctgcagtgaccgaggcttgctggtcccagaataatgtccgcttgctctgttacatcccagaactgattctcagggattgggatctggaagatgctcggcaggaggctgcggccgcagcggcgctgggctggagagaaggtggcggcgtgagggtccggcggcgctggagacccggcgggcagcggccaaagcagggtcgggctgagcccagcatgggctccaggctgcgcgagcgagataccccggtccccgcctccgcctccgccctagagccacggaggggaggcggccggcggcccgggcctctgagctccgaatcctgcgccttcccgccgccaacgggctgggggccacgaggggcgcggggagggaacgggagtttgcaaggacgcctggagatccactgcttcctcctctcggcttcagtctgcaggcagctcttccccaccagagcgcgtggctcccccggccgggctcgcctctcccggcgcccgcctcatttgaaaacacggcctttcccacgcccttaccgccggttctgcccgcactgcgctccgctcctcgctcctctgctcgcccttcgctttcggcgtcccacaccatctccttccctcgtcggcggcttcctcttctgctcccaccctggtctcccgcctgccttccagcaccatctctttcggatgtcattcctcgcagtgaagttctttattgaaactgccccttgctgtcagcaccccaaatctactgagggtccatcagcagtacagactggccggctttatgtgctaggtcggctcttaagaaatatactttaagcctaacggcctcaaaaaaaaaattgtattatcaaacatagagtgtgaaaataacactgaaataattttaaactaaaaggctaggccgggtgcggtgtttcacgcatgtaattccagaactttggaagaccgaggcaggtggatcacttgaggtcaggaattcgagattagcctggccaatatggtgaaaccccttctctactaaaaatacaaaaattagttgagcgtggtcccagctactcaggaggttgaggcaggagaatcgtttgaacccgggaggtggaggatgcagtgagccgggattgcgccactgcactccagcctgggagactgtctcaaaaaaaaaaaaaaaaaaaagaaagaaagaaagaaagaaaagaaaaacaaacagaaaaaaaaggctcagcgactgttagaaatcgttatttattcatttttttcaaaaatacatggcctctcatgtcagatttagcagatgtaggacgtttgcccatcttatttggcaaaaatgcttcttaaggatttgatagcggcccaaattcatcagtgtttaagtttttctaaaactaatttgaaaacttaaaaaaaaagaagaaacattatatgaataactaggaagctgtttcgacagtcactgttaaagagcttttaaaatgggctccacatgttaatgtatgaaaagcgtcaggcctctgagcccaagtcaagccatcgcatcccctgtgacttgcacgtatacacccagatggcctgaagtaactgaagaatcacaaaagaagtgaatatgccctgccccaccttaactgatgacattccaccacaaaagatgtgtaaatggccggtccttgccttaagtgatgacattaccttgtgaaagtccttttcctggctcatcctggctcaaaaagcaccccccactgagcaccttgggacccccactcctgcccgccagagaacaaaccccctttgactgtaattttcctttacctacccaaatcctataaaacagccccacccttatctccctttgctgactctcttttcggactcagcccacctgcacccaggtgaaataaacagccatgttgctcacacaaagcctgtttggtggtctcttcacacagaagcgcatgaaatttggtgccatgactcggatcgggggacctcccttaggagatcaatcccctgtcctcctgttctttgctccgtgagaaagatccacctactacctcaggtcctcagaccgaccagcccaagaaacatctcaccaatttcaaatccggtaagcggcctctttttactctcttctccaacctccctcactatccctcaacctctttctcctttcaatcttggcaccacacttcaatctctcccttctcttaatttcaattcctttcattttctggtagagacaaaggagacaagttttatccgtggacccaaaactccagcgccggtcacggactgggaaggcagccttcccttagtgtttaatcattgcagggaca

SEQ ID NO: 588175 - DNA, 4001 bp, Homo sapiens
gttccataagggtggttggaggtgtgctatgaacagggtctggggaatcagatgcccagaggttctctttctgccccatggtctcccacaaagctttggattcagacaggactccctgggggcccattactagagactccaggagagggactgagggaaggctgggaggtgaaactgggtctgcagggacccaaatattttctctactttgcatgcccttccatggtgtctcagatgctggtgggacacattcagggctggttccagagagctctgggttgaggtccaagactggagactcaaaagcccagaggtttcctgagttttctctgcattcccactggggcttatatctggatggatcttccagggaactctctctctggagttctggcagggagtctaggggagggcaagggactggcattgaagactcagaggcctgaggtttctctctgtatcccacggttccccagaagtccttagatatagcaagtcctccttcagggctaacttttctgggttctgacagagaagctggggattggcaggggggtggcatcggaggctcaaaagcttggggcatctttttgtgtcctgtggtttccaaatgagtctcatatccagggagaacttccagggggctagttccaggggactgtgtgggtgcctcagcgccagataaaactcccttgtggtccacagggaagggcctcagatggaggagtagtgatgagacagaaggagaagatggaggtggaagcagctgaggatcgggggccatcccttctagatcttccatagtatgggccccatgggtagaaaactgggctgaggagtgatactggggaagcaacaggttggacctaggtaggaaggcaagcttgttgaagaagacagaagaacaaacagaccacttcagaggagaggggccacctgagctcaggaagatggcctccaaggactcgctgtgcagagaggggagaccccagaagagctggctttttctctgctgctggcggttccctgatgctatcttgtgcctcacaggaaagctggtcagaatctggaagatggggaaggatctggaagggctcacgggctgcatgactgtttgctctggtatccctatagccttgaggaggccctcagaaccacaggatggctggggtggggctggagtggcttgctctccagtgggagcttctttggtaggagaacatggcttcagtggatccagagatgcctcgtcttccccctcttcctcttcttccccttcttcctccacttctgatttctgcttacacaggtgatcaaggaaggccacacggtgcagaagtggtagttcctgggaagtagataaagatattctcaggcatgaagccttttcagatacacaaggtttgctatgaggcactcagtctgctccatatccagagtggacagttactcacctaatcccacgtgtgtggccagtcacctacacagctcctcatctagtgttaatggtcattacccagtcctcatttggagatcagtattccctcattctacatctagaatccatggtcactcacctggcttcaaatctagtgtcagtggttactcacccagcctcacatctagggcttatagtcactcacctgggcccacattcataccaatgacctcacatgtggtgtcagcagtcattcatccagctgtacagtcacaggtcacccaccttgccttgcaccatattcccagagcaccagggatgaagctgtcgcaacctcccaagctgccaccatctctgaatctgccaaaccacgaataagaatagtgtcaccagatttcctggactctggaagcagctgctgccgcagtgtctgcaggctagggcatgggtcagttggccccagagaagccccatatcccccttagccccaagcaggtcctccagcagccattccatttcccttagccttctggcagtttaccctgaggtcatcattgcatcacagaacaaagaactcccatcccccacagaggcctgggcttaacagccttctccctgaatttagaaccaaaaaaaatttcctctatcaggcaattcatgcttcacacagtgaaatgtgggtgatccccttttgattgcccagttcagaattatgcttcaggcattgtggttaagtacatggattctagcaccgaactgccttattcaaatcatagctctgtcattttcctacctgtgaaaactcaaactacttaattttttcagtgcctcatttttcttatctataaaataaagatatcattatctttattttatagatatttattgttattattttgagacagaatctcactgtgtcacccaggctggagtgcagtggtgtgatcacgactcactgcagcctcaacctcctgggctgaagtgctcctcctgcctcagcctcctgagtagctgggaccacaggcatgtgccaccgtgcccagctaatttttatattttttatttttgtagagacaggatctctctatattgcccaggctggtctcgactcctgagctctagggatcctcccgccttggcctcccaaagtggtgggattataggcgtgaaccatcttgcctggcatattattcttagaggcaaggtctcattgtattgccccggctggtcttgacctcctgagctcaagagagccttccatctcagcctctgagtagctgggattacaggcatgggccactctacccagcacaataatattattacttactacacagggttgttttgaggatgtaaaaagtaaagtagaggttcctcttcaaagactttcctctccatcttattaggaataaatagtaacatctcttagaagcaaaatttattcaaagacctctgttaacattcttaaatatctgctagccgtaataaatcaatttactttatgttcttagcttccacaatttagcctaaatatttgccctggcatgcttatattggtccaagcaagcattaggtcatagcctgttcctcttccttatttgaaggtgtttttacctttctcagcattccacaagttaacttcctccttcctttgttctctgcctttgcctctttttaaaaagttctaagttgttagccaatcaggacaaatacagaaagcgaggtcctgttccagccaatggaaaccggacacagcagtagggtggatgcgtcaggctataaatgaccctgcctcctttgttcggtgtactcttcatggcaaaactgctggtgagtgtaccgtttctgcagaaagtaaaaatagccttgctgaggaaattaaatttatgttcaagtgctatttcttcacggcactggggaacaagcatttctaacaaggattaaatgaataaatatatatgcttagaataatataatgtatgctgtattaaatttctatttaaggtttctaattataagcttcattctgtctttaatggttggggtctatcccctcttttttatgctcgtgtcagctgtgaactgtgaagcattcatgttaaggatgacaaataaatgtgctttgccattctcatttcctccatttccccctaaaaccaccactttgttccatgtcggcccttcctttcagggccacgcttcaatccctgtcctcattaaaagctgatttgttctggtggaaagtgtgctgagctgaaagtgaggagacttgggttctctagctccatcactgatccaccacatgatcttgagaaaccaaagagaggtttctccattggtaccatgagttggactagattgattgattgattcatgtaacatttgttgaatgcctgttatggaccaggtattgtgctcagtctttaaactgcagaagtaagatagagtctttgcactaaactaggtcccatttcattgggggatcagtgaagtaacaggtaatgaaaatagagatgcgcacagagttttatggggccagagaacagattcccaccagtctgaa

SEQ ID NO: 588176 - DNA, 4001 bp, Homo sapiens
tttgctctggtatccctatagccttgaggaggccctcagaaccacaggatggctggggtggggctggagtggcttgctctccagtgggagcttctttggtaggagaacatggcttcagtggatccagagatgcctcgtcttccccctcttcctcttcttccccttcttcctccacttctgatttctgcttacacaggtgatcaaggaaggccacacggtgcagaagtggtagttcctgggaagtagataaagatattctcaggcatgaagccttttcagatacacaaggtttgctatgaggcactcagtctgctccatatccagagtggacagttactcacctaatcccacgtgtgtggccagtcacctacacagctcctcatctagtgttaatggtcattacccagtcctcatttggagatcagtattccctcattctacatctagaatccatggtcactcacctggcttcaaatctagtgtcagtggttactcacccagcctcacatctagggcttatagtcactcacctgggcccacattcataccaatgacctcacatgtggtgtcagcagtcattcatccagctgtacagtcacaggtcacccaccttgccttgcaccatattcccagagcaccagggatgaagctgtcgcaacctcccaagctgccaccatctctgaatctgccaaaccacgaataagaatagtgtcaccagatttcctggactctggaagcagctgctgccgcagtgtctgcaggctagggcatgggtcagttggccccagagaagccccatatcccccttagccccaagcaggtcctccagcagccattccatttcccttagccttctggcagtttaccctgaggtcatcattgcatcacagaacaaagaactcccatcccccacagaggcctgggcttaacagccttctccctgaatttagaaccaaaaaaaatttcctctatcaggcaattcatgcttcacacagtgaaatgtgggtgatccccttttgattgcccagttcagaattatgcttcaggcattgtggttaagtacatggattctagcaccgaactgccttattcaaatcatagctctgtcattttcctacctgtgaaaactcaaactacttaattttttcagtgcctcatttttcttatctataaaataaagatatcattatctttattttatagatatttattgttattattttgagacagaatctcactgtgtcacccaggctggagtgcagtggtgtgatcacgactcactgcagcctcaacctcctgggctgaagtgctcctcctgcctcagcctcctgagtagctgggaccacaggcatgtgccaccgtgcccagctaatttttatattttttatttttgtagagacaggatctctctatattgcccaggctggtctcgactcctgagctctagggatcctcccgccttggcctcccaaagtggtgggattataggcgtgaaccatcttgcctggcatattattcttagaggcaaggtctcattgtattgccccggctggtcttgacctcctgagctcaagagagccttccatctcagcctctgagtagctgggattacaggcatgggccactctacccagcacaataatattattacttactacacagggttgttttgaggatgtaaaaagtaaagtagaggttcctcttcaaagactttcctctccatcttattaggaataaatagtaacatctcttagaagcaaaatttattcaaagacctctgttaacattcttaaatatctgctagccgtaataaatcaatttactttatgttcttagcttccacaatttagcctaaatatttgccctggcatgcttatattggtccaagcaagcattaggtcatagcctgttcctcttccttatttgaaggtgtttttacctttctcagcattccacaagttaacttcctccttcctttgttctctgcctttgcctctttttaaaaagttctaagttgttagccaatcaggacaaatacagaaagcgaggtcctgttccagccaatggaaaccggacacagcagtagggtggatgcgtcaggctataaatgaccctgcctcctttgttcggtgtactcttcatggcaaaactgctggtgagtgtaccgtttctgcagaaagtaaaaatagccttgctgaggaaattaaatttatgttcaagtgctatttcttcacggcactggggaacaagcatttctaacaaggattaaatgaataaatatatatgcttagaataatataatgtatgctgtattaaatttctatttaaggtttctaattataagcttcattctgtctttaatggttggggtctatcccctcttttttatgctcgtgtcagctgtgaactgtgaagcattcatgttaaggatgacaaataaatgtgctttgccattctcatttcctccatttccccctaaaaccaccactttgttccatgtcggcccttcctttcagggccacgcttcaatccctgtcctcattaaaagctgatttgttctggtggaaagtgtgctgagctgaaagtgaggagacttgggttctctagctccatcactgatccaccacatgatcttgagaaaccaaagagaggtttctccattggtaccatgagttggactagattgattgattgattcatgtaacatttgttgaatgcctgttatggaccaggtattgtgctcagtctttaaactgcagaagtaagatagagtctttgcactaaactaggtcccatttcattgggggatcagtgaagtaacaggtaatgaaaatagagatgcgcacagagttttatggggccagagaacagattcccaccagtctgaagaaggaggttgatggtgaggggtgcttcccagaggagatgattaatgctttatttgaggaaccaagaaagtgaggatgtagtgtagggagtgagagaaggacaatccaggcagtaggaacagcctgtgtaaatgtgctagggcagagaaactatgccccattatggaaattgaaggtatttcagtgtggctgtagttttggatggaggttggggaagtggtaggagatgaacctagaaagacaagatcacaaagtccctgaacaccaggctaagaagttggaactctgtcacttttcaatgtgaaaccattgaaaagttttaaacagggaagtgacaagatgaagtttgtgtctcggaaataacattctagtgagggtaaagacacaaaaggcaagaggttaggtgagtcttgctttagttaaataaaaactaaagtgaggcctgaaccatgtcagtgatggtgggcatgggaaatatggattcaagtagaactccagagataaaattgattagacttgtttaccaataggataggttgggggagagaggaaattgagggtgactccaagatttctgacttgggaaactggatgtttgttggtgcaatttcactgagataagaaacaaagacctgggaaccaagttatggtggttggggggcggtgatgggttccattttagatatttgaatttgaggttctggtgtcacctcaaggtaaagctaggcaagggacagatacatggatctgaagcttgggagagcagtctatgggggggatgtagatttgacctctagcagcatatatgtagcagctgaaaccattgaagggcataaagatgacctacttatgtgtaacatttggcccagacagtgctttttaactgtgaccaacggtggttttttttgttttgttttgttttttttgagatggagtctcgctctattgcccaggctggagtgcagtggcgcgatcttggctcactgcaagctccgcctcctgggttcatgccattttcctgcctcagcctcctgagtagctgggactacaggtgcctgccaccgcacctggctgattttttgtatttttagtagagacggggtttcactgtgt

SEQ ID NO: 588177 - DNA, 4001 bp, Homo sapiens
tggctccatgcaggtcttggggtaagttacaagctgggtgcttagaggcccaggagttttttgtcttttgtatgtccccacatctagcttcagaatcagacaggacccccatggatctaactctgagcagctccggtgcaagagctgggggtgggctgagggccagagatggagacctagaagccgaggaattcctggaatgctcagtatccttccatgtagcttctgatgtagcgaggcattccccaggattgattctgtgtggttccataagggtggttggaggtgtgctatgaacagggtctggggaatcagatgcccagaggttctctttctgccccatggtctcccacaaagctttggattcagacaggactccctgggggcccattactagagactccaggagagggactgagggaaggctgggaggtgaaactgggtctgcagggacccaaatattttctctactttgcatgcccttccatggtgtctcagatgctggtgggacacattcagggctggttccagagagctctgggttgaggtccaagactggagactcaaaagcccagaggtttcctgagttttctctgcattcccactggggcttatatctggatggatcttccagggaactctctctctggagttctggcagggagtctaggggagggcaagggactggcattgaagactcagaggcctgaggtttctctctgtatcccacggttccccagaagtccttagatatagcaagtcctccttcagggctaacttttctgggttctgacagagaagctggggattggcaggggggtggcatcggaggctcaaaagcttggggcatctttttgtgtcctgtggtttccaaatgagtctcatatccagggagaacttccagggggctagttccaggggactgtgtgggtgcctcagcgccagataaaactcccttgtggtccacagggaagggcctcagatggaggagtagtgatgagacagaaggagaagatggaggtggaagcagctgaggatcgggggccatcccttctagatcttccatagtatgggccccatgggtagaaaactgggctgaggagtgatactggggaagcaacaggttggacctaggtaggaaggcaagcttgttgaagaagacagaagaacaaacagaccacttcagaggagaggggccacctgagctcaggaagatggcctccaaggactcgctgtgcagagaggggagaccccagaagagctggctttttctctgctgctggcggttccctgatgctatcttgtgcctcacaggaaagctggtcagaatctggaagatggggaaggatctggaagggctcacgggctgcatgactgtttgctctggtatccctatagccttgaggaggccctcagaaccacaggatggctggggtggggctggagtggcttgctctccagtgggagcttctttggtaggagaacatggcttcagtggatccagagatgcctcgtcttccccctcttcctcttcttccccttcttcctccacttctgatttctgcttacacaggtgatcaaggaaggccacacggtgcagaagtggtagttcctgggaagtagataaagatattctcaggcatgaagccttttcagatacacaaggtttgctatgaggcactcagtctgctccatatccagagtggacagttactcacctaatcccacgtgtgtggccagtcacctacacagctcctcatctagtgttaatggtcattacccagtcctcatttggagatcagtattccctcattctacatctagaatccatggtcactcacctggcttcaaatctagtgtcagtggttactcacccagcctcacatctagggcttatagtcactcacctgggcccacattcataccaatgacctcacatgtggtgtcagcagtcattcatccagctgtacagtcacaggtcacccaccttgccttgcaccatattcccagagcaccagggatgaagctgtcgcaacctcccaagctgccaccatctctgaatctgccaaaccacgaataagaatagtgtcaccagatttcctggactctggaagcagctgctgccgcagtgtctgcaggctagggcatgggtcagttggccccagagaagccccatatcccccttagccccaagcaggtcctccagcagccattccatttcccttagccttctggcagtttaccctgaggtcatcattgcatcacagaacaaagaactcccatcccccacagaggcctgggcttaacagccttctccctgaatttagaaccaaaaaaaatttcctctatcaggcaattcatgcttcacacagtgaaatgtgggtgatccccttttgattgcccagttcagaattatgcttcaggcattgtggttaagtacatggattctagcaccgaactgccttattcaaatcatagctctgtcattttcctacctgtgaaaactcaaactacttaattttttcagtgcctcatttttcttatctataaaataaagatatcattatctttattttatagatatttattgttattattttgagacagaatctcactgtgtcacccaggctggagtgcagtggtgtgatcacgactcactgcagcctcaacctcctgggctgaagtgctcctcctgcctcagcctcctgagtagctgggaccacaggcatgtgccaccgtgcccagctaatttttatattttttatttttgtagagacaggatctctctatattgcccaggctggtctcgactcctgagctctagggatcctcccgccttggcctcccaaagtggtgggattataggcgtgaaccatcttgcctggcatattattcttagaggcaaggtctcattgtattgccccggctggtcttgacctcctgagctcaagagagccttccatctcagcctctgagtagctgggattacaggcatgggccactctacccagcacaataatattattacttactacacagggttgttttgaggatgtaaaaagtaaagtagaggttcctcttcaaagactttcctctccatcttattaggaataaatagtaacatctcttagaagcaaaatttattcaaagacctctgttaacattcttaaatatctgctagccgtaataaatcaatttactttatgttcttagcttccacaatttagcctaaatatttgccctggcatgcttatattggtccaagcaagcattaggtcatagcctgttcctcttccttatttgaaggtgtttttacctttctcagcattccacaagttaacttcctccttcctttgttctctgcctttgcctctttttaaaaagttctaagttgttagccaatcaggacaaatacagaaagcgaggtcctgttccagccaatggaaaccggacacagcagtagggtggatgcgtcaggctataaatgaccctgcctcctttgttcggtgtactcttcatggcaaaactgctggtgagtgtaccgtttctgcagaaagtaaaaatagccttgctgaggaaattaaatttatgttcaagtgctatttcttcacggcactggggaacaagcatttctaacaaggattaaatgaataaatatatatgcttagaataatataatgtatgctgtattaaatttctatttaaggtttctaattataagcttcattctgtctttaatggttggggtctatcccctcttttttatgctcgtgtcagctgtgaactgtgaagcattcatgttaaggatgacaaataaatgtgctttgccattctcatttcctccatttccccctaaaaccaccactttgttccatgtcggcccttcctttcagggccacgcttcaatccctgtcctcattaaaagctgatttgttctggtggaaagtgtgctgagctgaaagtgaggagacttgggttctctagctccatcactgatccac

SEQ ID NO: 588178 - DNA, 4001 bp, Homo sapiens
cccgctatattttcagcagcggctggaatgacttacagcgttccactatccttctctcctcaccaggttcctcaccttcttctcatttgtgttcttctgtggttttgctattgatgtctgtaactttcacaatgcaattttcaaagtaatagtggtgcagcagagagcagaagcactgtccctttgcaaaaagtctttctctttaacaataacttctagtggtgatttatggtatgactcaaatctctgtggggtaacagagtcacagaagagctaagtgttttgcttgagagctatgaggtaagccctatatgaggctaaaagaggatgttctgtttcccagtgtagttttggattccaaatctgtataacttctcatactgagttcaaaggaggaagagagacagtttcagggttgagaagtaaaagcagaaaggtaaacttgttggaaagcagggaataggctttagaaagtttgcaagacagaaactgcaggggtcgcatatattacatgaatgaatgggatgaagtcgggcttagccttagggctagagtcaaaatcactcatttctttcaaaagcaaaaacataaagtagacaagatttgtgacttcttttcatttcttttttttcttcacgcccctcccaaatattccaaccactccaaatgtaattactatcaacagcagagccaggaaagttaattcaagggaaagaatttgaaaagtcctaaaagtttccacttttcttccagttatacatcacagtgttgctattggtcactgtgatatttaataagagaaagtgaatttccaggtcaagttctaaagcacaagaagtaaaccaaatgcttcttggggccaagcaagaacttacacgagggaagttcctaaagacagaacaacacccatcttaaggtgtagccagtgctcagctctggtacattcatagttccccagagaaataaaatcctctctggccaagactttcaaattttcaaagatacaaccctggatttactgtgaatctcctagttttaaatgtggccaactaattaaaatgaaaaaaaaaaaaagtaaacagagctcatgccaaacaatgtctgttggccttaaccagtgggagatgccagtttgcagtctctggccagaaaagttcttgtatgtagcctagaaaatatgaggggcctcgttcaaatcactccatgtacaccctacccccaggaagtggcagccctggaggctggtcctctaaataggcatctccctcctgctgtgcccctggcctctaattccttttatgagtaagtgcctgtgtcagaaatgtgatttccaggcctctgacagcacccccttttcaccccctatttatacacacccgctctgtgtgaatgagctaaaacctcaggtggcggggatttggctgctgcgtggcccagtgtgtggctgggagctgcccctgaaaggctctcctatttcctcctctctgctccaaccctctctcccactctctctatttctcctttgaaaatatttctttcccttttctttcttttctctcttttcctccttcccattcctctctcgtctcatctttttctcacctttcttctcatttccttctttctctacatttctcccccacttttctcattcttttttccgtttcctctgtcgtctccactcctgtcccctctctctgactctcctttcctttcctgttccatcctttcccctctctttcctccccgcagcacccgggaacttgcgaggggacttcgctcaccaggaatacaccaacaccggcttcgagtatttcttgtgatgggagcggagggtcagggagcccttgcgctccaccaagtccggtggtccgatctccaaccagtgttgcttcctgtcgcaccagtcctggcaggatctgtcaaggctatccatgggagccctcgaggtacagacctctgaggagttccctatgcacctgtcctgcccggcaggaacgtaagtaccaagattcggcgtctcttatctcctaagcaacctggggcggggccagtggaggggcggatccctccaacctgacggccaaacgtttcctagacgttgtcgttactgataagaaactacatttcccagaatgcagtgagggtagcgaccgggctacacaggtgatgaaggggggaactgcatcctgggatccgcagtttcgcctgtccacccgccaaatcctaagagtggctgagcgcagttattggggagtggtaggtcagttaaggaccaagggaagagcaaattccctgaaccccgagtgggtctgttcgggctgtctttagagaagttcttttgtgtgtgtgtgtgtgtgtgtgtgtgtgtgtgtgtgtgtgtccgagtctcactctgtcgcccaggcaggctggagtgcagtggcacgatcttggctcactgcaacctccgcctcccaggttcaagcgattctcctgcctcagcctcccaagtagctgggattacagggtctcgccaccacacccggctaattttttgtatttttagtagaaacagggtttcaccatgttggccatgctggtctcgaactccagaactcaagtgatccgtccgcctcggtcttccaaactgctgggattacaggcgtgagccaccgcgcccagcctttggggaagttctttttaccgtccatcatccattgccaccacaccttctgcttacgagttatttataataagtttaactaaaagagaacgagagaacatcccctgaaacccaaagtttgtcattctatacagctttcctgcctgcaaaagaggaggagcagactcatccagcaaatcacctaaaaagtttgaagatcaaaaagcctagctccagtttcagatccttcccctacctttctgaacactagtttcttcctctgaaaaacgaaagagggaacgggaccgtagagtggagtgggcacaagaatcgcaagtcccttctggctatgacgctgcaagactctaggtacagtttaggactccgggcattcagatccccgggacttgtcaagttctcctcattgacatttttgatatttcgtgacaacacaaattcatcacatttttgtgctgtgtgttatatgtgggaaggagattttaaaaagattgccttttgaagttattggatagctgtgttacagaagaaaacattgccttcaagaagttattggatagatatgttacagaagaaaagacgtttgtttcatttttgactttgcaggaaaagaatatgtaacacatcagaattcttctctcctccctggccttagtcgagtacctgaggggcattaaagcacttcctccttgcaatcacttacccagcatagtccttaatacagatatcttcattgttgaatgaatgaatgaatgttcattatgtttgattaccttaggtttactttccaaaagtgtcttacttgaggaagaccacatctacacaaaaaaatcaaactttaaaacagagtaagagaccattcacactacaaatagattctcggtttataaaagatgtgttatagtgctcccataaatagtgaggcactcttctgtatcagatggcacaaatttgattacatataactactaagtgcttttccgtggtctgtggttcatagtgtgggtgcctgtggtatgctaaggtctctattttactgacagccacagttaaaatatatttcttaaaaccaaataaacagtccaccatcaccagccaaatgctaggagagtgctgactgctattttagctgctttcttctaggcagaatgaaaagaaaaacataagttaactttaaaaggggaaatatgatccatgtcaagctcaattctgtccaatcaaagcacagaatattgctgttgttccaaaaatattatcatcattgctgtcatctgttcatgtgttcattttacttacgtttagagtggcggtaacataatatatgtgaaaccaatatgtc

SEQ ID NO: 588179 - DNA, 4001 bp, Homo sapiens
ggcgaggaggagagaggccaacccacgggtggtgctgaccagggccccaacaggctaagcccccggggctggggcacagggcttgtccctaccccaggtaggggtgggcaggttgagggcaggaagcccccctcacccatggctgtggcttgtgggaaagacctgctggtagcttcctgccctgacccagccctgtggactgagcagagaaaagcaagtgccttgaggctgcgggctggggtgggaagctgatccctcactcactagcccagggtcaccttcctgctgcaaaggagctgggaggagtggggagctgtggcctcggaggtcttcattcacttgaggatgcgccttctatgtgcgccctgacactggacaccacacagcgctactccaccccattcacaggggggaaactgagtctgggaagcgccgtcagagccacccatggggtcagcctgtcctctgtcgctctctacaggccacgcggaggaactgccccacctcccggggcgccccagcaggtgccaagccacagccgcagaaccgcctgatcccgaactccctgtgcagagaccagactcgcccgaatatggggagaaaaacgagccgcgtgcagcaggggccgcctcggtcccctgcctgctccgctcacggcgagcgttcctggggcctcgagtttccccccttccgctggctgctcggaatcgcgggacggacccacctggccgccctgcctcccttccaggtgggcaccacctggactccaagtgctggtttacaaagcacacaggagacccttacgggggtgagctggcccctcgccagcgtccgctcggcgcgccccggggacagtgaaggcttggggcgcctctgcagagtcgccagcgcggtgggcgcagccggatgcctctgggagaagagcgcagcgcccgagggtcccccggcctacgaaggctaagccggggtctcggattcgatgtgggcgcgtcgcgtgacgcccggcgaggggcggcccggaggcttcccggcggcggcgcgcgcagggtctcgggcccgggtcggtcccgggcgcggcgcgggcggcgggcgcctcctggcgggcgcggacggagcgcggcgcctttaagcgggggcgggcggggcgcgggcagagtcgctgtcgccgcggccgccggggcggagccagcgcggatcgggtcccggacgcccgagcgccccgcccccgcgcgggcgatgcccagcggcgcggcgggctgcggggcccggcggggcgcgcagaggagcgggccgcggcgctgaggcggcggagcgtggccccgccatgggcttcctgcaccagctgcagctgctgctctggaagaacgtgacgctcaaacgccggagcccggtgagcccaccccacgcgcccgccctcagcccgaggccgcgcgcaccgcggccagaggcgcgctccccgcgcgcacgtgcggacggccgggcgcgcgcagaccccggcgggcgctgggggcggcgcgggcccgagccccctccccgccgggccctgccctcgcctgccggcgctgcggcctccggggaggtggctcggtcgtgtccagtccggtcccgcgtccgctgacatcgcggtgctcggctgagtcacggcacccgcgccctctgcagcgcgctcgctggggccgctgtgggcggggggcaagcggcgctcaggactctggctcgagggaggccctggttcccaggacagaaggcaggcctggggggctccattcagctgcgaggctccatggtccttgggcccagcctccctggggtcccggaggagaccctgtcccttccctccgtccacccctcccctgcccttgggccgcggcctgccatagaggttggtcccaggcatctctccgcctcccctcctggcacatccgtgacccttgctcatgctctcgccactgggaatgtccttgtgccagccttggccagcctgaatctctgcacccatttgtcctttggggtcagttctccccgagcctgatccactctgttgcctcctggtccccccacctgctctgggggctgggtctactgtttggagctgtgaaccccggctttcccagcactgcctgggcagccagtggacctgagggtgcaggacacatggctgtcagggacagaagtccttcgtggagcgaggggcttggggatatgggtgtcctgccatacccccagctggccagcttggctccagcctgggaagggaagggacacctcccaggccacaggcctggaccagcttaggtttctgaaggcccttgggattgtccaggccagggctcagagcaggtgggggcctaaggcagacatcctcttgcccagccagggcccgggcgggaccccttgggctgcaccagtccgtgcctgtttatctttcaacatgcactgcaggaaacccaggctgcagtcagctggggtggccatcatcaccatggctggcagaattcccctgggcacctggccttggcggggagcctgggttaggtacatgccctggccaggcacctggagctggctgagtggggtcccatggatcaggcctgcagcccctggcattgagtcactggggacagcagagcagggccaagggaacagggatgtggcatgtggcatgcattagtattagtccccgggggtggttgtcaggaaggtccccactgggcttgggagcagaggctggaatggtggcccctgttccagtggggacaatgctcagggaagggagtgtggcctatgagggcagctggcaagcaggtgggaggtgtgcactgtcctgaccgcaagagtgactcccagctgctggtttgggctgccccccaggacctttttgggtccccaccctacagggctcccagaggcccactgggccacagtggaggtccttagcccatggctggagcaggtggggaactgtttcccccagggaggctgagtccttgccaggcttgtgatgtggggctggggctggctggacactgggcacactcctgctgggtccccactttcctgggaaggatcttggacatcagagctggactcttggggccaagcttggatgacagaggtttgccctgtgtgccatgcgccctgctggggcaggggtgcaccctgggcagagctccaccctgggcagagctcagggtctggagggtgggtgccaaggacctctgtgctgctagcaggctcctccaagctctttgcctcagtttccctgtctgtgagtgtggcctatctcctcttagttagctggacttgggtctacccttgggctacaggctgctcttggtgcagggacagggtcactgtcatgaagtcactgggatggcagatggcagcgccaccctcgggtctcacctgttctccccccgacacagtaggcgggagctacagggaggggtcatgcccagagaaggcatctaggcctccaggcgatgtgaaggcactgggctggtctcgagggacggaggttgggccacctggaggcacctgtgtggggcacccagggcgtgctagacctgtgctgccgcctgtaaccagatgctgctgtggcgcccgccgcctgccagccaggactctcctcctcctcccagtagctcgtgcgaggccgttgctatagcaatgggggaggcagccgggcctgttgctgcagttacagtgcccatagcaggccgggtgtgggcggggctggcgccccgtgctgtgacccctgcctctgacattgcctcactcctgcagccaccctcgccctggtgcctgttggtgcccacagtgccttggcgaaccctgggctccgtcctggctcagggagcgggtggaggctggcacgggctggggcgggcatgggacacccacagcatgatgttcctggccacaaagccctattgtccaagcacagtaaacacagcagccgcccccaccccagggaccggggactcggcccgggccacaca

SEQ ID NO: 588180 - DNA, 4001 bp, Homo sapiens
ccagtcaggccggggtggggcggggtgccccaggtggatgggggctggcacattcctcaatcctgtcccggggcaggcgctcccctccccgcagggcacttccagtgtctcagggtctacacgggacttctgtctgcatcctcccacggggctccgtgccctacctgggtgcggcctgggagggtgggaacaaagttctaagccttggggagccctggccctgcctggctgggcccctctcagctcctgggctggcagggctggaatagctggacggtctgagagtgctcacctccctccggcccagcaaggaagtctccagggagctgagaggctgcagcatctgttcacatcctgtggccctacacccagaacacaggcccaggggtgttccctgatcccttcccaggccagtgccaggagtcagagccccaccagagcctccaaccaagggagctgtttatttgacagggaaggaatttgaggagccgtgttagtcctggcccaggacaggcaggtggaggtggtggcggggggtctctgatgggggcctcaaagactgcctctcccctcataggcggactccccgcggggccacgcttgtgctgcaccttcaggtctcatcgaagtccacgccaccagctggtttcttactgggagggaagaggggtgtcactatggcactatggtgtggagaaaggggtggggtccaggattggaccctgggcgcaggaagggggctgtgggagggtacctcttgaacccggggttgatgagcgactctcctggacaccgcctcctgactccaggtccagggccacctctctggggatctgggtctgggggaaaacaggacaggggcagctcctgaacctggcagcatcccaaccacaaccttctccgaatagataggcattctctctggagcgtgagtcttgtttggggggaaactgagttccaggttaaagagcacagccctacttgagtcacaggcggacatgccttacctggtaagaagagctgaggccctgcaggccgggggctcttcctcgggctgacagctgtctcttctgcagctggggaggaaagcccatgggaaccccactcagtgccaggagtgggggcaagagcaggggaccccagtgaaggtatgaggtgcccacccccaatcctacctgccagtcgccgctccaggctccacacgcgttttgccaggcccagtgtcagcgcccgcagcctgggggctgcctctgggcctggtaccttggagaggtcaaaggccagtgccgagggcccccctgaaagcgtcagggatgctctgtcctcctgcagagtcagagccacagcttgctgctcacaggctgccctgggagaggagaggtgcggagagctgtggcagaccctcctcctccccacccgtccttcctccctgcttgggtctcacctgaaccggggggtgatgtcctcagccgcactcaggccaaaacgggctttctagagagcacaggggcttgtcacgagctgcctggaacccgaggcccactgggggcacccgaaacctgcccgaccccagagccctagccaatgggaggactacagctacagggcgggcagagggtgtcagagccttctggggaatcccagatgtctgtcgccccatagacgatctgcactgcaaggaggggtgtggcggctcccagacccgcccagttacccacgagggccgccaggctgtccggcgtgaagcaggtgctccaaagctccgcggcgtcggtcacgctgggggagaaggcctgtcaggcggggccgcccgcggagctccctgcacccctacctccccgcggacccccactcactagaggttgaagccgccgcggtccccctccccgctttcctccccttcgcagtagcacacgaagcggggcggctcggggcccggcggcagcgtgcagagcggcggcgacagcggatccatggcgccgggcgagcgggaacccggcggggcggggcttgggcgccgggaggggcggggctgtgcgggctcagggctcctgcgcggaagaacgacttccggagccgggtgcaggccagtcgcgggcttagggagcttgcgcggggcggagtctggttgggggcggggtctgtgtgtggaggcggggttaggggcggggttatgagggtggggggattcggggcggggctaaaggcacaggccgggccgcgcggacccggtacccgcgcgggcttcaggcgactagaggccgagtttagtgcgcggggcgggccggagcagggcgtcctgggtcagggatccagaggccctgcccccagcgctggcctcgccggtcgtgggctccacggcgcgatcccgggctctggccctcgcgcccgcgagcagccccactcgaacctcgccccctcccgcccccgccccggctccaagtccagccgagtccaggttccctccgtggctctgcggatacatcctggagccccgcccttccatcgtcttcacacacaaaccggaagcttcctaactctaatcgtaagaagttacggttggtccggcaaggtgactcacgcctgtaatcccagcactttgggaggccgaggcgggcagattgcctgaggtcaggagttcgagaccagtctggccaacatggtgaaaccccgtctctactaaaaatacaaaaaaattagccaggtgtggtggcgcacgcctgtgaggcaggggaattgcttgaaccagggaggtggaggttgcagtgagccgagatcgcgccactgcattccagcctgggcaacagagcgagactctgtctcaaacaaacaaaaaaagaagtcacagtacagagcgatctccagggaagaaggcttctgcgctctctgtcccgcgcatggtattcctccagctcctcctacgtgcctgttgtcctaggcctggatatcgatcaacagacaaggtctctgactccctggagcttctaggatccaataggagagacaccacactctcaggcagggccaagcgccaggagaaactgcagcgggtgctatgagggcaggaggaagaggatggctcccaccagggacagggagatcccaggcggaggcctggccacataaataatggttctgttcaaggctcggcaagaaggccaggttggcagcatggtgctgtggggagggccagtgggtctgtaagctacgcttccatatcggagtgctcccacagcaagcctgcctcacctcctcctgcttcccagttcactcccagtcctggctcctgccccctgggcctctgcacatgctgctgtttctgcctggcacatcctttccccagactcacatgcttccttcaggtctttactcaaaagtcactttagtgagaccttccctggtgttgttctgacattgcagcatgctgcccagctctcacatccctctctcctgtcatttccctatttttcacacttctcactgtagaaagtacactttggcttgctttattctggcagctagctccctgttataccctcctgggtttagacttttctgcactcccctccccttgggctggactttattaatgacttgcttctggcaactagaataggacaaaattgctcttgaattgctgggtgtgacatgaggcagccctaaggggatgaccatggccagcaagggaaccgggaagctgacgccccagctgagccttcccatgagaccacatcatcggccggcagcttgaccacagcctcctgaaactttgtgtcaaaggcccagagtcctgcctggctgacactgggagataatgcatgcctgctggttaagcagctgcatttggggtaacctgtcactctgcagtaagtgaccaccaatacacttatttaccctgcttattgtccatcaccccaggaggtccatgagggcagggatttctgtctgttttacctgccagtgtatccgtctcttcagcgcttacacaatggctggcacat

SEQ ID NO: 588181 - DNA, 4001 bp, Homo sapiens
tcttctcggagaaagccacacctgggcactccttgcatgaaccataatttagcacctagtaatgatgggaaagggggtaccgagttaccaagagcaggagaaaggacgagcacagggtatagtgaattctctgggggcatgttgaatttgagatgtctttggatcatccccactaagcaattagatttgtgagtctgaattgcaggtgtattaagcattgtgtttccatttgatagggatttaaattgataaatgtttgttgaataactgaatgaataaataccctcaagggtgggatagagctttaggaacctttcagtttatgccctgcagagatggtgactgtttggctgtgccagttcactcctgccaggaacgaggattccattggttggcaacagcccaggtaatgggagatgggctccttcagctcagaggtgccacttttgttcccaaaaggcagcacacttcctgccctagacagagaggtccctctggcccctgattcctgcccagtctggcctggcaaagggcagcccaaagagtctactgaactctacaaataaccacagaatcccacagagcccagctttgacctttcagggtatcttcccttctccctcaacctgttcctctgttagaggaggaagggctgggatttgacatgcccttgctttctgagccctgtgcctctaactccctcctggaatgaaatctgagttcctaaagggaggaggtttctccccatgagggggtttctgtgtccaatcacacctccctgcctgatgtttgaggctggatgagcctgggatgcctcatgggtctctgagccctaggcgtcctctggcccagacagttcccaggctgttgggaacgccatgtcttctacctccagagtgaatttctctggtttgtaggaggtgccttagttagacccagccaggaagcagagctcctatcgccatacctgggctagcaggggggccaagcctggctcaccaggctgaccagtctagcaagattagaacatcagagcagaggccaggaacagtgctggcagccaggtgcttggctgaggcccctggctcccttagcaggtgggacagctgagcagagctgccctgagcccgcctcccctgctcttccccactgggagggagggctggcaaagccctggctctgcctccctgcagctctgccactcaggtctcccatggtaagtctctccttccccagcacctgtccattcctaccttttggaagcaccaggaggtgggcctgggtcctctgctgcctcttcaagccttcatactgggctcgcaggaactggatgctgagtgggggccctttcccaggggcctgagtcctggagccctcagccattaagtgagacctaagctgccagaagtggggcagggctgggcacgggcagggcaacccctccatccggatccgggagaaaagcaaacacagctgggtggggcaggacctggggaggggagagagagggagggggcagtgagggagaaggagaagtgacgggcaaaaggagggtggaaagaggagtgggactgaggaaggagatagaaaaataagggggaaggagaaagatgaaggggaagaggaggtagggatagggagaaatgtgggggaggagaaaggtgggagacagtggcagtaagaggagaaggaaatgtcagaggaaagaaggggcagcgaagggggaaagactggaggaaggaggtgatagtgacaagcggggattaatggggcgagagaagaaagagagggaggaagatggagacaggcaggaggaggcagggaaaggagtgatggggagtgggagaccgagaagtaaggggaggactgggggagcaaagagaaaggcaagcccagctgctcagagcccttcaggggggtcaagaaggtgtcttattccaggtccttccattgcttgatcctaaagtttagaatccaattcccagtgccacggtgaagtctcccctttcctggcagagctgggactggggctggggagtgctaagctcgcgctctgctcacacattttggactggaacgtggccacttttcagcaaacctgccggttgggtttgcagtagttcaaagaacaccctcgggagcttcacaaggtcggtgcctctggatgtgtgccccgcggccacaccctaaagaaacccagtagcaaagatctccccaagatctccactcagaccccaacacacaccccaggtgaaaattcagccctaaagtcagccatgggacagagcccaggggaatcttggcctcgggccagccctaccccttggacatttggtgcagcctctgccgtctcagcattctccaaccaagtggtaagttaggcatcccctcactctctgcttgccagcctcaacatttccacattgcttttgaatcccagaccctctccctcttacaccagctttgacctagccttgctgcatttggtcaactaagtccctttctatcttctcctatcacggtgcttactgattacccaattacccaatatgtctacagaggcaatggaaacagagtagagcctgaacctacaagacattttggacattaaccagacaagatctagtcatttgatgtgggggagccgtggaagatggagagcaaatcttcactgggtagtatatgttagttttgctagggctgccataacgaaatcccacaaactggatgtcttaaacaacaaacattattgtctcagagttctggaggttagaagtccaaagtcaaggtgtgagcagggttggtttcttcttggagctgtgtgagagtatctgttccatgcctctcaccttgcttctgatggtttgctagcaatctctggtattctttggcttgcaaaaacattgcctaatctctgcctttatcttgacatgatgttcttcctttttatttttttattttattttttttttgagagggagtctcactctgtcgcccaggctggagtgcagtggcgtaatctcagctcactgcaagctctgcctcccgggttcgcatcattctcctgcctcagcctcccgagtagctgggactacaggcacccgccaccgcgcccagctaattttttgtatttttcgtagagacagggtttcaccgtggtctcgatctcctgaccttgtgatccgcccgccttggcctcccaaagtgctgggattacaggcgtgagccaccacacccggcctaatatgatgttcttcctatgtgggtgtctctgtgcccaattttcccctttttataagtacagcaatcacattggattagagctcaatctgtctcaaaaaaataccgagagagatagccaaagcttcctcatacctttttatcggtagatcactctatcatgaaggcaagagcaacccatccatgctggaccagctgcacctgccatgaaatcatggcagtagacatcatggcagtaggctggccacaatggctcacaactgtaatcccagcactttgggaggctgaggtgggtgtattgattgtgccctggagttcaggaccagcctgggcaacatagtgaaactctgtatctacaaaaattagccaggcatggtggcacatgcctgtagtccgagctactcgggtggctgaggtgggatgatcacttgaacccagaagctcgaggctgaaatgagccatgattgcaccactgtacttcagcctgggtaacagagtgagctcctgtctcagaaagaaaagagaagagaagagaagagaagagaagagaagagaagagaagagaagaggaggagagaaataatggcagtagaaatttctactatattttcgcatttacttgtcagccttcatcttttagtattaacagtttttgtctttttctatatgggtgcgtttgtggatattttgatgagaagtaaattgaggctgtctactgctgattgaatgccttttaggagcttaaattccttcttttagtt

SEQ ID NO: 588182 - DNA, 4001 bp, Homo sapiens
gccttctgctttagttgtcagagggtgaattgacaacacgattgattgacagggaatgcaatttactactgctgatataacaaccagaactgaaaatatgacaatcagacttagctcctcagagaggggaaaagtctgtggtcttggccaggaacagatcagttgagtggatttatataccaacacaatggatgacaaaggtgacagtgtcctgtcacgatggcttcagggaatgagcggtgtgggcagctcaaacaacccatctggggctaacgtggagggggagagagctcatcaatcttgagcagatattagatgcggaggccagattgctttcttgtgtgggttttatagctgtgcacattcaactattaaggacaacctttattactaaaatttttgtaggacgggtgcggtggctcacgcccataatcccagcactttgggagaccaaggggagcagatcacggggtcaggagatcaagaccatcctggctaacacggtgaaaccctgtctctactaacaatacaaaaattagctgggcatggtggtgggcgccggtagtcccagctactcgggaggctgaggcaggagaatcacttgaacccaggaggcggaggttgcagtgagccgagatcgtgccattgcactccagcctgggcgacagagtgagactttgtctcaaaaaaaaaaaaaaaaaaaggaaaaattaattttgtcatagaggatgaaactcttaatccttcctttgaagtaattacttttagagagcttgtttggaggttctagcaggggagtgcagctactcatatacccttgcccaaagaacggccctcctctgttggggaaggttgtccgcagcgtctggaaggacgcatgtggacggatgagggaggaaggagacatccacctagccagccagatcagacaaattaaccctggccatcagtggggtgacagatgttgcagccagatcaccctcacatccggaaataattgcttttaaaacgcaatatttgaaaacctgaattttcttgggtaagcaactattatattgctaatttaacgaaactttttttaaaaatattaatatacttaaattttagagcaattttagaattggttagaaagtacaatgttcccacaaccccccttctctgcaccatacacacagctttccccttttttttttactacttatgtttgtgtggtacgtttgttatacttgatgagccggtatcaatgcatggttactaactaaagcccatacttcacagtttacattacggtccattcttggtgttgtgcattctatgagatttcacaatgtgcaattacatatatccactttgatagtatcatacagagcagtgttttttttttttctttgagataggctctcattctgtcaccccagctggagtgcagtggcgtgaacacaggtcactgcagcctcaacctcccaggctcaggtgatcctcccatcagcctcccaagtggcagaggaaaaacaaaggacactgggtgtgagggagaggtgcaaagtcaggaccaagcatccatgggaacacaggggaggatgaaggcactgaggttggggagagagagcagagctatcagtgttgaaggccggaaaggatgagggagtctgcaggctcggcccgatcaactggttccagcttctgtgacctgcctggaggaagatgaaacaggctcctcatccttattggtaaagataaacccaaatcccatctcacctcccagctctggtcttcccaccttagccactgcccacctcactccatctctccttgccaagcctagactggcttagttttcactgctctgtggtctcacagtgccccgtggctatggctgtagatgcacttaccacttgttttacagttgtctcttcacgtggtcatatctgtcttgagtctctgcactcccagggcagaggctgggtctcattcatccagcagccccaaggcccagccccactcctagcatgtgtcattgcttagtgttaagtgactgtccattgtgacatgtggacattctcaaggtcacataagcagctatatgatgctaagcgatggggaattatcttgctgcttggtggggggtgggagacggtggaggatgatggaaaagcatttttaaagagtgaacattgagtagctgagtagctacttttttttctgcctcagcttgtggctgggaccccgggcgcacgccaccacgcctggctaatttatgtatttttctctagagatggggtttcgccatgttgcccaggctggcgtgagtataatttttttttttttttgagatggagtctcactctgtcgcccaggctggagtgcagtggcacgatctcagctcactgcaagctccgcctcccgggttcacgccattctcctgcctcagcctcttgagtagctgggactacaggtgccgtgaatgtaatttttaatcagtcaagtttttccttctatagacatgggcaaagtgcaaataagaaattgagagagataatagaaggtacagctatgctctttgcacctggccagatatgggtagaagtggaccaggggctacctggctgtgcaaattctctccatgagccatgcagccgtgctccagactccattccccacccatgggaggtccctgtggcaatcactgaaaattttcctgaaacagccatttccccagaatgcaatctactgggcatttaaatagtctgattgagttaataacttgtgaacaccgtggcaacatatccataacatgaagcttaccgtgttaagccgttttaggtacacagttctgtggcattcagtacattcacattgttgtgccacctgcactgccttccatctccagagctttttcatcttttccacctgaatctgtgtccatgaaataaatttctcaccccctgtcccctgtcaatggacacctgggttgttcctaccttttggctattgtgaataatgctgttatgaacatggatatacaagaaagttaataattttaagcagaatttaataaatacagaagattcttccaatgagaaaatatttcaaaagcctgccattcaaaggtgttctgcagagcaacagcactggcttcacttgggcctttgctactaatgcagaatctcaggctctgccctggacctttgttacagaatctgctttttttttttttttgagacagttttgctctgtcacccaggctggaatgcagtggtgccatctcatgtcactgcaacctccccacctcccaggttcaagtgattctcctgcctcagcctcctgagtagctgggactagaggcgcccaccactatgtctggctaatttttgtgtatttttagtagagatggggtttcaccatgttggccaggctggtctcgaactcctgacctcaagtgatccactcgcctcagcctcccaaagtgctggattacaggcgtgagctacctactgcgcccggccaagaatctgctttttaacaagacccccaggtgacttatttgcaccttaaagtttgaggactgcttcaagacatagaatccatggagaacaaaaaatgagtactttattttttattctttttttttttgagacagggtcttgctctgtcatccaggctggagtgcagtagtacgatcttggctcactgcaacctctacctcctgggctaaagtgatcctctcaccttggtctcctgagcaacggggactacaggcatgtaccaccatgaccagctaatttttgtattttttgtagagacggcgttttaccacgttgcccaggctggtcttgaactcctgggatcaggtgatctgcccacttttgcctcccaaagtgctgggattacaggcttgagccaacacacctggcccaataaatgggcacttcatcatgaaaagtttcggaatcactagctagtggaagtaaaagcagtaacccatcaaggccctcaaagta

SEQ ID NO: 588183 - DNA, 4001 bp, Homo sapiens
tgagccgagattgcgccattgcactccagcctgggagacagagcgagactccatttcaaaaaaaaaaaaaaaaaaaagactgcaacttattttgcaaataaattggtcctactatattttaaccttggtagaaatggggaactgcagagagaaaaattatgtttcagaagaaaactgtagtacacttgttagattcttaccttgtccattgtttttgcgtttttattatttgcctccggtttggactgaatgctgaattctttgctggcaacaagtctccaaagtaatattttcagatttgcatctcattttgctgacttggaattattagaaattaaaactctgctctttattagagctctgcaaactgatgctaaacaatctggtataaactttgagaaaaatcaccacagcaacttatataaaaacagtcttcatgtctgctgctgtgtaaactactcagaaagtttgcttgaacacctgatttgaactataaaccagaaaaatctgtcagattgctactgcaatctgatgatacttcagaaactctagaacagctagtttatagatagaccacttcagacattactctgtttttcttctgtttccatagaaatgcctcttattaaagatctgtttacctgcattgtatagagaggcctagcccatctgcaatgccatcttctggaatgggagaaaatggtttaactgaactgatgtattttcagaactaagagacttggccgggcacagtggctcacacctgtaatcccagcactgtggaaggccaacatgggtggatcatctgaggccaggagtttgagaccagccagccagcctggcaaacatggtgaaaccccgtctcttccaaaaatacaaaaattagctgggtgtggtgatgcatgcctgtagtcccagctactgaggaggcttaggtgggagaatggcttgaacccaggaggtggaggttgcagtgagccaagatcacaccactgcactccagcctgaaagacagtgagacgctgtctcagaaaaaaaaaaaagagagagaaaaagaaatgagactaattcaagaatatatggacaatatatttaaatttgctcttttttgcttgtcccaaatttttcccactcctttgcctatctctatctaacaacttctaacccaaatctctccaaagccatcaacatggcttttaatatgtgaaagttttttaaagtttcaaagtaggactgacagaaataaaaatattttacccccaaaatatccttctttgatacattttgaggtgtctgttcagagagccagcaaacagaagtagccctgcaaagttgtctttcgtggggagatttgcatcgtacacaatctgccttgatgcagcctggcttcttctgagccttcccttgtttgatgtaggaaagattaactgagagtttgacacctttgaaggtgggaaacatttaccatgtattctttctgaaggctgctacctgtgaggtttcatctacatagcaagaccacctttgctagccaggcctcctcttctctccctgccataacctgtcatgcaccataacctgatttaccaccataacttgttttgggccattctctgagctcccattctcttcgtaacctcaagatggtatgtaagcttctgtaacccactgggcgtttggagcaatcattctgtggttctttcctatgtgcacataaataaattcgtatgccttttctccagtgaatctgccttttgcgagttatttttttcagcaaaccttcagagggcaaaaaggacatttttcccttggctcctacaggggtgttgttttctgagccataataagctcatctggccaggtcttatattttgctcaggggacttggggaaggagaactttgatttaatctaacacgtttttcagatgttcattgtggcacttcttacccactttcacttatcagctgcctctgtaagatcatcacacctgcagctttgcttgacgcagtgagtcctggttgtgattctacagcattctggaatcatgagcacaatgtgcattcacagatgattctgatgcgtgaaatatccactactgtcttctcacttcttactttcactcttcagctgcttatgtaagatcatcatacctgcagatttgcttgactcagtgagtcctggttgccatcctacatcattctggaatcgtgagcactatgtgcgttcacagatgattctgatgtgtggaatatccactactgtctccatcattattttaggtttcaatgaataccttcgagccactgattcaatctaatataacccaatagcaatgataaagattgcagacttactaaacagaaataagcaaatgttgtgaaaaatatattaaccagaatgaactgtatcctgctaattgaatgttatttaagaacatttgattaatgtcatcttcgtggaaaatgctcaacatttaaatacgcaggagctattaggaacaaaatgagatttctgggaaatcattactatgttattttcaatttatgaagtgtgactacaactgtttcatttgggaaaggaaagtagctcagagcagtcggaagaatctgaggaatgcaaaatttatcagagagacaggagagtctcattaaccctatgcccagggttaattgtttaaaggcattttgtatttttcttctattgcctatagtttccagaccagctgataaattacctaaaatgctatgagttgcacaatgtgaccctcacccatatcttcatttttctggaatttgtgatacaaagaacagcgcatagccagtcaatagcttatactattttgagtgagtcactgtggcatgcacctgtaatcccagctacacgggaggctgaggtgagagatcacttgagtacaggagttcaagaccagcctgggcaacacagggggaaaccttgtctcaacaagaagaagaagaaaaaaagaagcttacggtattttaatgaaccaatgtaaatacttggtaaacaactttagaactacctcttcttttttccctttaaaaacccacttataattgccgattggagcatatattctgggcaacttgaatcaatgtccccagggttgcagtcctcaaacttggctcaaataagctctctacttatattaattttgccttggcttcttcctttaggccaacagattgccttttcttctgaaaccccaaagcacctgtggctcactgcagcgattactgggttccatgctttgggaatgctagtctaagtgagaagactccttggggaggagatgggagcccataggaacctgaagattcccctgcagaacagcaggccttttaagctcctccctcctggctttcacttgtaatcagttggaggctccatcaagccaaacaagacatctgcccctttttcagttctctcagctgtcacttttcatctagacttcattagctcctgcctggtctttccccaaaatgcctaatggactttcctggctgatttccttgatcccttacccttgagtctggctgtcttcccaggggagccgcttgtctgacatggcagctggcacagagtaggcactcagtaattttaggccttctgctttagttgtcagagggtgaattgacaacacgattgattgacagggaatgcaatttactactgctgatataacaaccagaactgaaaatatgacaatcagacttagctcctcagagaggggaaaagtctgtggtcttggccaggaacagatcagttgagtggatttatataccaacacaatggatgacaaaggtgacagtgtcctgtcacgatggcttcagggaatgagcggtgtgggcagctcaaacaacccatctggggctaacgtggagggggagagagctcatcaatcttgagcagatattagatgcggaggccagattgctttcttgtgtgggttttatagctgtgcacattcaactattaagg

SEQ ID NO: 588184 - DNA, 4001 bp, Homo sapiens
gtgctttttaaagtccctgctcaggctttttcctcatttaaacattacaactgtattaactgtgtaataagtaaaaagccagcaagcaatcaatgtggggttttttgtgtacaggattgtctacacgtcttgctctgaaaataagttcaggtccttttcatttccacctgtactattaaattacccttcttaggctttctgtccccactgcaagttcttccccttctcaaaatactctagacgaatcctcaacactcctagagtttcttgtgttatgctaactctttaactttaaacttttcatattctccactgttaacagactttgtatttcttagcctggtactcaagtttcttcacaatcagaatccaaaggttcccacctccctgttccatccaacactttagacttctagctccccaaacctatactgtgtagacttctgagccctggcttctgcgttttccttcctgtcaaaatatgagacctgtaatcggcagtgtgcaacaattttttttaaataagcacatttggccaggtaatagcacttccaagaaatttaacaaagttcaaactttagaatgtacacaaacatttcggcttcaagagctttcttttagaacaatgcaaactggcaataacttaaatgctcagtaacaggaagctggttaaattagagcacatatctaaaacaaagcgttaggctggttgcagtggctcatgcctgtaatcccaaaactttgggaggctaaggcaggtggattgcttaagcccaggagtttgagaccagcctgggcaacacggtgagagcttgcctctacaaaaattaataataacaaaacaaagtgttaattttttttttttttttttgagacggagtctcgctctgtcgcccaggccggagtgcagtggcgcgatctcggctcactgcaagcccgcctcccgggttcatgccattctcctgcctcagcctcccgagtagctgggactacaggagcccaccaccacgcccggctgatttttttgtattttttagtagagacgaggtttcaccgtgttagccaggatggtctcgatctcctgacctcgtgatccgcccacctcggcctcccaaagtgctgggattacaggcatgagccgctgcgcccggcccaaagtgttataattaacattaactgccctgttaagatttttttttaaattattttaacgttactaaacaggtcgtatagtacctcactttccaagtgtgtatgcaaagaaacaagcgtggaaggtagacaccaagatattgacaatggctttctctggcaggttattttaattttcttccatttgctttccagtttctaaagctaatatattcctctatgaaaacgtgtgagtaaagagaaacaaattcatgccttgtctttctaggcccaatttaaaactattttctcccccagaaactttcccccttctctgtcctcattcctacagcgcaggatgcctctctatggcatttattaattcctaacccgcctaacaccatctcccatacgctatggcaaggaaacccctaagagaaaagcccctacgctgcacgtagctgctccagctactgagccaagactacgcagacagtacaagtcttataacaaagcggaacaagccagatgacgtcatcccgctcgccaaagcacatcacgtggtctccgcagcacgtgacccgtgccttcgccgtaggtaaaagaatgacgcacgtcagttccagatcgtgcgttttacacccctctcggcaacgaagtccgctgcctgggcctaaacctctccagagtgtggcaccgccggtgttggaagttacctgtctccagagccggcttaacgcagccgcacggggtcgctgtaggccgaggccccgactcctccaagccgcgcatggctactggttgctgaggtgcccacccgacgcattcaaccttccgcttccgctctccatgcctgacgcatgcgcagtggcctcgccggcgaggtcccgcgaacccaggagaatgtgcgcgcgcagggtggcgttgagggaagctttgagttctccatggggcttcgaaccctatcccgggcgtgtgcccctccgggaccccaatctcgtttatcttacacacagctgctacagttgcccgccctcctagggtagaatgcgactccggcttcccgcgctttttgagagggaacacacctccatgaagaactcgcaactatgtctctctcgaaacattattaagtaacctatacgtccagtatgaccctaatttttaagggatgtgtatatgtaattaacacagagcggaaggactggacgttaagaaatgttaagaattctcaggcacctgtggtcccagctacccaggagattgaggcgggaggatcgcttgagcccaggagtttgaggctgcagtgaaccgtgatcgcgccactgcactccagcctgggtgacagagcgagacctcgtatcaaaaaaaaaaaaaaaaaaaaaaaaaaaaaaaaaaaaaaaattatccctgggtggtgggaaatttttccataatataagttatgctttgtcagaaacaaccccaaataagtcttatttcaagtgtggtggatgttataaaggagccctactatgtgctaggggttaaggagtgggaactgtttcttgtgctccacaccttaccggaactgaagtgagaatggaattataagagtcaacatgccatgtgcattgtggggattattgtcgtttctggacagctctgagaagctaagagctaacaagaatcatttaatcccatgcaatgaccagttgtccttgcaatgatagcctatcttttacccacttgtaatgctgtctctcacctttagtaagtttctctgtatataattctctttctgggagaaattttaaaatcttttatctttttatctgttaacatctgcagtataaaatattcaaaagcatatgagtcacagattgaaaagtctaacaaccatgaaaagatgtttccatgtctgtccatttgtcattgatttctggtagaaaataaccagcaggaggagccaaataattaaagattgtggtttaaaaaataagataaaactgatcaaattcatatagtgtcttttggcaggtcatttttacaggacaacttggaaaaggctgccattttttttaggagggacagctctgtgcagctggagaaacaagtttgaaaatcattgttttatatatatatagcgcgcgcgcgtgtgtgtgtatgtgtgtgtttataaaactgggccagaattactgcgcttgccactagatggtggtgttgctaaaaatgatagtcccgctttatctgtggaaagactagatttaaagagatatttgccctcctggagggcatggtagacgttgttaatcacacaaaaaaatatgtaattaccaagtgtgacaagtactgaaatgcaaagctgatttgaatatactagggaaatagattgctacttcttttataggtaaaatttctcttgactgaaaacgggaacttaaatatgcagcacattttttagtctatgatttgaagttcttattatcttgtctggaattatatgtgattatttgcagtttataagacttaacctctcctccagatgtaagacctagaaatctgccttaaagaaatgacctaaataattatgtagtcttcagcttgtactactttgagaaacacttctcagtagagtgattcttaacctctcatttgggtgaaggacccctttgagaatcaactaaagctttgaaccgtcccacacatcattttggctataatatcatatggttcatgggtttctaacctaacatgagaggagggcagcacaaagtcaagctagaaggattcttgcaaaactttaattctgtcacctaaaggttctaagccaagaagaacgccagaagaattttagatgcacagtgatgtttaaacaagaatggtgagaa

SEQ ID NO: 588185 - DNA, 4001 bp, Homo sapiens
gtgcctgtgttctaggaaagggcacccgttgcctagagccagccaccctcacagacgacagcgtcctgggaaatcggctgcatcttaaagtccaaccccctcatggtatatagctagggaaaccgaggcctcagaaggaaggaacctgcccagggtcctccaggttggtaacagccgaaactcaggattggacttgggggtcagggtcacttgggtttgaatttcagctctgctttaccccagcaagttgtacctttctggaaaaaagggaaaataaaaaaggttgtgaggattcaaacacatcaagagttcagacagtggccggtgtggtggctcacgcctgtaatcccagtactttgggaagccaaggcgggtggatcacctgaggtcaggagttcgagaccagcctagccgacgtggtgaaacattgtctctactaaagatgtataaaaattagccaggcgtggtggcaggcgtctgtagtcccagctactcgggaggctgaggcatgagaatcgcttgaacccagaaggcggaggttgcagtgagccaagatcacgccactgtactccagcctgggcaacagagcaagactccgactcaaaaaaaaaaaaaaagctcagacaggatctggccacagcaagtacttagtggatggtcattattatcaatatttcgaactctgtgtcctgggatacaggctaggaggaggaattggggaggcaggtgccccacacccctccaggccaggctttatctgtgtcaagggtacttcccagttccaagcctttgcttctgcctgggacaccaccctcctccccactgttctaagtcctgtctgccaacatccacttaatgtgacctcctgggaagctcttcctgatgctcccaacagcattgcccaatgcagagctacctgaaactattgtgatggatgtacaaccctgggaatacacaaaagcctactgaactgtacagtatgggtaagttgtatagctcaataaagctgttacgccaaacaaaacaaagagcatgcaccatacttacaccacatttactaaatcctcagtgtatgttaacatgccaatctttactataccaaagataataatgacgataaccatttactgaactcttgcatgctagaacctgctaaggattttccttttttttgcatttaattctgacacatcccagtgcagcagacactaatcgttattcctattttatagagggggaaactgaggctgaagaaggtgagaagggagccgatggttctcttcacaccccacccctgcactcgtaagcacgcaaaaggctgctctgtaagctgctgacatttggcaaggctgtgaggctacaccagcaaagccgggtggctggggatgctgaatcggcagagcgacgcccccgcgtccccaactccacgtcccggcccggcccctccgctaagctcaaccctgcctccctcaggtgcctcggtctcccccaggactgaaggaagtggtggagcaaggcccacaagggcgagtgtccccgaagctgccttagtttccccatctgtaaaacgggactggtgacctgcagctctcacggggctgggaaccggctcgcgggtgctcgccctgcatccgagacagcacctacaactccggacccgctcggggcggaatgggtgggctctttgttcccttccgagaccccatctcgattccccttcccgggagggcagccctgaaaatgcaaggttgctccagcagccccctcgggtcacctgcttccccgaagccgtcctcctcgccttccgctcccgcctccaccggcatccccaggtctccgttggggcccgacattgcgggctcgggcgcccgaagggccgcgcgacgatggaacgcggcgaccgtcgcgccgaaagccggcgccggatggaaggtggaggcggcggatagaacacgggccggaagggtagaacgcggcagcagatctccgcccagaggccggtgccccgcccctgaagccggaatcccgcagctcccgctccgccccgccccgcccccagccggaactccgcccccgccgctgttctggccccgccctacctccagactccacccccaccaccggactcccgcctccacctccctcacagtcgaactccgcccattccgcccccggcctcgcccctctcccgggcgctgggcggggccaccacggggctgcccctggaaaagcccaggagtagggaggtccgggaggagcggcgggagaccgtccaagcccatctgctgcttcggcccctccgcgttggcgaaatcgaaaacggggtttccttgttattttttgagatagggcctggccctgtcttccaggctggaatgcagtggggtgatctctgcctcccagcctgaagcgatcctcccacctgagcctccagagtagctgggactacagacggctgcaccacgctggctattgtattttttggagacgggggggggggggggggaggggtttcgccatgttacccaggctgctctcgaactcctgagctcgagccatccacccgcctcagcctaccaaaatgctgggattacaggcacgagctactgggcccagccttggaaacggggtttccacacctcttgtggcttccggatatacctcttgtggcttccggatattcttcttcacagcctcgctgagagtcacgaagggtctccttcctctttgcctctctgcctgcaccccagtggagaggacccaacacccctacccctggatctgggccttcctggtcttcagcgcttctcttagggctcattggttacaacctgtgggtgggaatcaggctggactccagctctggacaagagaaacaggaacattagctaggcggggtggctcccacctgtaatcccagcgctacgggaggccgaggtgggaggattgcttgagcctaggagttggagaccagcctgggaaacatagtgagacaccctactcccacccccgcccactcagccccccccacccccgtctctacagaaagcacaaaaaaaattagccagacctggtggcatgcaccttagttgcagctgtttgggaggctaaggcaggaggatcacttgggcccaggagttcgaggctatagtgagctatgactgcaccactgcactacagcctgggcaacagagtgagaccctgtctttaaaaaaaaaaaaattaattaattaattaaaaataaaatgtttaattagccaggtgtggtggtacacgcctgtagtcccagctactcaggaggctgaggcaggagaatcacttgaactgggaggcagaagttgcagtgagcagagatcgtgcccttgcactccagcctaagcaacagagcaagaccctgtctcaaaaaaaagaaaaaaaaaggccaggcctggtggctcacgcctgtaatcccagcactttgggaggccgaggcgggcagatcacgaggtcaggagtttgagaccagcctgaccaacatggtgaaaacccgtctctactaaaaatacaaaaataagccgggcgtggtggcgtgtgcctgtaatcccagctgctcaggaggctgaggtgggagaatcacttgaacccacgaggcagaggttgcagtgagctgagactgcaccactgcactccagcctggacaacagagcgaaaatccgtctcaaaaaataaataaataaaaagtttggcctggagcagacctacctttgtttgtttgtttgttttgagacagagtcttgctctgttgcccaggctggagtgcagtggcatgatctcagctcactgcaacctctccttcccgggttcaagcaattcttgtgcctcggcctcctgagtagctgggattacatgtgcctgccaccacacccagctaattttttttatttttagtagagacgaggtttcaccatgttgccctggctggtctcaaactcctgacttcaggtgatccacctgccttggct

SEQ ID NO: 588186 - DNA, 4001 bp, Homo sapiens
cctgccatgcttgttgtcctggcaaccccatttcagccctgaaacgtttaggtgctcatcttgctctatcttagagatgaagacctgatgctcagagactaaggaagttgaaaaagggcacacagcgtctcaggggcaggctgggccttcaacggaagggtctatggcccagaggctggatgggctcgggtgtagggtgcaggaaccctccactccacatcaggctacaaactgctgagagctgtctccgtgcactcaggattagggagaagagggggaagaaagacagccgcgccccctgcaggtgatgtggtgattcacacccctaggagccaacagaagccgctgtctaacatccctgccctgaggtccagagaccttgcattttatgcctagggcagggttggtttctgcagctatggtctctcccatagcttagtgcccaccccggtgggaccacagggtttcggaggaccctagagggtcgagccctgggctcctggctcttgggttctttgaactcgcgagcggcaaaaggcgagccccacgcctgagaggcagcatccacctctgcatccccctctttggaaagggcaaacaatgacacctccttccgcggagggtgcagagcgcctcgaccactgggaagaagcagatgggggcagcggggctggggctgggccctaccacgtgctccctaactctgttcaaacaggtcaggaatctgactcctgaaaggcaaatgttagctgagcagattggccctggtgccacgtcagccggactgaagctctccctgcaccgcctgcggccctgctggcgtggcacggatatcaccccctccctcaccagccgccggcccagctggggacaagggtggctcccacccagggaggacctcagccgctgctgggagctcagcctcccgcgatgccatcgggcgggcacccccaccacggcgcctgccctctggaaggagcagcagaggaaggccgcggctcttccctgcccttgccaggcaggtgtgcaggtgagtgggcccggcatggctggccgcttcctcaaccgctcagcctccctcggctcctccgaaaaatgagggcacagaggatagtgcccacctgttccctgcgatcttccgcgggagggcgtggatgctgcctggcctggccgtggcaggcacaggagcgcctacccgcctcacccctccgctgggtcgctctggccgcccgagcgcccgggcccactcgccaccgacgtgcactcagccaaggctgggaccccagcgcccctgtggggctggcggccgggggaacgaaccgagtaggccgcacctccccgggaggacagcagggctggggccagggtgggcctgggagggcccggcgcagcaaaggcgcagggcggagcttggggacgaggagcccgcgcgtcccccttgcgagtcggcggacacccggctccgcgcggtggccgggccgcccctccctgcccgggcctctgtgcagagcgaagggacagtagaggatgcgtcggggaaaccccaggacgctggccagggactggcggcagccatcgaccaacttccggcgccgctcggtgcccgcggccacgccgtaaccaggcaaccagcgcgcaggcgcagtcggccctccgcgtcccgcagctccggccgctcccggcgcatgcgcggccgccgccgcctgccctccagcctcccagcccaacggaagaatgcgaggagcgcgcccgcgtcagggccccgcgcttctcagctgggcggagtagccgttctcggtgcgtgagcctgctggcatcggtcctgcagactgatttcccgcttgtggccttgattgaagaatcccatctcttctcacatcttaaaacgaaaaaagactgggagaaagagccagcgtaaacagggcgacgtactgggacggccccggcgcgcctggccgggcaggtggcgaggggcggggccaagcggtgaggcggcagacggacgccggaggggggcggggccacgggcggggaaggacggccgaggggcggggccaaaggggcgggaacgacaggatgaggcggagaaagacggacgacgggcggggctaagggggcgggacgaaagaatgaggcgaggaacgacggaagaggggcggggccaaggggagcgggaactacaggataaggcgtggaagacgggcggggggcgggacgaaagaatgaggcggggaagaacggacgccggcgaggggcgggggcagagggggcgggacagagggatgaggcggggaggacggacgccggcgaggggcggggccgagggatgggctgtgaagggctgaaagagaacgcgtctgggccgacgagccgaggggcggggccaggggcggggcgcgcgctgatgtcgtaagccggacacgtcggcggcgcggcggccgcggagacccgagccggatgtgccaagatggctgcggcggctgaggtgtctgtgctcgtcgccagcgtcgggtgggctttcgcccgcggctcctgagggatcggtctcagccgcgcgggtgagggggcgagcgcgggtgagggggcgagcgcgggaggaggaaggcggaggccggccggcggagccaggccgtggaggtcggggcgcggaggagaggaggcggctgggcccagccccgagcgggcggtgcatctcgggtcccgccggggccggtcgaggggacagacgtccgggcccccgggccagagcggaaggccggacgcggcgcgggccgccgtgggactcgagggactgacgtggacccggctgggctgcggtgacgccggttcccggggcgggaggctggacccccaggcacccctcgtaagactcttaacttttcaaatgagcgtgtcttgtcctcaccggctagaaggcttccttagcgatgctggtgaagagacacatttacatttgaaccaaagagcagagttgtttgtttgtaatttcttgattgggcgatcaggatgttgcaacagaggccgagggttagaggagtgtgtgtgatccggctcgcccctttgtgatggaagtgttacagtagagccttcagaaacatcagagccatttaaagtcagtttttgccgcttaagaacacttttaaatggcttgtaagttgggtgtggattgtatattaagattttgttttacatgtgtgatgccgatgttaaccaaagaggtatttcccatcccccatgtggcaatacgaagcaaacggaaccgcagacggttcttcctagaagtgatacttttgcaagtttcagcacaatgcagcctccctgcgttttttcctcatcccctttcttaagtttcaggtgctggtatcttgtagacaagaggcaaaatagcgtgtctttcttgttccttgttcctcgtttactgttaatagtggttactacagtgagtctcaaaattgtacttaaagttttctttgaggcagtgggcactttttttttctttttctttgtctttttttgccaaatccagcaagaggtcatggtagtgggtaaatgttaatgtgatttcttcttctgtaagcatctttcatgaataccagggtcttcgtcattttcatcagtgttaggctgctggcctcctctgtcgctggcttcctcttcaacatctaactgtatgtggttgcgattctaacttagaagagttggagttgatcatgtctttgtgtcaagcatcccacagtctgacagggcgtcactagcagccaccgtgagggagactgtaggcagtaggtaaactcaggggcttcctggcacactattgttttcctcacttaaaatatgaagccagtggcagcaagaggagaggggtgtgcatgcattttaaatgcctcagttctgtagccagaactgtactaaaaagagttttgcttaggtatccacatggttacaaggcagtttaactgactagctaggtttatgaatactgcattttcaagatcagctgg

SEQ ID NO: 588187 - DNA, 4001 bp, Homo sapiens
gtactgcaaaactgcatttattgtgctttcatcagaaacgcttctttgagacataaacattgcctgtttttcactccgtttttaaaaaacaaattaagcaggcactcatttatgaaggtacttcaggtaaaagagaggaaaggttcccaaaagggatgtgtgggggccacttgagggctgtctttcatgtcaatctcagccattcctcaggaatttctattttctttttgacactgcccaagtggcaatcccaccctgtcccctgtccctgaccttggacacggggagcagcactgtcccacggagggggagacagaagaagggaagatggtgagcccagccactcctcagcccaattgggtttcctcagcaacatcttaccccagactgtcctctctcttcgctcctctgctccagacaggatggtttccatgtgctgcttctctgcgatctttctttcctcttatgtctttcattatgaaaccaaagtgctagagggattggggactatgggggaccgacaaaatcccatgttcatgaagaaggaagagaatgctcgtgggaggggggctgaggcctgcagacatggggatggaaagttgccgccttagtcatctgaggctgctctaacaggataccatacactgggtggctaataagcaacagatgtttgttcccacagttctgggggctgggaagctcaagagcaaggcaccagcagattcagcatctggtgagggtctgtttcctggtttgtatagaaggtgccttttccctgtgtcctcatatggtgggaagggcaaggcagctctctggggccttttttataagggcactgatcccactcatgaggactttcatgccctgatcatttcccaaaggccccacctcctaataataccatcacattcagacggcagcagcctcctcttcattctgaaaacctccctcaataacaatctttgtttcaaaaggatttcaaggcagagattttgatacccactggggcttttatcctgtttttcagaggtttgagagggttgacaacagctgtggttggaataagaggagttaatggtaatggaaaggaagttgacacctgaggaggacagttggggtcacaggataaagtgcctacaaggtttctatcactgggaaagctgactggctaaccctggctgcttggaacgccgtgtctatgccattccaccttcctcgcaacttggcaggtcttcatccagactccatccctgcattacctttcctggtctccattaagatgcagccttcccgaggacaagggaactgctgggcgacttagacagtgaggccctttgctgctcatcacaaccagcgtctctggaaccccagaaaggcagcctgggatcaggcggaggcagacattacttatggatgaaggggtagagagcgagtcaaggggtagagagagggtctaggtgtaaaacgggcaccaaaccaccacacaggactaccccagtcaggataaaaggtgaggctatttaagcatcagaacgtgctccctcgaccccagagcctgcccagaatgttgggggctgccacctgcttgcctgcgaggcctccatgctctcgggcgctcatgttcccatctgcttgctgcagcactaatgaagaaactcgactgccaggcatgcttggaggaataactcatgaaacagattgtaaagccggggcccatgacttgctcttttgggacttggcacttacgtctctttttccatttgcaccgactgagcaggaggccaggcctccccgcccgggccttgcgagcgaggcccctttcctctgtccgccagttctcccactcggcccccacacccccaggaggagatgcaggggagctctgctgacgccgaggccgcgcctgctccacattccaagcgggacacggcctgagtcccgtgggccctgcccggaggcccctgggtgtgaatctgtttctcccctctcgctggctgccgcgccgccttcaggcttttttttttctcgctctctctcgccgttccccgggcaggcagcgtctgcttttcagcgcgcggacatttccggctggcgggggacagaagggaccgcggccagccagttcccgttcccgttcccgcctggctgcaggcgcagctgcgatgacttcatgactctgcaatggccgcggggccgggaaacagggccgggattgtattaacgggatggaaagtagcaagtttgaaagagacccgtggcagactccacctcctgccttactacctttttttcaaaaattgctcttatctccagcaaaaactccctgagtgccttttccctctcctggcagcactggaaggagggccgccttggaaaacgtgtcctcctcagacctgagtcccccgggccctcctcagccaggatcaatgtagagggaatgccaaatactcaaccgcctttaggtggggttttaggtttgaggggaaataatgaaattttgcatttgaatctgaaaatgagtctggcagcctgagtggttgggtgaagaaatggccctgtttctcctattagcttgtcctcccacctcggggagagtctgacccggtgaggtggccacaagaccctaagagccctgctccaccgagttccagaacgcggagaactgagacccaggcaccacgtgacttgattgtcaagctgcctgacatttcagtgtggtggcaatggacctggtgtgcctgggtgggaggaacatgtggacatggattgtcagatatgactatgtacgtggtggcattgcttgtgatggtgaaaaattggattgtttatcaacagggaatcaaacagggaataagtaaagtgtgtgtgtgctgtatttatatgatggaattgtatacagcagttaaaataaataaaagtgatctagttgaactagcctgggataaggctcaaaaaaaaaatgagcaatttgcagaatgaaactgcagtatgaaaccatttatgtaagaaaagaatgagggcgagggagagagaaagaagaaaagaaaaacaagaaaaaccctcatgaagaaataccgctctctgtgctgcactataggctactatagaccatatataaaaggactgcaaggctaaatccccaaaccccaaactatccaaggggagggttcagagggatagaaattggagaatgtggtcaaaaggcacttttgagtaaatgtcctaatatttcagaagagaatgaattcacttatttcttatgtaattaaaaattcattacaaaataggggaaaatgaagtgttagtggtttacaaacttcatccatccagattgagcagatgtggagctttgccattgacttatttgtgagtaattagtggtttcggtttttttttcttttgctgagatgcagcaaattgatatgattaaaagggtgagacaaggtatgtgtgagtgtgcgtgttcataaatcaacaggtgactgtgttaagtaaccctcaagagagtcctttttcaagtagttagtctgtcatacgtggccttgctgagccgcagggtcatcatcccgtcaggccaaacacggggctgcagcatttattgctctaattgtgctgtttagaaacaggtgacacacaaaggctagggagccctgatctgtttttggagacctgccgtctccctttgtaccttccacttggaaaatcttgcaggtagacatcaattagcaatgcaaacaccatgttggaaattcactttatttgggggcttgttgggggggggtggtcaggtaagtgaataatttagctaagaattctgcaaacccaaaggtagtgattactatagacagagattttaaaatatggatgaagcttgtgtgtgtgtgtgtgtgtgtgtagaattaacaatacaaaattttaaaattattttaaaaacattcttttattaaaggagaatatttaaaattagaaaataaattataaacttattaggaaatagcttg

SEQ ID NO: 588188 - DNA, 4001 bp, Homo sapiens
aaccccagtcgtgggtgagtcacctcctgtacattttccgaccctaagcttgggttcagaaatcagggattgaattggtcctagaagctgtttagctagtgccatccagaggccaaatgttgtcctcgatatagctgggtggggcgggggaagcaaaaggaaaaaggaaaagaagggggaaatttacatatatgtacatacattttacacatatgtacatgtatattatacatatgcatacatgtatatatgatagatgtaaacggtatgttatatgggtgcatacacaaatgcatatgcatgtatgtgtgtgtgtgtgtgtgtgtgtgtgtgtgtacatattgctcagcgtgggcaccacacactaactcaccatggagaataactccatacgccctcactttacacttcagtaggaagaagttggctcactactaactacttgaacaaaagcaacgacctaaccttaatgcaggtagtcagaggtggcggacgtgattctctccttcatccaagaataatgggccccacctgcctgtcctgcctgtccactcagagtggctcttctcacgtagaagtaagtgaaggaccttgttccactttgagaggcctaagaaaggagcctattcgatggaaaggcacgagtgtgggaagccagcctcccccaggtgcagcctgcgcctaggcagtatccttcctcctctcaggaccgagtttagggaaggcaagaggagggagtcaatgttttgccaggagccaattaactcagttaattctagcacgggttcccttttccccaaaacaaaaacaaaccgccaccaccacctctgggctctactcagcgcctggcggtcacacaaataattgttgttgaatccacggttaccacctgcgccttccactcccgcacctgggacgcggggcgcatttttaaaggcgcactgccctccagcggcgcaagataaattcgcctcgaggcttgctccctgacccccaagcctcagcctgacttctccagtggcccccgggaaggtgtggccgccacagcagtgttggtttcccatcagcgggaagcgaggctaaaggtggggaggagggaagtgtaatggaagggaaagtgatccagcccgaaaccgcagctccctcattcttgtctgcggagcctcctaggccaaagattatgctttttttctcttagggttgtaatttgggtaagaaattagtatgatcgaacggaaatgaacattcgacgtgatgcttccaggacagacacggagccaccgctgcatagacgtaccccaggcgtgcagcggaaccggagaggcggcctttaccctgggagggctggcagccacgacttagactgggcgtgtgcgacctatctgtcaccctgtgggttcactctgtgggaaaccacagcagcacccattgcagccttaccccatgtcaggcgctgtcccgaggtcccgcagaaattaccctattcaatcttcccaatcagtccctttagtggtgccattatcatcccactgtgaggatggggaaaccgaggctgagagaggcgacgcgacctgcatgggggtccaggcctgtctggaccagagctggagcttcccacgctgcgctcggaccccgggccgcggggccagggcgctgcgggtggggacccccggcggcgcaggtgcccggagccggcgacagcgaaagcgcggtgggcgtggggtgctcaccttgacgatgagagggttctgaaacatggagtcccgcacgacccccagccgctcgttctccatgccggaacggatgtccgccacggtcaggggccgccgcgggggcgggcagacctggctgaccgtgcggcgcacaggctgctgctgcttcctccatcgcgtgaggtccgggccggagctcctggcctctggcatccttgaggtcgccggggagccggcccgcgggctggtttgggcgcgcttccccacgtcgggcacagcctggagctccgaagggcctgccgggcggcccgggccgcaccaccgggatcctgagggggaaactcagatgccaggacccctccggagccaggcgcgccccgctcgcgccggcccctcatcgcaaagagccccggagcaatgcaggagccccgcgggatcctcagggcgtctcctgggccccgcgttgcagactgggagaggaaagaaaaccaagaccacccctggaggacgaatgcaacggcccgtctccttggcgacgggacgccaacagagcccggctcggcttgtacttttctttcaagaaactcttggtggctaccagtgtggacttgtttggagttttcctgaatcgatacaggagaaccgagaatctccagtgggttgcgttcaaagcggcgtggctcatagagggtcatttacatttgtcttccaagtcgaagactccatcctctgctcacccccattccactcacaacccctccccacctctgctctttgcgccacacacacacctgagacagagcactaaatgcattccaagcctgatgctgatgctgacccactgggaggactcgggcaagtcaccctcttggatcctaagggctttttttctttttttcctgtgagatgggtgacaaggaaacgctagagttggattacatcaatggttcccaaatttaagcaacagaatgaagggaaattgaaaaatacagatttgggctgggcttggctgctcacccatgtaatcccattgctttgggaagcctaggagggaggatggcctgagcccaggagtttgagaccagcatgggcaacatggtgaggtctcatctctaccaaaaattaaaaaaattacccaggtgtgctggcacacacctgtggtcccagctatgggggaggctgaggcaggaggatcacttgaggaggttgagactacaatgagccgtgtttcggcaactacattccagtctggatgacagaatgagaccatgtgccaaaaaaagaaaaacgaagattcacaggactcaccccagactcactaaatcagaatatctggaaatggcatctgaggctctccttttttttttttttttaagagacggagtcttgctctgataatgacatgagccacctcaccaggccagatgctgcatttttaaaaatccccttacccacccacccacaacttggtgaaaaagttcaaacctacagaaaagttgaaagtcgaaagaagaatacaatgaaaatacatataggcttcacctagattcggttagattttgaagggaaggggagggttaaagaaagagtggcggctctacagcaaattcaggctttatgtccagcatgagacctacagaggtgggagaccagcttaatgccagtgcctaccgctgcttacaggctggagaaattataggcctgggcggggaggggcccggtgggtatggcctgctgcccgggaagatgttgataaggtattcccatgatgaggcagtttggcccttgttctggtggaacgtgatgttcctgtcactttctcccagcagaatatgataagaggcaggctgtttctcactgcctgaacccccgtggaatgtttcactttaagcaaggtctgcaaaatggcagggggcttacaaaatggtgcagtttggactaacagattcacccgtccccagcactggtcacattttcttgctctctctctgtgagcatgcacatacacacattacagaatcacctgaaaaatatctgtcaacaccatatttaaccctaagtacgtcatcatgtagcaaggacattcccatgtgtaactacaatgtcattatcatgtccgaagattttaatgtgatacaatagtgtttaatataaaatccattgcaaagttgagactctgcatttgaaaaaaaaaaaaaaaagcttcccaggtgattggtgcagttggaggaggattggaaaccactattggagttttcctgaatcgatactggatgatatctaatctct

SEQ ID NO: 588189 - DNA, 4001 bp, Homo sapiens
attggagcaggtcatcaggtcgtcctcgtcggcgctgggttcgggggacgcgtcggccgcctctcccggggccgcgggctcctcggcgctgccggccgaggcggggggcgagcgtggcggcgccagcgcgggggccccggagcccgcgggccgcgagtccagcagtcggcgcagttgggggcccaggcagtcggccgcgggctctgaggcctggccggcggtgggtcgcgagtcgatgaccaggtccgtgatgagctcgtccagctgctctaggctccgctggcggccagaggtggggccgtcgggggccgcgtggggaggtggccgcgtgcggcccccgggcaactcccaggccctggcgctcgggcgctcggtggcgcgcaggtcattgtcagtgatggtgatctcgggcgtcacgtaccagttgcggcccaggccctcgcccgcgcggcccttctccgtcagcgacgtctcggacagggacagtgcggcgtagcgtctgggagaggtggacaggttcacgacgacgggcgggcgccggccttcgggggacacgcctcgcggctcccgcacctcgcgccccagcaggttctcgtagctgcggccgcggcccaacgggtcttctcggcgcggccccggggccagaatgttgtcccaggagcgcgagtagtggcggctgtcggtggccagccggggcggactggtgccggtgccgccgtgccaggaggcgagcaacgggtcggggtcagagggcggcaccacttgcagggtgcggtacggtcgcgggccccagtccgcccaggccgggctgctgcgcgggtgcgggtacgtccgagccaggacgtcacgctcgcggtaccttccgaagtcctccgtgtaaaaggggcgggcggtggagtgggcccggggctcctcggggacatagcggggcccgtagggcaggccgtaggctcgtggagcctccccatagtaggagcgggagggcggttcctggattgggaaggtgcgcacctctcctgcgtagtagccgcccatgcgccttggactgggccccgagagctcctcggacggatagggcctggggtagtaggcgtcgaaggttgggccgggactggctgcaaagctgccccggaagccttggggctcctctgtatagaagaactgggtggggcccggcggggtggtgaagggcagactgcggcgctcggcgtagtcccggggcccaggcaggggcccgtcgcagtagaacgcccggggatccgcacagtatgagtcgctgggcgtcggggtgcgcgacagcgccatgtggcggggcccgggcaccgtgaggccgtggaactgcggggcggggcgggcccagtgcgcggcctcggtgggcccgcaggaccgcgagccccgggtggcgtgctggagcactgcgtcgtctggcttgatgtccaggcggcagcgcacgtggggggcgggacccgcgggtggctcgggcggtgcgcagcggcccgcggcggcgcacaggggcgcgacgcggccggggccgccccgctgcggctgcaacttgatgggatgcagctcgttggcaagggcgcggagcgccgggtacgcgggctcccggcgcggcgatgcctcggcccgcgccgcacgctgggcctcccgccctcggcggggcaacaccggcggcgaggcgggcgcgggcgtcaggcccgggggcgcgcggggcgcactcttggagcgggcgcggcggcgtggctcggcttcgcgggtccgggcgcgcggcacagcggactccggcggcggtggctccggcagggtctccatggccggcccgtccagcgcctccaggaagtcgaagctgcggcagtggcgcttgttgaaaggcgcgggctcagcaggccgggccacggatcgctcacatggcgagcacttggacgcgggtcccggggtcgccaccttgatgtcctggtacacggtcgacaccagcaggtccggagggtccgtacgggtcatcttaaaagaggtccccaggctggcggctccagctcacactgccttgcggggcttttgccctggggggagacgcgggtcagggcggccccctccgcagcccaggccccgctactcccccacgctggcccggcttacctggggcgcagcgggcggagcagccctggctgcgggcctgggccgagaacgcgggcgcttcctccatgccggggtcagaagcacctgcgggaggaacccagctgtccaggcgcccgtcctgcccgtccccccgtcctctccctgcgatggggcgggcgggccagaaaggcttagccgtggttgtggttcccgcggcgggagctcccgcgtgaagctccagggcctcccctcccccgactagtgacggcggggtcggctcgggtggacccctttccgggtggggtaggggagtgggggcgtggtcctggggctgcgccctctggtgtccgcagttggaaggacgggccgcatttgggccttatttataggtgttgccccaggagacgtcagtgactgcgcccccgtcacagcgcccactgcagagcgacccctccgatcgcgcacagtggaaggcgagtccctgggcctcagccttagccggctctgcaccaagtgggtgacaccaaccaccccacctgctggccgggccgagcacagagccccgcccccagcactgcaaggacccacgcctaggtgccctcaacttcccgcgagccccaggccagaaaaatgcccccagagagcatacccgggccctaaatctccctttcctctgccgacaccttttctgaccccaagtatctttgggtggttgaaacaaggccccagctttgtgtaaacgcacaggacacccccctagggtttgcaaggcagtcccaagccatcgagccgcgagctcgtggcagcccctcctctgagctgcgcaccaggcctggaagctgcccgctgggggtgggcagggcggagggtgggggaagccccactgctttgcaggagagggccctccccatttcgctcagaaggttccatggaaacctgcatttcttaggcccccacgcggcaggctggcctgggttcagatgtgggctgccaacccctctgtgatcccagagccagctggggggtgcgtcagagagtggccacaggcctggcctctgcacacccaacacctggtctggggggtctaccccagagtgagctggggaaagcgggtacctggccaggccccttgcagggcagaacctcaggtggatgggcctctcggggtctggccgggtcccccctctgtgtcccaggtgtgcaggggcttcctgctggcagggctgtttttctgggtcagggccacgagtcccaggccttgtgcccatcccagcctcccccgcccacccccccatctcccccctccaccccacccgtggcaggactgtctaccctcctgctccctctttcatgctaagctcaaggccaggccggaatccggccggatgacagggtgtgaggctccaccccagggaggtgacagtcggccttgctggctgcagctgtcggtgacaccccctcccgtggggatgggggtggggtcggccctctcccgggcccaaggccttctggagcccacggagatggctggcggccttccccacctcccagccctgccttgccttgccttgccctggctgggagcggcccttcaagggatacagccggtgttgcctgggggcggggactccccatcctttcggctgccctaaggcagcttcccccgcccatgacggtgacacactcagcaactcggcccctagccccttacctgggtgctgctctggctgtgccccggtgggctgtgccacccccaggtcggctcctctgtgtccccggcactgctgcgtccccggcacgggcagaagcttccaggcagcagcgcggatcctggcctggctgctcagtgctgcccctgatggcagctgaaggggctgtacttaaag

SEQ ID NO: 588190 - DNA, 4001 bp, Homo sapiens
ttgtgcccagctggctctagagcgtgcagaaggggcctgtgtcgtggcgcttgggtctgcgtacaccctggatgaccacgccaggcgccgaagggaagcgtgagttgcagtcctccacgtggtaggcggctgggccaggggttcgggctgccgaaagagaaggctgggagccccacccaggtagcagccccaactcaaacctggctcccagttcccacccccggcccctgaacccttgtcctcacattgcccacccatgccccatccctagccctcttctctccaggcctccttacaggtgctgagccaggaggtgaacgcaggggagcggctcatcgagaaggccggcgagcgggggctctgcaggcggctcccaggaaggatattgtaggtgttggggccagggcatctcttgccaggtgcctgcaaagaggcctgaagcagggactggggctgcaccctgaggcccagccccctagccccaggcagccctaggtgggtgtggccttcaggtgtcttggaagcggagtggcagcctctgaagctgaaggcggggaaggcgggccggctgagcagctggtagtgggctggcgagggccactgcgagggggtaggagacgggctgcagggcagggtgctccccacggaccctcagccagcccccctttggccccactggaacccccagccccctgcctgcgtggactccccgcccccttcctgcccagcccccaaccttttgctcttggtcgaagtcagctttctgcgtgaaggggctttcgctctggaaccacaaagtctgccatgccctgcggccaccgccctctgtagttggaggatggagagagagaaggctgggagccccacccaggtgacagtccccactcgaacctgtctcccggttcccaccctcggcccctgaacccttgtcttcacaatgtccacccatgccccagccctagccctcctctctccaggcctccttacaggtgctgagcctagaggtgaacgcagggaagggtggaggggccctcaggccgtgggggtttcagcacagaggcaaaggcccccattcccagggtgagggacaggcccggtggttgggcctcagggaggggacacacacctcggccctggtgcttgcagccgatgctgtagtgggggtgtggggaggactctcgtacggacgggctcggcacctggtacctggtggggctggggacttccaggtcagctgtgatcagggggcgttgctccagcactggccacaggaagcaagctctgggcctgggctcctttcagcgggcccctcccacagccccccaaagaccagcttgggggtggggtggccaggaccctcactcacatagttccctcagggtctgggtgtaggtgggcagggactcctggggggtgcccgtctgtaacctgaggccaactgggatctccttcatctttgggggctgtgtctcatcccaggccatccccggctccgggcccaacaacagcacagatgccttgggcctgcaagggagaccagcagccactgtctcagcccccggccgctcccagccacatgccccacagcctgtcccctctattgtccctcagcccccggctgctcccagccacgtgccccacagcctgtccccacactgtccctcagcccctggccgctcccagccgcctgtcccctctactgtccctcagcccctggccgctcccagccgcctgccccacagcctgtccccacactgtccctcagtcccccagccgcctgcccagcaacctgccccccacactgtccctcagccccctggccactcccagctggcccgccccttctccccctctccgccagttactgggtgggctctggttgtgtctgcctcaggtgaccatgggtccagtgtttgcctccattgatgtaaaaatttgccaggaatttcactgccttctggtcagaattcatcatcagagtctcctggctctcttccccaacggcaccacggagctctgtgacctcactggtaggcccctctgttgctgggactcctgaggaagacacattgtctggccctggaggggctgccccgggccccgacccctggtgggcccctcccccactaactagatgatcagcgggtccgcctgggccaggacccccagcctgccccggtgactcctggcccagccctctccctccccgcaacctttccagccttctcccctctcctgcaccctggggtctcctgggagtctggggtccactctagcaggtctgggaggactgaggcctcagcagagggggtggagggaacaggacccaccggcatccaccaagccctaggagatgcccagctgtgtctggccagccaggaccccctgggggtaggagggaggggcccaggaaggctccctggaggaagaggaggagccgccaccccatctggatttccacttaagggaaaagcaaatccacatcagatgggtctgacaccagaggcaggccgggccttggagcccagccagggctggggtgtgagggcctacctctcacctgggggcacagaggctagagggtgtcacagatggccgggctgccagagctgcaaaggaacagccagcctgtgtgagcaagagcccgtgtgggcaccagggccctcactgtgtggtctctggagctgaccaccagttggtcccagccctgaccttggcccagaatccaccagggcagggcctgtgaacagggccaacttggggccctcctccgccctctctggatgcctccccttcagcactgggcctgccaggcagacagatggacacgtgcttgaggaaacacgggttttatctgggcgaggggttcacgcctgtgctccggggcccctgcccaggttgtgccgggttcagagttgactggctgccagtggaacagagtgtactttgctaatgaagcccttgtcattggacagataggctcctccaggtcctccctgccctgtaataaacgttgccaccgtgaatggtgctgctggacatccatcctctccttgagaaggtgcgtgggggaaatgctctctcagtgtccggctctgcgcccacaccaccacagccgtcacagaaggaggcctctgcccaaatgttgagggaggggggttgttccccacacaccaagctgggtgtcctctaattcatttccttcaccatttacctggagatggtgtcagatcccacagggtgagagctccatcccaagaaggcctccagacacagataggggcagggcctccagacacacaccagtcgcaagcctgggcccctggaacttctgaccaactagcttcaatttggggttcctgtgacaccgtctttgggttaatttgctggagccactcatagaactagggaagttatgacgtttactggtttattgtaaagggtattgattgcaaaggataccaatgaagaagcgtagagagaggcacggggaggggctggcgcttccatgtcctcgctagttgccgccctctgggaacctccaggtgttcccctgtccagaagttccctgagcctcagtcctcttgggattttacggaagcttcctgatgtcagcattcctgcccccagggcttaggtgggacctctcctggaagggtcttaagacccacagtcagaaaggtgagaatgttagcgtcctgccttggggcaggtgaaaggagggcaggaggtaaaagtcccccgcccgcaccccccaagcatcacccacccaacattctaacaaaaggccctaccaagggctatgggaatatgggaattaccagccaggaacggtggaggaaaaccagcgtctaccagaatgccagacagcttcttaggagtggaagcaatggtcccagtttgcagtgtcttgtatggacgtgatccataccaacttggtttccagaaggcaccacccaaattagaggcccttctcactgtgaccctgccggcagtaagcc

SEQ ID NO: 588191 - DNA, 4001 bp, Homo sapiens
ccttcagggtgcgtgtgcaaatgagtgtgtgcgcgttagacttacctaaggttcggatatgggtagtatgacggcgggggagttgtaacagcacactgcattccgggccggtgctcgtagggaggtacacatctggagaaggaggaagccgcgagcatggaggggttgggccttttgactctcatcccccgatttagaccaagcccctgggcggcgcttcaggtgtccgtcccaaggctcggaaatcctcctctccttcttcctcacccttcaaaacccccactgcagcaccgattcgggaaccccccttggaagactccctcccggcaaggcctcatttctgccgttgaggaaagagcgctggaccctggggaaggtcgggctccgggcgttgaggacctggaaccaccggatccccgccactggacagcaatttctccagcagtaggacgaggcatcatttctgagcttcctagaggctcagacactttcccactcccctatgcccttgagagggataagactcagtcttgcacaatgaatcaggctctctcggcctggagaggggcgggggatcactatggacccccactgcacagctctctgggctaccgcggacaaagttctcccaggcttggctgccgccgcgtgcaggacgaatgccgagctgcagtctgggctccagctgtgcgctcgggcctcagttttcttagcagtaacacgcgagggtgcctacctccgcaggtggtgcgggatccgaggaggccagagccattctggtaaagtggtcaccatttcccggctcacgtagcccccaggaatgaccgcacccactaccgacggtgacgggggaccagcaagagaggacatttttctgagaacgcagggcactccacaggctagaacctgcgtctctagggccaggagtccaggaaagggggcagggccaaggagatgggggaagaggatgcgactgatgtgcggggtttcttcctcaaaaaccctctgacgggacctccagagcatatagagaggccaggttgaccttgagcccagtttgagagggacaggggtcggggacttggagtaaccttcgtgctggttctcccgcctcagttgttagttcaggccttggagcccgagggcgggacacggcagggcctcgagagcgtgcagcgcggggctagagcaggctgggggcctgcacggaagctggccgggctggaagggggcggggttctggggcggggcttgtgtggggtggagcccggctgaggcgggcggagccctgcgaaccttacagtcggttgctcccggcaccaaggccgcaggcggcggtcggtgcagggcgccccgctggcgtagtagtccatcccgcgcagacagtagtggcggcccgagcaagcactttcgtaaccatggaagggcaggcggccgggcagcgggtccacgcacccgcatcggggcgtgatccgcggcagctgctggttccgcgacagtgagttcagcatgttcaccatcacttcgcgctctgctcccgcgggtccccagcgcaggagacccaaagacagatgcacagggatgggaagaggccgagtcacggacagagtgaggcggagacaaaagccaggacggatagattcagggttccaccctctccaggaccctcggcctcctccccgtccttcaggtacccatcccgccctcctcccggccttccccaaccctctccacccgttctttccaacgccccactaccactctttaccgtaggcattgagccgctccggcctaggagggcattccaagggcattcctcgaactgctgtctccatcctggcctcctggaagcggcacacatgctacctcaagctctgacctggcagagctgctcccttttaggggtcctcccagaacacccagacctatcgccacgccgcaacttctcccgcccttcagcagctccccacctctccagggctctgtgttggcggctgtcaccgggcaacgcttttacatcgccaacaggggcggggtggggtaggaagggctgaaggtggatggggtttggctcctgggcctgtgacaaccctgtctcagcgtttgcctttgattttacccctctttgtctagctgactctgtttagctgtgtctgggtgtctctctaatagggggttttcaatattgcttgtcattccggagaacttgtgaaagattcgattcttgaggaagttctaattcaaaagggttccatcaacccagggtcagccatcagcctgcagttaagagccccggctctggttttgggtcctctcaggtgcccttgagtttgcggccgtggctggaccttctcctatgtccttggaagactctcctgtatctgcactgctattgagtagccttagtctttctccttccgtctgtgctcacatcacaaaggaggagaaggtggagcagggagattcattgtatcactgactccttggctagccccagtatcacagaggccagactatatggggaggggccagctggcaagcttcggaaaggtagtatatcaaggagtgcacaccagtcatgtccctacagagcccagccagggattggagcccagggcacccaatccccagagattgagagccaggggcccagcacagccctacttttgggttcctttttcaactaaaaaaattcaaacccggccaggtgcagtggctcatgccggtaatcccagcattttaggaggccgaggcaggtggatcacttgaggccaggagtccaagaccagcctggccaacatggcaagatccccgtctctactaacaatacaaaaattagccagatgtgatggcgcatgcctgtaatcccagctgctcgggagtgtgaggtagcagaattgcttgaacccaggaggcagaggttgcagtgagccaaggttgcgccactgcgctccagcctgggtgatagagtgagactctatctaaaaaaaaaaaaaaatacaaactctagtttcacagatgcggaagagctctggggcatttgttgggaaagcaatgaggacctaatggtgaaatatcagtcactgtagtttgggaggtggtggggtatgcgtgtcccagtccccagacgtctgtgctgggtgcaacagataccttaggcagccgaggaaggtaggtggtatacttgttgcagcagctgctgttgtaaggttccatcctccatgtgttgtaccagtcactgcccaggtagtttgggctgcatttgtctgctggataataggggtggagatgtcaaatagtgttacttcttactctactccaggatctgagatcccctacatgtttctcttccgattcccagcacaaagctgaccctcacagactgtcctcaagccagagaccccaagcccagccgggcctacacttgtcttaaacactgagatgcagcccatgtcccatctaaggcaaccttctgagtttagtctggatccactgtgccagccacttttcatcctgccactaccctttttgaatcagccagcctggacaaggagcctcttcccaattcctccctctctctcatcttctactctaggctctaaggtttgcctattctgcctccttcaaaatcactcgaatctggccaggcaaggtggctcatgcctgtaatcctagcactttgggaggccagggcaggcagatcacttgaggtcaggagttcgagaccagcctggccaacatggcaaaatcctgtctctactaaaatacaaaaattagttgggcatggttggtgtgcgcctgtaaacccagctactcagggggctgaggcatgagaatagctcaaaccagggaggcagatgtttcagtgagccaaggtcatgccactgcactccagcctgggtgacagatcaagactcagtctcaataaatagataaataacttgaatctacttcctcttccagtgccccatgatctcacttccatatctttgcagcacctt

SEQ ID NO: 588192 - DNA, 4001 bp, Homo sapiens
atctactttttaaaattcccttctattgagtatggagtcaggcactctcatattttgcttgtggaaatgtaaattgttacaacccttacttattatggcaatttgaggtatatagcaaaagttttaaaaatgtgtatatcttttctcctaacaatttcatgtctagtaatttatcctaagggaataattggaaatgtgtacaaagatacatgtataagaatgattatactagcaaaattttataaagtacctaaattttcaataagattccttaaatacaccattttgtaataaattttatttatttttataataaacaatatttgcttcctgaaagggcatacgataatatattaacaatggtaattttaggtagtaggattttagaccttttttctttgtgcttctctgagttatctgcattttctacattcagcgtatatttattttggagttagacaaaataaattattttaaaaattctctcctattcaacgaattccttttttcattgtgacaatctccttatctcccacctacatcctccttcctcatctgttcacccctcgctggccttcctgccctcaaccccagcccctgcaattccctgacactgtggccagagtggcctaactcacaattgaaccatgactctccctcccaggttcaaaaacctggagccttatgtccacgctccacaacatagccagagaggcccttcttggtctgcagactcctctctcacccaaggactaaactctcctgctctaacagtttcagtttctggtaggtccctgcccacaggctgccttttctcctgactgtcttctgctggaagcctcctcctcctggatccctcagtaggtctgcccttcaggttgggcagcgctctcccctttctggctctccacctctgctggtgcatgttccacatcgggcaactctactttgttcacttgtttgctgtgagctcctcaaaggcaagggctggcccttcccttttgtatcctgggttgcctacagatgaagatactcagcaaagttggatggtacacacagataaattctcttaggcagagtcacagttagactcacagatttcctcccacctggccaccaatcttcaagcacagacacaagtaaactgtgatacatatagataaaggcatgcatataggacagtttccggcctattccacaggcagcctcagggcctttgcactttgtgatcacttgtctggaactttcagctcttctattctttcaggtcttcatgtggctagttctatctcatctttccagtctcagtttattgtcaccttgagagagggttttccatgacctaagtagccctccctttccatttccacttccactactctgtttatttcctttacagtatttttgaagaatttataaaactcatgtttatttcttattatctgcctgttcctacctcctaccctaatgtaattccatgaaggcaggattttgtgctgttttacataccattgtaaattctgtgcctaggtaaatgaataaaacacacacatacacaaagctacaaatcattacaaacatacattgccaggcatccagactggccatacactctggcctgcccctccccaccaatctcccacttaccggagtcagaaacttgttggcttcccaggcacacaggggtgggtccttatagacctccttgatggaggtgggagccctgtaggagtcactgtaggtactgataggggtcctggtcttacgggagaacaggaacatggtgtggtcttggagatgccgtggtgggctctacctgtcaagggctcctgctggacatcagtgaccacccttcccctagacaggccacacctccagcctggcaggtgcccttagctgctataatcccctcctgcagaggatctctcagcttccttccccaacagccttcctgctcccaccccacactgatgccccctccaggatgggcactgcccattgtgatatcacctggctcagccccatccctgggaaggtgaggaggtctaattccctccctgctcctgaccccctcctgcctcaagcctatcaaaagagcccaatttctaagagttcagagggcctctggagatcttctaggtcaggtttctcactgttgaagagaaacagaggttcggaggggttgtgactcacccagggtcatgcagcaggtcagtggcatgcctgggaacccacaggtggaggtggagtaacatgtgtgcccagaggaccagttctgtctgcttcccagcccatctgccccttgcccacaccccagggagggagctgaggctggcttgtttgatgcttttaatatcattatttgtgttacacgatacacaaccaaggatgatggtcaatactgcaatgaaaatgttaaaaaaaatattatacacggctcatgtcttccacacaccttcctggaaataaattagtgagcacggagaaacctggctgggtggcagccacagctgagagaggagggagtgttaaggcagtatctacaaggggaagggtggcaggagggcaagctaaggcctagattcttccctccaacctcccagacagggaaggagggagccacacccctccctagacacagaagctgccactgccagcttcctgcctctctctgccacacatgcactgcctcagttggaagcccttgcctgccagggaactagtatgtcctgtggggggggagattttccctggtgtctcagggccacagagattgaacaatgggcccgagtcacactgcaagtcagcagcaaaggcagcagtctaaatgagcccccaaaaagaggaggtacccatgttctagaaaggtgagccaaggagccccggggtggtggtggtggtagtgggagggctggctctggggtccagatgatgggggcacaggggttggggggatgttgatctgggtgggagaggtgggttcagatgggggccagtatgggccttgtgggtcctgcaggtaccttctctgtccttgcctccctttgtttggcattttctcatcatctaacttgggtccctgcactagaggaggtaggaatgggttggcggagtggggggtggtgagctgtaccccaatattttggagctggcagttcctgggtatgatgcagggagaggtaccacccttcctaagccaacagtctcactccctcctctcattgctccccattccagctcccacctcccaggattggtgtccagagagtgggctgtgggtgagtctactgcatgcctgcagcatgtgagtggatccatgggagtggatccaccagcacatgtggggtgttagcatgagatgatccacctgggcctgtgctataaggtatgtgggcacaggcctgtgcagtcttaggctatctgtgctttcatttttcttcacacggtggcaggtctacactgcccagccccaggggtgggccttcctcacctcttccctcttgattttcagtctcagctttccagtcccctcccccaaaccagcaatagcagaagcagctgtatacacatcttgatctacagacaccctatacagccacacacaatagacaaccctccaacacacacacacattcacagacaaacacgtaatcccaaacagagccacatgtgctcagacatacacagtcctgataggaactgccccttcgcctttctacagagacacacaactccgccccaccccaacctttaggtatactgagacacacagagattgccccctccccaccacagaaatttctatgaagaaactctttcaggtataaaaggatcttcaacataatttcagctgctgttcattttctagttgaggaaactgaagacgagagaaagcaagtggcttgttgaagatcacagggaggggccagagctacaaccagaacccaggcttctgactcccggtccaaggctgtcagcccattgcactgctgagccgcctt

SEQ ID NO: 588193 - DNA, 4001 bp, Homo sapiens
aatgaataattagagctcaaagtcaaagtgaggctttaaaaaactatagctgcaaggtgttttgggggatgaattgagggagacatgtaagcaattgccgaagaccactgcttcaattaaggaaatacaacgctataaaagaaggctcccaaacccagctaacagaggtcaacgttcctccatccaagctctgcaataattaccatattgatttgcagtactttagcacaaataggtaaaatacggaggaatcaataaagtttgattttaaaattctcaaatttaaaaaaatctgaacaactgttggaggaaagacaataagaaaaagatttttaaaaatctgaacaattgttagagcaaggtctgcctaaatgtatcctctagaaaacgacacctccatcaattccttctcctcgaacgaaaacccagcggtctttctggtaccaaataccaagaatcacagccaaagaagccagtgtgcagtctcagaggactgttatgctgctcagaaacaggtcttttgtatgctttggggggggtcacgttacatgaaaactgacaaaagtcagggaggcatagctgccaatagacaagtacggtaaggaaggcacaaagcagagctggctttatttgaaagcactttgccaggcttcacaccaacccagcttcatggcagtctggtctctcaagggactatgaaggaacgttaagcaagtattcactcggagacgtatcactcccatctacagcactccaagtcaccagcagagatctcaatggagagcgaggctcaggatttcatcattaagcatggctttcaatctcttaactcagaaatagggagggcttaataatcttttcatcctgacttaagggagctaatcctattaagggtttagcatgcctgggaatttacctgcttcactgtaggtctaaggatttgaggctacttgggtaatgtcacagaagacacaggagcatctctgcagagccggtctcatgtttgaaagcatccccgcagcgtacaagattaacaggcacagggctttgaagtgcttggataacctacctgccactctggtctgaggtccatgtaaccgatcgcccttcaggtttagttttgtaccatatcctgatagcatgaggaaagtcagtagctgtctgagcccctgtcttccttatctgcaagctccaagtgtcagtgtcaaagaggagttccccacagccaggagcctggctgcagcgagcgtaatagtctaactgctccctccaacgatttgcaggcaaagtcacaagttcacgtacaatctgattcctgaactcctcagaaacaaccgtgagctcaggagaccttgtaaatttttccagacctggcacagcagcaacatccacctcctcgacttttaacacagataaatcacagcagtccaacactagcaaaaaatcctcactcccatgattccctgtgtcacagcagtactttgagctagaaatcccagaagcatgttcctggttgtcatggttaccatctttatcagaagtatctttttcacctttactacagattgcaaaatcattatattccatttcagatgagaaggtccttgcatttgtcacgggaatatggcagggttcaggcatcccaaatttgcaggctttgtttgattctgattggcaggcttcctcaatagagctattctgtttcttgaatctgtttccatcctcgaggaaaagcactatggtcccctcaatgacttgactttcaaaatccacatccaaatccagtacatagtgcttcacaagtatgtggctggtgttggccatgagaggcaggtcatctctggcagggtccagctgtatgtccatgatgtggtttattgtttgagggatttattaaaatctcagatggggtttcctatctgccttaatcttccagaatcataaatagctgcttatcaaagaaaacaactgatgtcacaaattatggttcctttcagtctcctggcaaaaaaggaaagcacaattagataaaattccaaataagacctaagtgctcctgcaactgctgctcctgcaagttgaccaccatccttaaataatcccccaagcggtagatgctcatggctagaaggctgacttatcttttctactgacatgaaagaaagctgcattatgggtttctaaaaatatttcaattaccaactggatggcatgggcctccacaaagccagaagaagcacgctccaatgagaactgtccttcttttagaaaacagcaagtgttatgcaaaagtgtaacccagcatcactgtgcctctagtcttaaaagatattaaatgtatcccttctaattttgtgcatcaaaagataagtgattgtttttccactgtgattccaagtaacaagtgtgaatgaaggctaaatggccccacacattttattccttgagagtaataatttaatacatacaatgtaactccagggattaatgtacttttcacattaggactgctctcatatcagcacttccagtaaattacaggaaaatgagccaatttaccaggagtgcattctaagtattcctttgagattgttcacggagatttttcaaatttatagttaaatactcaaggtatatcattacatcttaatagctgaaaacccattaacattctggataatagccttcttgtggcaaacaaaaggtcttctcacttgaaaaaaaaaaggcaggcaaatacctataaaaggaaggagagaaattaaaatgtagaaacagatgttacaataaaatgcacaagttcttcataaaagttctgaatcaaaatatattcttattgtatactagcaatctggctaaaagaaaaattatttgaaattatttcagtccccgttgtgtacctagtttctttcagcatatgctgttctttttttattcttttaccaaaatcaaaaaagaaatggcaggagaacagaaagaaaaactctgacagagcagatatgtttaaaataattttcgtatttctaaatatcaggaggcattctttcaacaactgcaaaacatcattacttgcttgaattttcaagtaaatcaagccctccctttgtatcctaactcctcctcacttccctgccagctttatctgcatctctactagacccttttatttcctttccttctagaatctcattctaggttaatatcccattgatttcagtttctacctctctccacagactatttcctcttcaaaatctcacctaaccttaaaaaatcctgcctcctgcagccttgtacaatccagtttctagctacttttccagtcatggagacaacattcccttgcatccttgtcctctagccaaagggcctactcaaaacactgcttcctgaagaggacttgactctaggcctcagtgccttttggactaacccatgtgctagacctggagcgctcctggctcctgccttccacctccacctgccaaatcctattcttcctccatgtcccagtttaagtgcaaccacctcctaaaacccttccctggtccttgctccctcccccactgaactatatgtagcacactttcagtgcaatagaagtagagagaaacaaggttgcaaagaacagtttgaatttactttatggagaagctggtatttcccttggttctagaaaagtgaatgagcacaggggataagccagagtattttctgtcctgtcattttgaataataaccttcgataaatccattggctatttctatgtaatcagaaacagtgatcttaaaacttcattctgatggtggctgtggctgctaacatacagtattttgttgactgggcatctttgaaaaaacttgtttgattaaaaaaaagccctgaacacacacatgctcacacacacacagaaggaaaaccagcatcagctgagacaagggtcaatttagtggctggctaaactattatattcagagaaaaagtttagtatttttaacatt

SEQ ID NO: 588194 - DNA, 4001 bp, Homo sapiens
cagcatcttcctgtttccaagccctttccacctcacaaatgtgaatgttccagtctcttcttacaggaaaaacccacaaatgaacaaaaccctcccttaagtccacatctccctctaactcttctttatctcctcacagccaaattccttagaagaactgtcctcgaccgggcacagtgaggtcaaaaatctactcggcatcctgagtgtttaagaaggcaagaaattgtgtagtacatttttaaaatttccatctcaaagagtcaataaaattttcatttctaaagaagtattaagctctcaactgtaaaattacccattccctgaggactccaaacagcagggttttactgcacaatcttgtttgccatttatctcattcttaaaaataaggatggtgtgtgtgtgtgtgtgtgtgtgtgtgtgtgtgcatgcgcgcacgcaggaaggatcacaaattaagctttccaggtgttttaactccaggaatatgggaacttaacacagtattaaagatattaaaaagtgttaaatcatttgtgtaggtgaacaaactcataaaattgtgtgcaactattgtaaaaagcctaaaatttgagcattagtagagtcctttaagaaaagtgcaggctttgaagttatattcagacctgaatttaaatcttgattttgccatttagttaactgtgaatttttagcaagtcaatttcatataaccgaaactcaatttccttctctataaattgggggtaataattcctaactcacgaggtggttgtatgaagtaaggagaaaacatatgcaaagtgttgaacacagtacctgggataaagcagatgggccaacagtaagcaactattattataccctaaccttattctactttgtcccccaaatattggaagaatctaatcttcccaattagcaagtcattggaaggcttcccagacttatacgaagcacaatatacactattcaaaaatggaacagactaaaagtattttaaaaatacaaaaccaaacaatcaatgagatcaaggatttcagaattctgcttctcgtcccatatactcagcatctattctgtctggttttgtaataacccatattatttctttatcaaccatatgaaccttattgttgtttttttgcgatctaaacatccctagcgggttatgttacttattttgagggctacctttgcaagggtaattgtcatcattgcacgaaaaccaaaaagaaatcaggtacaaggggcattttatgcaatgctattaactgttccatgcatctcaacagtggattggatcctaagtggatattttattatcacaatagataatcataatcacattactgtgccaccccctccccgcccatgcatgcgttcatgaacaaaactccagactaacagtatgaatgttctatagggaccccaaaactcaaaatgtggtgctctcagtaaagatcctccgggggaagaagaggcggatgggtttcactgcaagtggaaatgaatcgaatcgaaactgttctgcctacttaagactggagatgagccctgtggggctagaagccgagaccggcaggtgaccgagggcctggaggcaagagacgaaggaggaggcacccagaggctgagaaaggtctgtgccgccggggagaagacagccagagcccgtggccacctctacagctgaggtggtaagatgtgaccgctccgcccagtccccaggatgggtttcagccccaggagtctgggagaactgaggaggggatgcgggtcctcgctggtcgagcaaaagtgagggtaagggagggttccccgtcgccttcagaacggaatgatgctgtccccgccgccatcccgacgccggaggagaggaaggcagggacccaacagggagcgaacaggttacctgtctcagccgcgtcccacgggtcaccacttccgcagactcggggttactacgggctaccccggcacgcgccgggtgacgtcatccacacgcgcccggggccgcattctgcctgacccgccttccgctaggcccgcccccttaggatgagagggcgagaccgcccgggggagatctgcgcaggcgcggagctgccgcggtcataggagggcgcgagcagcttggctggctagggcttgtagagttgccctggtaccctagtattcctaattgcaaaatctttatgaagcttaagaaaaaaatcaccagcctgggcaacctggggaggccccgtctctacaaaaaaattaaaaaattagccgagtgtggtggcgtgcacctgtggtccagctactatggaggctgaggcaggaggattgcttaggtccaggagttcgaggctgcaatgagctatgaacgtgccactacactccaccctgagccacagagcaagaccctgtttcaaataaaatttaaaaaaagttactgaaatacagatgtgcaattttattccttagcctagtctcacctctgctgcatgtgactattgttcacatattaattccaccacaatttaaggtcctcctgtgtgccaggcaagcacccttaacaaaagctggggaaacaaccaggaacaagacagacgctgtgccttccctcatggggattactttctagttgagaaagcaaacattaaatgtagaaggaaaggccgggcgcggtggctcacgcttgtaatcccagcactttgggaggccgaggcaggcggatcacaaagtcaggagatcgagaccatcctggctaacacggtgaaaccccgtctctactaaaaatacaaaaaattagccgggcgaggtggtgggcgcctgtagtcccagctactcgggaggctgaggcaggagaatggcgggaaccccggggggcggagcctgcagtgagccgagatcgcgccactgcactccaacctgggcgacagcgagactccatctcaaaaaaaaaaaaaaaagtagaaggaaaataagttgctgagaaattaaaggaagacaggtgaccttttgatttgagatgtcaagaaagtgccctctgaagaggttcagtaaactgagaagcagccaactctgtggagagctaaggaaagaacagccaagagaagaatctacatgtgagcaagcaatagggaaggggcagaatgtggtgccttggagaaagtgagaaagtaggtcatgggaagaacagaggatgagatcaagaaggcaaggagagtccccatcatgcacagactctctgggttcctgtgaggaatacgagtttattcgaagtgtaaggggaaactagtgaagagttatcaacacgtaagtgacaggatctagttttataacatcaccctgctagctgctgtgtatacatgaaacttttgagaaacaatttaaaaggatgcaaagagaagagttgcttttgcaatgagcaggtaagaaatgatagaaatggacaaatttcaggaataattctgaggtagatgtgacagacttggagatgagtttagataagggagataaggaaaagaaaagtgtcaaaaataattcttaaatttggggcctaagcaaatagctggatcatatagctaaaacaaggtttgtttcacctcctttcaaacttgatttctttgcttgtttccaagtcagtcctctaggttctcctgtcacctatctttcctcagtttctatcactggcttccactttcccttttcctgagctcttttttcccttggctttcttaggctccatcagaggctgcaaaccccaaagcctacagcagccgggcagttaacacaaaggagtgaagcccagggatagagactgtggtgatctggagctcgtggtccctaccacagctctgttgatttttgccaaccaggaatgctgacccggtgatgtcagatcccctgcttaaaagataatcgagggccgggtatggtgactcacgcctgtaatcctagaactttgggagactgaggcgggcagatcacaaggtcaggagttcaag

SEQ ID NO: 588195 - DNA, 4001 bp, Homo sapiens
aataaatatataatgctccaaaaacataatttaaaattttctagtagctgtatttaaaaagtaaaagaaacttctggtattaattttaatatattttcttcaatatagccaagttatttcatgtgtaatcaatataaaattgagctattttatcttcatttattaaatccacgaaatttcgtgtatattttaaacttagagcacatttccatttggactagtcacgtttcaagtgttcttaccggctagcggccgggcagcagagatctaggcaaaccgaggcatacctagatcttctcaggattcttacatgcagagatgaggcaggctcatgtcttgaataaaaacccgccaatgattctcatatacgccttaaggcccaaattaattttcttttttctttcttttcttttctttttttttgagacagcgtctcactctgtggcccaggctggagtgcactggcccaatctcagctcactgcaaccgccatctcccaggttaaagtgattcttgtgcctcagcctcccgagtagctgtgattacgggcatacaccaccacacccagctagtttttgtgttttaatagagacagagtttcaccctattggccaggctggtctcgaactcccgacctcaggtgatccacccgccgtggcctcccaaagtcctgggattccaggcgtgagacaccacgccccgcccccaaattaattttcaatgatacttttgcctaggatcagatttaacactatgagttaaaacaaagctttgaccaaggtacggtggtccatccttttctccagaagctgtaccagccggtaggacgttcaattaatcaatggctaccacactggtctccctctagaaaaagaactctatcccgaattctagactaatcatcgttaaacccaggaaggccctctacacctttatctgtcgtttgtctttgggctgaacctatgccctgacggtctgcgttctcgccatgctcacagcccgccacgacccacggtcccgtttcccttttacggagcgcggcgctgacgccgcaaggccacttctatcgctcccgaccacggtctgtttccccctcgcccagcccagtgctttctgcccatcggactctcggggtgtgcttctggcggtcggcgtcctctcccggagcggtgaccccttctttcaaccccctcaggcgtcttaacctacacaagtcatgagtgggaaccggggcgttttgtgtgtgtggggaaaaggcaagccccttcgcccctcagcccacccgcccccagcccctacctggcgcgatgcgaccccccagtctccccgcgggggtcctgcgcgccccgccccgtcgtcgccaccgccccccgggagccgggcgcccgggagctcctcccccggccccggcagtacgggcggcggcggcagcggcggatcgcctgtctccagaccgtggtcctcacgctcctggccgctcggggcgctgttgtccccgctgtcacggcgcttgctgggcgaagccgagggctctgccatggtccctgcgtcgattttgcgctttcggtgctgctctgggacgccgaggagctgcccagcatgcgcgaccccgggcggccggatccagagaggcggtggcggcggctgctcagcgaagtcgcaaagcaggagccgcttccaaggcacgtggaacgtcaccggctcggccgcacgccgcttggccatgggcccagaggctcgggcggagcccgccaggcgcgggagaccgagtgccgatagctgcggggggcgaagagcgaggactgagcgcgtgagagagggacaggccgaagtcgggcgaggaggcgacaggacgctggagggggtagggcggggcagctcgcgcagggcctagggctggggctccggctcggaggcagctcccgcgctcagccctcgccgccgccgagatgcggcccggacgttgagaagcaaccgcgaagcggcggagattcgaacctgcgcacaacgtgcgcgcgcgcactctgtctggccaggcggagccgctggttggtggaggctcgcggggcgcgctcccgagcgccctcgcgaccggaagtgcgcgctcgggggtaggcgggaaggccgcggcgggattaattaaagacccgatcaagcggcccgcagaggggcgtgaccttgtttcctcaggagtgtggcggtggtcttactactatgttcgttatagcgcggtacgttctagacccttctataggaaatttaaaacctttaaaatgtgtatttccttcctccagtcagtgaccacgggggcgtctccatgagattaagacaaagattataatagagttccagactatcctgggcaacatagcaagacctcgtctctacaaaaaatcaaaaataggccaggcttgttggcctgcccctgtggtcccagctactcgggaggctgaggaggaagattcacttgagcctgggaggtggaggctgtagtgagccagagatcgcaccactacactgcagcctgggcaacagagcgagatgccgtctcaaaaaaaaaaaaaaaaaaaaggaaaaggataatacaagctttaaataaaactagtgtttaagaagcttcacagtaggttgttattcaaaacaaaagactgaagggagtctgggctgagggaagtagctaaagctaacagaaaacacaaatcgaagtgtatgttttgcatgttttgcgcagctgctgtggaaggtgaagcaggccctacattcctggaagatctcttgattaaaaacttatggaggaagttacagacaaaatgtgcagctcatccaaaatagctgagtagttggcaagaaccaagcctgaagcgcagctgtcctttctaactgaaacctaaaattgttgggctcttaattaatgttggaaggctgagttccctgcttactatgggcggtggtcagatcaagattctatggccattacagcaaaatagtgttgtcaggtgaagtgaggtggagacaattgcagtatatttactattttattatttttattttttattttgtttgagacagggtctctctcggccacctaggcgggagtgcagtggtgccatcacggctcactgcagccgggccccactgagctcaagcgatctcctgtctgggcctcccaaagtgcttggtttataggtgtgagccaccgcatctggtcgtatttactattttaatagtttgataaagacagtaaccaagtaagcagaaatggaaggaagaaaataagactattaccagtgctttgaagggaaaaactatcatcctctgtagaaaaagtgtgcaagaaagataattctattttagtgctaggtactatctcagtactaatttaccctgtacccctgcatctcaaggtggttgtgagaggacaagttaattattagttattaacaagcacagaaatgtaccaagttagggtagtaagcaatagcttttctgtttggtttttacttttcttgtttgaaattggtaaccggccgggtgcggtggctcacgtctttaatcccagcacttttgggaagatgaggtgcacagatcacctgagcccaggagttccataccagcctggccaacatggtgaaaccccatctctacagaaaatacaaaaattagccagaggtggtgccttgcacctgtagtcccagggaggctgaggtgggaggatcgcttgaaccctggaggcagaggccaagattgcaccactgtacttccagcctgggtgacagtgtgagaccctgtctccaaaaaaaaaaaaataaattgaaaacccgtctgtctcaaacagaggaagagttttgccatttttaaatcagcaggaaagatcttaatcgtagtcatcaagtgctgtttgaaaggttttgagtacccccaaaataataagtttagctaatggttggttcttttgtgttcctctttacaaacgctcattttttcaaaattgtgaaacttat

SEQ ID NO: 588196 - DNA, 4001 bp, Homo sapiens
atattcccaagacatttcccaatattctttctagatttttcaagagcaaaatgtaccagacttttctgtatctcccactcttagctatctgatgttagctgcctttcctaactttatggttctttccgtcacaattcctgcatcaaattcaattctctgatggtctgacgccttgctccctctgttactactaaacctggagaaataaaatatccaaacttctcttttgggctccgtaaagtaatgctgtccctggtccctatttctgggtttaatcagtaaattatttcatcaagatcttcgaagttcaaaagttcctatcacatatacaatcagattccaaataactttaagctttcactaagcaagcttctaaattcagactagtaaactaatttaactatcagtcaaaaacttgacagactatttgggaatgagaaatgtatttctttgctactatttgttttgttaaaaatagagcttaaacaacatatgccaagcactagtgacataaaaataaaaaagactcagcccctgcccttgaggaggtcacagcaaagcaagagatttataaaaacaactataatacataagatgaacaatataaaaaaactttgcataaagcacagcaggaacccacctatgggaacaggtttacctgcgtaggaggtcatgtctgtctgattccaactgcagcctcagaacatagtcaccggtggactcatatctcttacgtgaataaaagtgttatcttcacctgaaaatccagttgatttaagtccctttcagctcttggaattataattttgtgattaagctactttaacatctatctagaagaaacgtggaagttagggagctgtttttatgaatgaggagcataaaggtcctaccacagtgcctagcacaccagggagaattagatacagatttgcagaaaaaaagaacgtaaaggcagctcttattgtgacttctctcatctctcctaataattagcaaattttagaatatccggaccacttccgcccttaatcacccaccagttaaagacactgagcagcatcattcaatcgctcacacaaaagtgcaagtgcgttcacagcgccaaagaggggtgggtggaaatcttaaactgctcttacaagcactggtaacagtttgggaaaatacgtcctacagcatcccacgcgtaggtgaacttgggctctccgtgtgttcagtttggaggacatcgaccacacacaccaatcagcccagcagtggacgattgtaccaccatcgtcttctatctgaaattgttacagcgcttctctggtcacccccatcggcctcaaagccaaacctttacgaggacggaggcaggagagctaatctgatcctgaggtcagaagacacgaggctgtgcagcagacggcgcggcggacacgcgggtgtgcagggccgggaggggctggggtggtgcgaggtgactcggggcccggaggtcagctgcagcagccgggtcccgacgcctcggaggcgtggcggcgggacggcgagcgcccccgttccggcgggtccgccgccaccagtgggcgccccgacggtctgggccggggtccgccacgggctccttacccgtagtagcggaaggcattaatgatcttccagaagtgctcacgctcaagcctctcctcctcctcctcggtgctgcgcgtggccgccgccgctgccgccgaaaccgccgcggccgagccccaacgcccggcggaaaactgcacttccacctcctcgctgccaccgcctcctcccccgcagccctcgggcagccgggaggtgggcggcggagggcgacgccgtcgctgcatcgccgccgcggccctcggcctggctcgcttgcgtctctccgcgaccgacagcgtggtggcggctgcttggccttcctctagacggcgcccgccgcggacatgcccccagctcgcggcgcgctccgcccccgccaccctcaggcctccatccgcgctgggctccgccaggtcttcagggctcccagaaccaatgcgcatgcgtgtgccttggtacgcggagggcccgtgcggtctgcgctcatttgctgccgggcttcggagacagcgcgctgacgtcacaaccacgcttccaagggcggggccaaggccccttggtgggaggcggaggaggagctcgtaggtggggtgggactggcactgccgttacctgtgcgcggccgcgtgggtgggacttaaaagccggcgagtgccggattgttgagctggaggctgaacgcggtcccaggcactagcaaagaagggaaaggcaaaaaggaaaagttcggctttgatgattttattcggaatttttatttcagaaagtctagaaggaacgtcttgtatccaccctaatttaagttttaattcacttcctaaatgaattcctatttttaattacttaagggggtcggaagtgggcgccatcatcttttcacttttttttttttccccactctgtcgcccaggctggagtgcagtggtgcgatctcggctcattgcaacctctgcttcctgggttcaagcgattctcctgcttctgcctcccgagtggctgggattacaggcgcgcgccaccacgcccggctaattttagtatttttagtagagatggggtttcaccatgttggccaggctggtctggaattcctggcctcaggcgatccaccctcctcggcctcccaaattgctgggattacaggcgtgagccatcgcgcccgtcccatctttccagtctttaggggcttgcggcagtcctaattcctcctttactgaggatggcaacagatgaggaaaatgcaaggaccttctatccagcacctggtcttgggaagaccattacacctaccagcatctaagggtggctcttgggaaataacttattctggggccgggcgcggtgaatcacgcttgtaatcccagcactttggaaggcctaggtgggcggatgacgaggtcaggagatcaagaccatcctggcttacatggtgaaaccccgtctctactaaaaacacaaaaaattagccgggcttggtggctggcgcctgtagtcgcagctgctctggagactgaggcaggagaatggcgtgaacccgggaggcggagcttgcagtgagccgagatcgtgccatccagcctgggcgacagagcgagacagcgtctcaaaaaaaaaaaaaaaagaaaagaaaaagaaataacttattctgttcaatttaatccaccacccagcaaatgagtcttacaaagtaatgataaaagggaaagattgctttattcgaggggttaaatatgcccagtgaccacaaagtctgttaaaaagttacaaccatattgaaagtgaagtggcttcatattttcataatttaaattaatagttgaaataaaggtaatgcttaaaatgacaacatttttatataaaagttttctaaaacgtgagtctattaatagtaatgcagtaatacatgtttcaaaattcaaaaagaaagtgcaaaggattacaaatatgaattggagacagtctcgctctgctgcccaggctggagtgcagtggcacgatctcagctcactgcaacctcccggccttccaggctcaagcgattctcctgcctcagcatcccgagtagctgggattacaggcatgcgccaccacacctggctaattttttgtatttgaaaatactaaagtagagacgggatttcaccatgttgcgcaggttagtctccctgaactcaggcaatccacctgcctgggcctcccaaagtgctgggattacaggcgtgagccgccacgctcggccaagtgtgaataattgttttacctgtccctagccagctatgttcctctccagacacaatataccaattccttgcccattcttccagattttctatctaatgtctatttttccaaacactaattgttcggaagttatgtataaacactcatagtagtagctg

SEQ ID NO: 588197 - DNA, 4001 bp, Homo sapiens
actgcagaagcattaaatgagataatgtacttttattcatgggaggtgttcaataaatattatcatcttttcctttctagaggtgttttaggcaatcactaactaccaccttattcctaagaactttttaaggacagtgtccatttctttcttttattcaacacatttattgattactaaatatgtgaggggacctgctttggacatgaacagtaataaacaaactccctgttctaaacagtttcataatttagatcaaagataaactatcagcctgggattgcacctggcctattacttgttttgtttggctagcactttgaatcaattttaaatttgaatcaattttaaaattgaaatagcccacaatgtccttttagggaccaaaatacttgacaacactgagcccaattccagttgaagagcaactgactagcgctgagcagccctgatggtttcagccaggtctgttctatccaagcggagttcccccaccagaccttatggtctctaattgaaacactttcagttgccatttatcatagcatttgctcttttgttttaaaatatttctctataatcaggcttctatcgaaagcaggaaaactacagggcgacttgggactgcatgcttgacgggaaaaaaaagcagcattaattctcagtgggaggctgggcgccgtggctcatgcctgtaatctcagcactttgcaaggccgagggagaatcacttgagccctggagttcgagaccagcctgggcaacatggtgaaaccctgtctctacgaaaaatacaaaaaattagctgggtgtgatggaacgcacctgtagccccagctatttggggctgaggtgggaggaccacctgagccagggaggtcgaggctacagtgagccgagaccgtgccgctgcactccagcctgggggacggagtgagaccctgtcaagaaattttaaaaattaaaaaataaataaaatcagtgggagtgagaatttctacgaacttaatataaaaataacttaaaaacaacttaaaacaccattgcgccgggcgcggtgactggcgcctgtaatccctgcactttgggagaccgaggcgggcggatcacgaggtcaggagatcgagaccatcttggctaacacggtgaaaccctgtctctactaaaaatacaaaaaaattagccgggcgtggtggcgggcgtctgtagtcccagctactaaggaggctgaggtaggagaatggcgtgaacccgggaggcggagcttgcagtgagccgaaatcggcgccactgcactccaacctgggcgacagagtgagactgtctcaaaaaaaaaaaaaaagaaacgccattgcaaaaccttgagaatggttttaactggaaaaaatgtatgatgaacaatttaactgaaaaataaatacaattttaacacggtttgtttttgaaagcgaatgtgacgttgcattcttcatacagtgaaaaggctgcttctcgccctttcgttacctgcccagtccgaattgactcctgagacctaatcaggcgcatctctatatggccagcattatccctgggctgcctaaatagttcgcgttaaacacaaacaacaacaataaaatctaaataacactcagtcttagtaccattattacaaaagcgtgaggggcgaaaagattaaaaatgaacatcaacttcggtagagatggaaaaagactgcccactccattccaggaaagaaaaaagaaagtgggagaatctgatcacgacgggctgaggtcctgtgagagcaaagcagattccaaaccgcttagggttgctaaatcaagtggtaaaacgtggccccttgcggcgcggtgagattaacggacccggcgggcccagagcctgcctcgggtcctaaagggatccgccccgccgagtcagccacgccttcgtctcccacgcgctgcgcccggccgcgccgtcacccagcagcggcgcagggcaccatgggaaacggacggaagctccattgagccaaataagttggtgagaaggttcccgacgcggcgatggcgagaagcagagaaatggacctggggaggggcgtgcggggtgcggtagggttggatggaagccttggcgggccaaaaccactgcggcttcaaaatccggatgcgccggtatttgaggcggaggcggggctgtggggggaggagggaggctatggcgctcagagcactgtgggacactgtaggccacgtggggcggaacggaaacctcgcagggtcagaccgtagcgacgcgggaagtccggacgcagtagctccctgaagcggaggcgaaggggagtttaagccccagcggcggcaatggcggagaggcccgaggacctaaacctgcccaatgccgtgatcaccaggatcatcaaggaggcggtgagcagctcggggggggcggacgaacgggcaggagggaagcaggtgctggaacggcagctttgctcacccccggtctcctcgcagctcccggacggtgtcaacatctccaaggaggcccggagcgccatctcccgcgccgccagcgtcttcgtgctgtacgccacatcctggtgagcgggacagaggcataagggaggcgcggggatacctggctgggagttgctggctgggagcctacaaaccccaacgattgtgttctccctcggtggggacatgttcacagtcctctgccagtttttacaagttctgaagcaaaataacacaacaaaatcactttgctttagcttttttgtgcagagaagggaaggacttatccctgtcacaccaaaatccatacatgtaagaggcaggctttcccgttccacctctgggtgctccttttcccactcacgccttacaaacaagagggagtctgacagcctttctcttctctcagtgctaacaactttgcaatgaaaggaaagcggaagacgctgaatgccagtgatgtgctctcagccatggaagagatggagttccagcggttcgttaccccattgaaagaagctctggaaggtaacgagcctcttgtcttctaaaccacatagaagatggtcatcctgtgtgacctgttcaccaggccctgagccttctcagcgcgggtccctttaagtccagtaagccagcacttgatgtgactcgacccagttcggtgggcaccacctcagatctgttttgtaatgctgagcaagttatttttccttctctgcctccgtttttgtttttgtcttgcttttcttgtttttgtttttttttttttttttttgagacggagtcttgctctgtcacccaagctggagtgcagtgatgggatctcagctcaccgcagtctcctcctcctgggttcaagcaattctcctgcctcagcctcccgagtagctgggactacaggcgcacgccaccacgtgcggctcattttttatttttgtagagacggggtttcaccatattggccaggctggtcttgaactcctgacctcaggtgatccgcccgtctcagcctcccaaagtgctgggattacaggcgtgagccaccgcgcccatctgcctccgtttttccaattgtacaatgtaattagctcctgcagtccgtctggctcactttcagctctgtctcctaaccccttgttccgtccttacagcatataggcgggagcagaaaggcaagaaggaggcctcagagcaaaagaagaaggacaaagacaaaaaaacagactcggaagagcaagacaagagcagggatgaggacaatgatgaagacgaagaaaggctggaagaagaagaacagaatgaagaggaagaagtagacaactgaaaagggcgggagactgtggcaccttggaaggtaccacttgaaatgagacgtgctacgtgtttctgtgaagcttttccatgctgggcagagtagtctcaggcaaaagtgcctgaaaagatcagaataaaaactgactagaaataccgtcaaaaccagcacttaccaaa

SEQ ID NO: 588198 - DNA, 4001 bp, Homo sapiens
agttaccccctctccacaaaaaataataaataacataagcagaaggcagggaatccctaagtaggactgcagaagcattaaatgagataatgtacttttattcatgggaggtgttcaataaatattatcatcttttcctttctagaggtgttttaggcaatcactaactaccaccttattcctaagaactttttaaggacagtgtccatttctttcttttattcaacacatttattgattactaaatatgtgaggggacctgctttggacatgaacagtaataaacaaactccctgttctaaacagtttcataatttagatcaaagataaactatcagcctgggattgcacctggcctattacttgttttgtttggctagcactttgaatcaattttaaatttgaatcaattttaaaattgaaatagcccacaatgtccttttagggaccaaaatacttgacaacactgagcccaattccagttgaagagcaactgactagcgctgagcagccctgatggtttcagccaggtctgttctatccaagcggagttcccccaccagaccttatggtctctaattgaaacactttcagttgccatttatcatagcatttgctcttttgttttaaaatatttctctataatcaggcttctatcgaaagcaggaaaactacagggcgacttgggactgcatgcttgacgggaaaaaaaagcagcattaattctcagtgggaggctgggcgccgtggctcatgcctgtaatctcagcactttgcaaggccgagggagaatcacttgagccctggagttcgagaccagcctgggcaacatggtgaaaccctgtctctacgaaaaatacaaaaaattagctgggtgtgatggaacgcacctgtagccccagctatttggggctgaggtgggaggaccacctgagccagggaggtcgaggctacagtgagccgagaccgtgccgctgcactccagcctgggggacggagtgagaccctgtcaagaaattttaaaaattaaaaaataaataaaatcagtgggagtgagaatttctacgaacttaatataaaaataacttaaaaacaacttaaaacaccattgcgccgggcgcggtgactggcgcctgtaatccctgcactttgggagaccgaggcgggcggatcacgaggtcaggagatcgagaccatcttggctaacacggtgaaaccctgtctctactaaaaatacaaaaaaattagccgggcgtggtggcgggcgtctgtagtcccagctactaaggaggctgaggtaggagaatggcgtgaacccgggaggcggagcttgcagtgagccgaaatcggcgccactgcactccaacctgggcgacagagtgagactgtctcaaaaaaaaaaaaaaagaaacgccattgcaaaaccttgagaatggttttaactggaaaaaatgtatgatgaacaatttaactgaaaaataaatacaattttaacacggtttgtttttgaaagcgaatgtgacgttgcattcttcatacagtgaaaaggctgcttctcgccctttcgttacctgcccagtccgaattgactcctgagacctaatcaggcgcatctctatatggccagcattatccctgggctgcctaaatagttcgcgttaaacacaaacaacaacaataaaatctaaataacactcagtcttagtaccattattacaaaagcgtgaggggcgaaaagattaaaaatgaacatcaacttcggtagagatggaaaaagactgcccactccattccaggaaagaaaaaagaaagtgggagaatctgatcacgacgggctgaggtcctgtgagagcaaagcagattccaaaccgcttagggttgctaaatcaagtggtaaaacgtggccccttgcggcgcggtgagattaacggacccggcgggcccagagcctgcctcgggtcctaaagggatccgccccgccgagtcagccacgccttcgtctcccacgcgctgcgcccggccgcgccgtcacccagcagcggcgcagggcaccatgggaaacggacggaagctccattgagccaaataagttggtgagaaggttcccgacgcggcgatggcgagaagcagagaaatggacctggggaggggcgtgcggggtgcggtagggttggatggaagccttggcgggccaaaaccactgcggcttcaaaatccggatgcgccggtatttgaggcggaggcggggctgtggggggaggagggaggctatggcgctcagagcactgtgggacactgtaggccacgtggggcggaacggaaacctcgcagggtcagaccgtagcgacgcgggaagtccggacgcagtagctccctgaagcggaggcgaaggggagtttaagccccagcggcggcaatggcggagaggcccgaggacctaaacctgcccaatgccgtgatcaccaggatcatcaaggaggcggtgagcagctcggggggggcggacgaacgggcaggagggaagcaggtgctggaacggcagctttgctcacccccggtctcctcgcagctcccggacggtgtcaacatctccaaggaggcccggagcgccatctcccgcgccgccagcgtcttcgtgctgtacgccacatcctggtgagcgggacagaggcataagggaggcgcggggatacctggctgggagttgctggctgggagcctacaaaccccaacgattgtgttctccctcggtggggacatgttcacagtcctctgccagtttttacaagttctgaagcaaaataacacaacaaaatcactttgctttagcttttttgtgcagagaagggaaggacttatccctgtcacaccaaaatccatacatgtaagaggcaggctttcccgttccacctctgggtgctccttttcccactcacgccttacaaacaagagggagtctgacagcctttctcttctctcagtgctaacaactttgcaatgaaaggaaagcggaagacgctgaatgccagtgatgtgctctcagccatggaagagatggagttccagcggttcgttaccccattgaaagaagctctggaaggtaacgagcctcttgtcttctaaaccacatagaagatggtcatcctgtgtgacctgttcaccaggccctgagccttctcagcgcgggtccctttaagtccagtaagccagcacttgatgtgactcgacccagttcggtgggcaccacctcagatctgttttgtaatgctgagcaagttatttttccttctctgcctccgtttttgtttttgtcttgcttttcttgtttttgtttttttttttttttttttgagacggagtcttgctctgtcacccaagctggagtgcagtgatgggatctcagctcaccgcagtctcctcctcctgggttcaagcaattctcctgcctcagcctcccgagtagctgggactacaggcgcacgccaccacgtgcggctcattttttatttttgtagagacggggtttcaccatattggccaggctggtcttgaactcctgacctcaggtgatccgcccgtctcagcctcccaaagtgctgggattacaggcgtgagccaccgcgcccatctgcctccgtttttccaattgtacaatgtaattagctcctgcagtccgtctggctcactttcagctctgtctcctaaccccttgttccgtccttacagcatataggcgggagcagaaaggcaagaaggaggcctcagagcaaaagaagaaggacaaagacaaaaaaacagactcggaagagcaagacaagagcagggatgaggacaatgatgaagacgaagaaaggctggaagaagaagaacagaatgaagaggaagaagtagacaactgaaaagggcgggagactgtggcaccttggaaggtaccacttgaaatgagacgtgctacgtgtttctgtgaagcttttccatgctgggcagagtagtctcaggca

SEQ ID NO: 588199 - DNA, 4001 bp, Homo sapiens
gttaccccctctccacaaaaaataataaataacataagcagaaggcagggaatccctaagtaggactgcagaagcattaaatgagataatgtacttttattcatgggaggtgttcaataaatattatcatcttttcctttctagaggtgttttaggcaatcactaactaccaccttattcctaagaactttttaaggacagtgtccatttctttcttttattcaacacatttattgattactaaatatgtgaggggacctgctttggacatgaacagtaataaacaaactccctgttctaaacagtttcataatttagatcaaagataaactatcagcctgggattgcacctggcctattacttgttttgtttggctagcactttgaatcaattttaaatttgaatcaattttaaaattgaaatagcccacaatgtccttttagggaccaaaatacttgacaacactgagcccaattccagttgaagagcaactgactagcgctgagcagccctgatggtttcagccaggtctgttctatccaagcggagttcccccaccagaccttatggtctctaattgaaacactttcagttgccatttatcatagcatttgctcttttgttttaaaatatttctctataatcaggcttctatcgaaagcaggaaaactacagggcgacttgggactgcatgcttgacgggaaaaaaaagcagcattaattctcagtgggaggctgggcgccgtggctcatgcctgtaatctcagcactttgcaaggccgagggagaatcacttgagccctggagttcgagaccagcctgggcaacatggtgaaaccctgtctctacgaaaaatacaaaaaattagctgggtgtgatggaacgcacctgtagccccagctatttggggctgaggtgggaggaccacctgagccagggaggtcgaggctacagtgagccgagaccgtgccgctgcactccagcctgggggacggagtgagaccctgtcaagaaattttaaaaattaaaaaataaataaaatcagtgggagtgagaatttctacgaacttaatataaaaataacttaaaaacaacttaaaacaccattgcgccgggcgcggtgactggcgcctgtaatccctgcactttgggagaccgaggcgggcggatcacgaggtcaggagatcgagaccatcttggctaacacggtgaaaccctgtctctactaaaaatacaaaaaaattagccgggcgtggtggcgggcgtctgtagtcccagctactaaggaggctgaggtaggagaatggcgtgaacccgggaggcggagcttgcagtgagccgaaatcggcgccactgcactccaacctgggcgacagagtgagactgtctcaaaaaaaaaaaaaaagaaacgccattgcaaaaccttgagaatggttttaactggaaaaaatgtatgatgaacaatttaactgaaaaataaatacaattttaacacggtttgtttttgaaagcgaatgtgacgttgcattcttcatacagtgaaaaggctgcttctcgccctttcgttacctgcccagtccgaattgactcctgagacctaatcaggcgcatctctatatggccagcattatccctgggctgcctaaatagttcgcgttaaacacaaacaacaacaataaaatctaaataacactcagtcttagtaccattattacaaaagcgtgaggggcgaaaagattaaaaatgaacatcaacttcggtagagatggaaaaagactgcccactccattccaggaaagaaaaaagaaagtgggagaatctgatcacgacgggctgaggtcctgtgagagcaaagcagattccaaaccgcttagggttgctaaatcaagtggtaaaacgtggccccttgcggcgcggtgagattaacggacccggcgggcccagagcctgcctcgggtcctaaagggatccgccccgccgagtcagccacgccttcgtctcccacgcgctgcgcccggccgcgccgtcacccagcagcggcgcagggcaccatgggaaacggacggaagctccattgagccaaataagttggtgagaaggttcccgacgcggcgatggcgagaagcagagaaatggacctggggaggggcgtgcggggtgcggtagggttggatggaagccttggcgggccaaaaccactgcggcttcaaaatccggatgcgccggtatttgaggcggaggcggggctgtggggggaggagggaggctatggcgctcagagcactgtgggacactgtaggccacgtggggcggaacggaaacctcgcagggtcagaccgtagcgacgcgggaagtccggacgcagtagctccctgaagcggaggcgaaggggagtttaagccccagcggcggcaatggcggagaggcccgaggacctaaacctgcccaatgccgtgatcaccaggatcatcaaggaggcggtgagcagctcggggggggcggacgaacgggcaggagggaagcaggtgctggaacggcagctttgctcacccccggtctcctcgcagctcccggacggtgtcaacatctccaaggaggcccggagcgccatctcccgcgccgccagcgtcttcgtgctgtacgccacatcctggtgagcgggacagaggcataagggaggcgcggggatacctggctgggagttgctggctgggagcctacaaaccccaacgattgtgttctccctcggtggggacatgttcacagtcctctgccagtttttacaagttctgaagcaaaataacacaacaaaatcactttgctttagcttttttgtgcagagaagggaaggacttatccctgtcacaccaaaatccatacatgtaagaggcaggctttcccgttccacctctgggtgctccttttcccactcacgccttacaaacaagagggagtctgacagcctttctcttctctcagtgctaacaactttgcaatgaaaggaaagcggaagacgctgaatgccagtgatgtgctctcagccatggaagagatggagttccagcggttcgttaccccattgaaagaagctctggaaggtaacgagcctcttgtcttctaaaccacatagaagatggtcatcctgtgtgacctgttcaccaggccctgagccttctcagcgcgggtccctttaagtccagtaagccagcacttgatgtgactcgacccagttcggtgggcaccacctcagatctgttttgtaatgctgagcaagttatttttccttctctgcctccgtttttgtttttgtcttgcttttcttgtttttgtttttttttttttttttttgagacggagtcttgctctgtcacccaagctggagtgcagtgatgggatctcagctcaccgcagtctcctcctcctgggttcaagcaattctcctgcctcagcctcccgagtagctgggactacaggcgcacgccaccacgtgcggctcattttttatttttgtagagacggggtttcaccatattggccaggctggtcttgaactcctgacctcaggtgatccgcccgtctcagcctcccaaagtgctgggattacaggcgtgagccaccgcgcccatctgcctccgtttttccaattgtacaatgtaattagctcctgcagtccgtctggctcactttcagctctgtctcctaaccccttgttccgtccttacagcatataggcgggagcagaaaggcaagaaggaggcctcagagcaaaagaagaaggacaaagacaaaaaaacagactcggaagagcaagacaagagcagggatgaggacaatgatgaagacgaagaaaggctggaagaagaagaacagaatgaagaggaagaagtagacaactgaaaagggcgggagactgtggcaccttggaaggtaccacttgaaatgagacgtgctacgtgtttctgtgaagcttttccatgctgggcagagtagtctcaggcaa

SEQ ID NO: 588200 - DNA, 4001 bp, Homo sapiens
ttaaggtctgcatccatgaaataatactttacagatatgaacacttccacaactcctcaagcgcacacacacacacacacacacatgccccgcaccatcaccacctcctcaaccaacaccagccctgggcatggccagctatccttgttagtcatgtatctgcagagcataatccttcccttgtactttctaggaattatatttttcttaactatgcctgcaagattttcatctatgaataaaaaacattgaaaagataaattatgaatatgtggttatatacaaagtctgtgacttctaatgtccagattttagaatgatgcctaattctggaggtctcagaggtccaagtgggagtgggtaccatgaatgggggggcctccatttaaaagtaaccttctaaagagctctctgttcctgtagctcccctttccttattggaagggtcaaaacgaagtgtgttcccttaaaaatccaacaagaagttcctctcttatatccaaatataaaaacaccacaaagaaatataccattgggagtgtccaaagccagaaagtcagaggaagagagagagagagagagagagagagactgactattgggagactcaaaaagcccaaagccccttctctagctgttatctcagttacgaacacaacgtactgattttccgtgggaacctcattattgcactgtggggacttcgtcttccagcaccgattctgacggccctaattgccttgtttgagaaatgttaggaaaaaactaattttccggcgaatattgtttaaaagaatgattttcccaggctaacgaccacaaccctctcccacgtccagcatccccaggccctggcactgtggaagcctaacttgttaattgtccaaggaaaacgactgatggaacttctccacgaacagcctctccactttcatccaggtattcagctccagcccgttgtaaacgctccgggtgcggtggaaaaggcctcctccctgttcctgcagcggctctgggggaggggtgctgatgtggagcgctccggccgccgtggcgcgcccaagtccccgtcgcgcccgggatcggtggggattttgttggaaaggtgggtccttcggcccccagccccccaccctggttccgcgccccgcccgggcccgcctctcacctccgtcggctgagggcgctggggccaccggcatcctagcgggtggcgcgcggcggtgccggggcgcccggtcctgcgctcgaatgccagatgggctgggaggcccggcagtctcagcgctcgcgacgtcgttcccgggcctggggtcctgctcggtcgcgtcctgcagccgccttctggtccctgagtccctgttgcccgtccccggaaccggcttcctcggcctctgcccgagcgagtcagagactaaacttttccagcggcccgccggggcgggacccgcgctccgcccctcccctcgccgcccccgactcccgcccctctccccgcccccctctccccgtcccccgcccgcgaacccggcactcctccagctccccacctcccgctcaagccgcctggtctccgtgcgccccgcccgcccctagcctggaccccttctccccgaccctaccaatcccctagggtccggctcgcccttcggcccctgttcccaggccggcctccagaccttgtcctcatcgggcgagctccaggtgcagaaaccgggcgcccagagacccagcgggaacaggcttggaaccaggtccgaggtctgggcttgggcgggcgcctgtcgccctgacagcgagggtttgtttgggccgattcttaataggaggattaatactatcattatcgttgtccagatcctgaccatttcttttgtaactggccgagcaccggcttgggcttgcaggtgggcgcctggcgccggacagcgtttttgtttgggcttcttccttttccgcgcgggtcccctccggcgcctgcctggtccctctccgcgctctacccccaggcacgcagagacttgggctccaggcgggggcagcactctcccccagcctctgctggtgcaccagagcccactccggcacagagcagcgcccctcctagaccggcagccagcagatctcagccgacccccatgcgacccccttcctcacgcggatttgccccttttgtgtggcaaaaataataataataataataaatccatatgaaggcttcaaacagaattccgagagaaggaactgccaaattttcaatcaatgccaaaggccatgattgagcgaacacagaaacaactgtagaagcttggggagaaaggagaaaattaaagaaaaaggaggaggaggaaaaggagagaggagagaagcgggaggaagaagacgaaaaagcaaggagaggcctgttatccgaccgtgcattcctgggccggcaggattgggccgcaggggccgctgcagagagttgagtttgtgcaaaggccgctcgttactttctgtcttttgccctcttgcctccagaggatcagcccagcgcatccttctcttggagcagggtgcatacgcttatttggggtgcagtttgagcggtgaagggcaccaagagtggaagtcggcggcactcctgttccctgcagagaaacgcaagccctcagcaattgagctgaaggaggcaagtgactctgcctgctgaggctgccagccctagaggctctggcccccgggagctggggtacttcccagcgttttcgcctaagccacttcgcctgtgctactgtggagtcttccggcactgtagccttccaacttgttcaaagtgcctggtgcacggctctgagaagccacttctgtcccaagtttcatgtgggcctgaatgtgcttccctttgttggactcctacagcatcaagtcaagaaaagaaggaaacatgctcctttggcattggtcacaaccaggataacaatacagcatactgtggccactgtgtctatattaccaaagtggtcagtaggttcatcacacctctgttcaattagttgcttcccgtgatgaaaaatttactgctaggatactggctgagggttgttttaaggggcacccaagtctccgttcctagagaaagtcagttaccctgatataacagagcaaccttgaggcgtggtgatgcctccaaaactagtctgcggaatcggagcccagaagccctgaggagtaatgtggctctcatgctttatggcaggtttccctaagagagacccaggatctgacccatggcatcactgaaattcctctttcagtgaggctccgtttgcctaaagatccctgtcctcagtgggtctccccacacacgggcctctcactcacccactgccccacccccatctgctgccctcttcctgggccttaaagctcagacactagactctgacaaggagccctccatgccccggtagagaccatcttctctcaccactccttttgagagaaacagccctccctacaattctgttgaataagtctcctcctctgcatcctgtttcacaagtgaaagcagtttaacagaagaatgccagctcataaacgtagaaatgcgagaatgaggaaatccccattctgtaacccttaatgaaataattaaatcaggcagtgtgcactagtgggtgtcaaacccttaggtgaaagtgtgcaggcgaacgggtgctaattggaaaaaaaaaagaaaaaggttttccattttccatttttttatggagacatctggctgtaccttacaggaagatcaaactcagtgtcactaatactggctcaacctggcattatgtgatgcaaaagaaacacacaacatcattgttgctgtgtgcttgccaaagatgcttcaattgaatcaattgcaaagcctctagactttactgcaagtttacaggaaatggaagagtttgagccatgagttaaatgacaccatgggaaaaactggactaccagagtgtgggcattctgcagtc

SEQ ID NO: 588201 - DNA, 4001 bp, Homo sapiens
ccgcctcccgggttcacaccattctctcgcctcagcctcccgagtagctgggactacaggcgcccgccaccacgcccggctaattttttgtgtttttttttttttttttgtatatttttagtagagacggggtttcaccgtgttatccagggtggtctcaatctcctaacctcgtgatccgcccacctcagcctcccaaagtgctgggattacaggtgtgagccaccgtgccctgccgaagtgtgggagttttagatggatgactggctagctggttggccaggtagatgaatggatccacaggacacctgattcatgggtgggtgggtgagtgaatgtatggatggatggagtcatgggtccatgatagattaatgggtggacagaaggatggatggatagatggagagattcatgaacgggttgtagaagacttggttcatggatgagatggatgcaaagatggatgggtgaatgggaaaatgaatatatgaatagattcatggatgaattatgtgttggtagaagacctcattaatggatgggttgattcattgatgaactggcgaatgaatcttgaatgggttggtagaagatctgattcacggacagccatatgtaaggatggatgaatgggtagataggtggataaatgaatacattcatgggcgaaagaggaaagaaagaaggaaagaaatgcccctttcctccactaccctacccttatcccgcccatcactcactggttggcctttctgacagtggtgaattgtgagtgatcacccttcaggggccccagaataggtgtctgctggagcgaaatcttcgtaagactatcctggaggtgcgatgactggccccttaaagacaaacaggccacatctggcatgagtggccaggctgtcccgccctggaaacatcgatggcaaccccgtccccaccaagaagcggactgacgcttaccacaggtctgggaggaatgaacagttgggacaccgcggagaccctgggcagtgctctaatacacccctttgatgttgcggtgctggggatgctggagccaggaggaaacagttgtgagccttggctgggggacggtcctttctagtcatgtggcctcggggtgatggcagaccagccctcaaggacgggttgcgagggctctgagatactcagctaacattagcatccttctagcctgggtggtggggtggtgggtgcggggacacaagggaccaccccccaccggaaatgactcgggcccgccccccgggccccgcggggcctcactcagtggctccggctcctcggcgcacttctcctggagctggtgcaggaactcacggaacctgctggggaggagctctcctaggaaggcgcccaagaagtcggggtcctccctggccacgcgcctccgggggcgctcgcgctctccaggccctggctgcctgggcgccgattcccgggacgcgccggccgacagcaggggaggcggcagcagggaccgcagcagcccccgcttccgcacggcccgccgggtcgcggtgagcaaggcgggcaggcgcggcgggaggcgtccgacgcccaccccgggcttggcgtccccttccggccaccacgcggcgccgccccccgggatcctccagtccccggagccccgcgcgcccagagccgctcggagcgcgggcggggtcagcttgggcagccgcgggtcgctgctgcgtcggaagtctccgtcgccagggagccccttgggcgccaggtcctgggcccctgggcgaagtcgacgccagaacatgcttggccccgcactcagctcaccgcaccctcagcgcgcgtgggtggggggcgccggctgaggtggggagggcatagtccagccccaggccatagtgccccgggcggggcagcgcggtgcggggtgaacgccaccggcccggcggacagcgagtggcttcaggcgagagctcccagagcctctgtttcctcacctgaaaaatggtgacagcaagagtagccaactttgggggttgctgtgacgtttaaatgagcaagtacatgccagtcttagaacagcaagctcggtacagtgccaggcacgctggccaagcttacacatagactagctgccattcttagtatttcaaagttattattatttaggatttagtcccagctccaccacttattagctttgtaaccttggccaagccaattaacttccctctgccttccctgggggctctggtctgcagaatggggataatagcagcacctgcctctctgcagccgtgaaacggcatcaccgcatcaccgctggtagagagagcacttagcctgccttgcagtgttcaaagcgtggaactgttaccgtcattagcgctctactgggaattaggaaacctggaaccagcttgagggaagagagacctgaccagcagcctcccagccctggtgctgcctcagagacccctgggtggggagcctgttgaaaatacagatgacttacccccagcccccattctgattcagtacgtctctgctggagccaagacagtttgttgttcttgttgttgttgttaaagagatggggtcttgctaagacggggtcctgctgtcacccaggctggagtgcaatggcaccatcatagctcactgcagcctcaaattcttgggctcaagtgatcctcctgcctcagcctcctgagtagctgggactacaggcacacaccaccacagttggctaatttttgtatattttgtagaaatggggtagaatttttttgtatttatgttgcacgggctggtcttgaactcctgggctcaagtgatccacttgccttggcctcccaaagtgctgggatcacaggcgtgagtccccacttctggccaagacacagacttttaacaaactccccctttgggaggcagagccccagtcttactcccagctctgacactgaggggtttctaagcctgcttcctcccaaccacaccccactcccagattgttgtcagctctgagctgactcctgggcagtgtcacactcaccctggtgggcttctgggtggggccctagaaggtcctgtgagtttagagctctctacaggcaggctgtagagcccatcatccctgcctggtgcctctcccagcccctcccggctgcctctgggccgcttcagggtcattgtgatccgcccctcacccctgggcatctgagtagcagtgggcactgaggcctggggactaagggtggggctattgtgccctggatgccctggccgcagccacctggggcactgggactctgaccagggcagccaggcctaccctttccagatctgggaggcttaggctgggtggctctggaagtagaacttccaccccaagaccaggcagtcagaatacaatggacctagaaatgaacagaccctgcggggcacggtgtctcacgcctgtaatcccagcactttgggaggccgaggcgggcggatcacctgaggtcagaagttcaataccagcctggccaacatggtgaaacctcgtctctacaaaaaataccaaaatttgccatgcatggtgttgtgcacctataatcccagctacttgggaggctgagacaggagaatcgcttgaccctgggaggcggaggttgcagtgagctgagatcatgccactgcactccagcctgggtgacaaagcgagactccatctcaaaaataataataataataatccaaggtctgggtgctaggtgtgcttcttgctattgagatgtcatttctttcaggcagtctcagctgacaaagaaatgtgtgtgtatactatgaaacacacacatatctataaatatttctataggtaaccatctgtacttatattaagctaaacatgagctcatgctgacatctccaactctaatccgttacacagatcatttgagactctgtctcacaaaaaaaaaagaggccaggttccagtggctcatacctgtaatcct

SEQ ID NO: 588202 - DNA, 4001 bp, Homo sapiens
atatgatgaccactgccatgtcactcctattcattgatggccccaaagaagggtttaccagatgttttctgcaatgtgttttatatctccctctgccatattgggagatagaagagaacatttttaatagaaaacagtgtggctgatgaggctaattaacctttgttgatgattttccccaggctcaacctcatctaaagacacttgggaaatttcacattggttctgccactaagcgtgacagactttccattcataatcaatgatcaatcaacaattttttttttttgaaacagagtttcactcttgttgcccaggctggagtgcaatggcatgatcttggctcatcgcaacctctgcctcctgggttcaagcaattctcctgcctcagcctcccgagtagctaggtttacaggcatgcaccaccacgcccagctaattttgtgtttttggtagagacagggtttctccatgttggtcaggctggtcttgaactcccgacctcagacctgatccacccgcctcagcctcccaaagtgctgggattacaggcgtgagccgccacgctcggccctacaatttcttaataattttctatccttttaacttatgctttcctaatgacttaccacctaagcggccgaataagataacacctaagaggcggaataagataacacctaagaggcggaataagataacaccagcaaaaacaatccttctcattctgatttccaagccgaaaaggagatgaaaggaaagacacgtcccactgatttctggggaagcaataaagttacacatttatgttagctattttaaaaacggaaaggactggttaagttttattgatttcattaagacaatataaataagtttattttgtgaaggaggaaaaataaggtacctgtctttataaaaaagtcaccatatggctggacgcagtggctcacgcctgtattcccaacgctttgggaggccaaggtgggcagatcgcctgaggtcaggagttcaagaccagactgcccaacatggtgaaaccccgtctctactaaaaatacaaaaattagccaggtgtggttgtgggtgcctgcaatcccagctacttgggaggctgaggcacaagaatcgcttgaacccaggatgcaaaggttgcagtgagctgagatcaggccactgcactctagcctgggggacagagcgagactgtaaataaataaataaataaacccataaaacttctagttccagaacattttaagttattttattaccaaatatcaccttctctcttcagtttttcctcagaattataatggtttcatacagaactatgaagtgaaatagatgatatttctagaataatatcctgttagaaatccttttaactattggccaaaaggaaaatacacatattcattcatgctcctttatgaattattattattattattatttttgagatggagtctaactctgttgccagactggagtgcaatggcgtgatctcagctcactgcaacttcggcctccccggttcaagcgattttcctgcctcagcctcccgagtagctgggattacaggcgcatgctgcaacacccggctaatttttgtatttttagtaaagacggggtttcaccatgttggccaggatggtcttgatctctggacctcatgatccacccaccttggtctcccaaagtgctgggattacaggcgtgagccaccacgcccggcctatgaattattaataatactttcactgcaaaagaccttatttatgagggaaaagcattatgtgatagttaacgatagttaatacttattaaaatgaagggaagaaattgtaagattgggtaaagtataatatttcagttgttcatgacctacctatctttttcattaaggtactatggaaattttcctgggtctgaactttcttaaaaggatgagaacgagtacaatttgtgatgtgatgaagtccgttacaactgaaagcgacactctgatccactagattccaaacagtttaaacagtaaaaactgaccgagtaaatgtgaatattttttcacttgaacactctgatctgtttggaacttaatttccttactcatgaaattaatataataaggctaagttggtcagtagttaaactaactaaatttggctgaagattgctatgttcactatgcaaagattaggtaattcagaaatagattgccttgtgggcatactatctatttattatgtaaagtacttggtcttaatttttaaaaaaattccatatagtctttaaagcagcacttagtgcattcagaaagcaatttgaattttaaaaaagtttatttccaaattaatatatagtaccaaattaatatacattatttttgaaaaaatgaaagtattaagaatgttaaaatcccctttgactatgttcccatcaaacccagtgagtgtctcctccaaatgtaaccacattatcaatatgttgggtatcttttttttttttaatcatttcctaaagtttattcaagggtactttttcttctgtgcattttcatcataacacttataacataggattgtgtataataatactttctcttttacttttacaaaataatataatactctacatattattttcccccttatatttcattcaaaaatatgttaaaaatcttcttatgtcagtcttcttatgaaagtttgaaaaaactttcattatttttcattgctatataatattttctggtatggatacatcatatttatccatttcctggttgatgagcacataccttcttttttttaaaataacaaacaatgctgtaatgtgtgtatatggacttgggcacatatgcaaattgtttctctaagacagatcccgaaaattgggattgcttttcccaaggcctatcaaattgcccctgaaagtagctatagaaattttgccatccactggccaggcacggtggctcacgcctgtaatcccagcactttgggaggctgaggcaggcagatcacgagctcaagagttcgagaccagcctggccagcatggtgaaaccccctttctactaaaaatacaaaaaaattagccaggcgtggtggcaggcgcctgtaattcccgctactcaggaggctgaggcaggagaatcgcttgaaaccggaaggcagaggttgcagtgagccgagattgcgccactgccctccagcccggacaacaagagcgaaaccccgtctcaaaaaaaaaaaaaaaaaaaaaatagaaatgtttctacccaccaacagaggatgaatactttcccccatatcctcattaatattgaatcaaagatttgcaaaataatatttattaatagctaaaagtctagattaacatgatcttttgcctagcaagttgcagagatgaagaaatagatgtattattattgacaaagggtgttctcaagtatgcacttttagtcaaatggtggggaaatgtaaatgagtgtgtgtgtgtgtgtgtgtgtattaatacatatgttagtacctatactcaaatatacatacatacataatttgtatcaccccatagctataactttgtagcctgttctttttaaaacttaacttcatattttgagtacttattttgtcattaaatatttctttcttttcttttttgagacgagttttgctcttgttgcccaggctggagtgcaatggtgcgatctcggctcaccgcaatctctgcctcccaggttaaagcgattctactgccaccgcgcccggccaagaatacatttttaaagctcctgtaatattcaaccatatagagttactataatttatttaataatcccctcgtgtttggggatctttcattataattttatttgtgtttaaaattttctttagggtaagttcatagaaacgaaattatcagaacaaaaacataaaccttttatataagttggccgggcgcagtggctcacgcctgtaatcccagcacttt

SEQ ID NO: 588203 - DNA, 4001 bp, Homo sapiens
tcctctacgtgaaaggtcatcgccccctccccacgtgggggtgtcaggcgatgagggagcctgggagcccaagcaggctctcgacagacagctgtctctcgcatgtgatggtgccgccgtctttctcaccagcagcacgacgctgcaggctctaggggctgtgggtagagacagacggcctgtgccctttacatccttccagccaagcccgctgctgtactccagatgcgggccttgtttgccctccccgcgtatctctgaggtccccacgaattgctgtgtggcatgaatgtgagatccctgccatggtatccaaaaggcaagcctctacttacaggagggatgaaggccctgaggggtggtgggtgtcccatccccctgagagttgggggtgcagagggcccctctgcacctgacctgccacctggtggtcactgtggtgagaaaggggtcctgggacttcaggcctggggttttggggtgaagatgtcttgtctagaggcaccagctgcccacagccctgcagccaccctggccgagagcagatgatccagcgagtcctcaggggaacattatcctctttgcaaaataactgtggaattagagcttgatgtgggcttagcgggtgccctgcagtgtctcagttcattcctacccagcaaagtggctgacgtgagagcggggtctgcaccgacagcaggacctccctgttcacctgctcccgagaccaccagggagccatgctgtggctgtggctgaggctgagggtggggcaagaacccaaatgcacacaaacctgcatcatccgtccagcactggatcccagggtctctctagacattttaaaagatctttaaaaacagggaagaaagaaaccaaccccattggggcggtggcggctcccttaaactttcagcgactgccatgagaacagagatttcggtggctccaaagaacacaggcttatattcctttgcttttcttgaggttcttatgccggaaagatgcaggtgttgcctgccctcttgccctgtgaggctgttcctcagccgccagcccaggactgggcgtccggccgttctgtccacgctgcagccctgctgtccgctagatggcgctgcgtcatgcccgtggcgggcctgtctggaacccaggaaggcctggcggagttccaggagggtctctggagacccaggcgtcagcacagtggcggggacgagtcccctccctggagggtgtgagatcccctcattgccgggctctgggcacccagagcacagattttgttcgctcactgctggagaagcatagcctgcctgggaaatgccccctcccctctgtggagccgggaggtatgcatgcaggcatgtgtgtgtgtacacgtgtgtgcacacgcctgtgcctgtgtgtgccttgtgcattctgtgcaaggatgtgtgtgcatgcgcatgcatgcatgcacacacctgcacacactcctgtggccgtgtgctcttgtgcatatgtgggggttctgtgtgtgtgtctggggacagggaggtataggaggcagctccctttagcccattggaggctagccctgtgtatgtgctggactccaagatgacaaagacctgcccaggtctcagcctcagcctgtaactgctctgagcctccatttactcatctgtaaaattgagatgccccagttacctcccaggtgtgatgaggccccatggagaccatggggcgagagggccctccccacaggcatgacgcaaagtgacatcgatacacacctgtgttgtggtcacgcacctccagcagcggccacaggaaggacactgaggtctgccctgggctgaggcccatggcatcctgttcatcatgggggtgccacggaatcccccatcccacaggggaggagacgcaagctgagaggcgaagccacaagcctgactctgagcccaggctgtcgtcccgggccgcggtgcccacactgccactcagccctggctggagatgcagtgctgaggtgggcaggtggctccaccagccccatgaggctcagtgggacctggtggagggtggcactggccttggagaagacttgagcccagcctctctgtgctggcagctgggaatgctgagaggcaggaggaagctggggggcacttcctgagcccccactgcatggggacaaaacccagggatccctccccaggcagagaccccaccgggctcgatcaccagacttctggctgtcagctggcacagaggcccagcagggacaaccccggaggaggggaatgtgtcattgggagcctgggcagccatcaactagtcctggcctaaacgtggagcacctggtgcccggccctttggcagggccttccttggggacagaggtgactgctggtgcctggacccaggaagctcccccatctccccaggccaccagaggccccgagtcactcccgggtgaaaacacaaatccaggctggggcagctgacaggtggttcccagggaggaactgaggggttgaggggcaggagaggtgggagctggacacagtgacttctggggcatcaggcctcggccatctccgaaggagggctcccgggaggtgcacgtggacaagatttctggacgagatcaggctgcttacccgtctgccaaggccctgcagcttgggtgtctttgcgaacctgtcagtaattggggttgtgtccaacagcctgtgccaggctccttggcggggcagtccttgcagcagtccttgaaggtcacctcgagagccaaggctgggcaaagcgatggatccatcaggtgcagggggaatggtgtctggggcccacaaaggtcacgatgtggccccgcaggtgccaatgagggagccagggtccagccacctgtgcttgccagctgggtgccctggtaccaggggacgagctccttcttggtttgcacaaaggctggtgggccccgtccaggagctgctgcccaacagtgtgctctcggatccctaggacacgggggccccagctgcatgctgtgctcagccccatcggacactgggagcccccttctatggaaccagagctcccgaggggatgctagaaaagtgtggagctcttttcctgggcgctgagccccctgtccatggtaggaaagaggacagtattagtgatggggatgcagggacacctgtggcttcagagcatcagcttggagtgtctgatttagtcatgagacagcctcacctggggagaactttcttcccattttacagaggggtaaatagaggctgctgtggcgccctgcccaggagccctggctgcttcgaggctgaggaaagcagggaggtgagcagctcggggcctgccctgcaggtgcacccggaccctgggtgggccctgccaccccgcacgccttccccagagccctctgagccttggccggtgggcggacggagaaggttctgaggggaggagtctggaaagagggaggggctttgtgagggaccacaggggaagtggggctgagcctctgctgtcctcagcctctgctgtcctcagctgggtctcccaccaggtcccttccacccgctgtggccttggcgtccttcttgcttgggccccatgggtcagctgtgggtgcctggacacccataagtggccatcctgcctgggtccctggacctcttgccacctctcccatccccacacacctgccaccatgccagcagccactttctagagccttccgtagcaaatgagttccttcatctcaaattaggtgcagggggaatggtgaggctttctataaaagcctctctgctgatgacggcttcctgcacaaacagacctccactagggactggagcgacaacctctccccgctgagcgcagccggcgcgtctcccgtggagcccacgtctcctgggaacagcctcctcctctgacagacagggccacagagccaacttgttacagtttgcagagagcccgctgccctctgc

SEQ ID NO: 588204 - DNA, 4001 bp, Homo sapiens
gggcacctgtaatcccagctagtcgggagactgaggcaggtgaatcacctgaacccgggaggcggagtttgcagtgagccaagatcgcgccactgcactctagcctgggtgacagagtaagagtccatctcaaaaaaaaaaaaaaaaaaaaaaaaaggaaagaaatgacgccagcgtggtggttcacgcctgtaatcacaacactttgggaggctgaggcgaccagattacctgaggtcgggagtttgagaccagcctggccaacatagtgaaaccccgtctctactaaaaatacataaaattagccgggcttggtggcgcatccctgtaatccaagctactcgggaggctgaggcaggagaatcgcttgaacccgggaggcagaggttgcggtgagccaagatcacgccactgcactccagcctgcgcaacaagagcaaaactctgtctcaaacaaacaaacaaaagaaaacataagaaatgactttgaaacactacttgattttgttagtttcttccacaaggaatacatttaaaaatttaagtttttattcttaaaatgagttctggaagtaaaagagttaactctgagatgattaagacttctaaaatccccaacagaagcaactcacctcaaacagagtcacatctctgtaagaaggaaaactttcaaccaccaggtgcattaacttctgcgcactattctcactttctcggacgcagttgagaaaagagcctccaaacttctccagcagaattttcccggtttcattgagaatccgatgcctctcttctactaaaggcatggaaacgtctgtgtcagaacgaagtatattccgaacctgatccagggtcactgtcgcgtagtacgaggcactagttattggtatccctttagtgaaaaaataaaattcagaggaccaatgtcatacttccatatgcattaaacccttgcttttacaacatggaattaatatgaaaccaaatgagtggtataggaatgcaccaaaagtggaagaataaaaaatctaaagcaaaactcattttctacttgttcatctgtacttattcacccatttctaactattgcaatattacatcagatgtattctgagtaaattgctttataacatcggtccttttgttcttcaggtgtcattcaaatggcattctttataaaactgacttttatgctactgtaacttttatgctgcaatgataaatattaacatcattttccactaaaatatgccccttttcatacttctattttaagcataaggacttgcaacgaacttcaggttcgctttccattattccatctcccaacccgctccttggaactcccctacacacaccccaagtaaatggaaacctcaaaggccgttaggtccgatggcaagtatggcaccaaccttcgtcgagggctctgttgacggcggcgcacagggaccagtacccactgtatgttttccctctgtacctcaccacacacttgtgctcgtcctgctccgaccaaaaggagaagttgagcgtgtctgtcacgaacacccagttgaccgcggcctcgtcggccgccctggggttcagctcatgaagggctttccacccctccacgcgcagctctggccccgccgccttggccagcagcagctctgccaccctccgtacgcctccgctgtcaataaacacatcccgactgttttctgcaatgaatttagaggattccctgggatttaggagcccgtccattctgccctttgggacccggcgggccaaactcttcccgccctaggcgggtcaaggtccactctgcgccttgcgctactacgaaccgcgcgatcacagggcctaaacaaggtcccgccctgccagggagtggcaccgagaacttagtgcagccaaggtaaaggttctctcccgcggcgttgccctgattaggaaaccagagagaccccggggcagctcgctgggcagaggccgcaagcacttccgggaaagcggtcccgttcacgccctctcgggcgcgctctcaggctccgcttccggttccaaaggtctggaaactgctaagggtccggcgttcaccggccgtgagttgcccaccctgggaggtgcatggctttgccatgttttgccttttctcaccccgcttcggacaggtgggactcgaagacggcgactcgccgccttgccctgggtcgcgatgcccccaccccgctcccacccctctcctttcccgcagcctgagcaagacgccttcggcaacgccccgcatccgggctccttggcctcgaagagcattatggccgtagatctgggtgctgaggactgagccacccccagactgcgacatgggcggcggtgcctccttccccaagccccagggagtgtttttttgtttgttttgttttttgtttttgtttaagtgaattcctggcccatttggccgaacgaacgttaggattagttggaaggtttggagaaatggatgaggaaacaaatgtgttaaattgttaaattaaccttgtgtgcctggcagtgtacttaagtactaaatctcacctaggctgggtcatgacgaaagcggctattgtgatcccgcttttgcaagtgaagctgagtggttcattgattaacccccatcacagcaatggtttgggctaggatttaaacctttgataattgagccccctaaatcgagggcactttatgagccaatcaccagtgccaaccattctggtcagtcaaatagtgactatatcagtggccctactgagaagacattaaaaatgaggaaataagtgtctcacaactgcaaacttacacaagtaccttatattaggagagaggtgtagaagccaatttagtgatgatccaaatttgactggtgatgaagttttagtataaaggtatgcattttttttccttttggagacttaaatctccatggataacgttcacatctttgaaaatcacctattaaaaataatcatcagtacccatctctagttaccgacaggaaaatcttggtatttttggaggattcggagcttttaaatttgtttgtttgagacagaatctcaccctgtcgcccaggctggagtgcagtggcatgatctcagctcactgcaacctccacctccccggttcaagtgattctccctgcctcagcttcccaagtagctgggattataggtgtcagccaccacacctgactaatttttgtatttttagtagagatggggtttccctatgtgggccaggctggtctcaaactcctgacctcaggtaatccaccctcctcggcctcccaaatggagctttttttttgagacggagtctcactctgtcatccaggctggaatgcagtggcacagtctcggctcactgcaacctccgcctcctgggttcaagcaattctcctggcttagcctcccgagtagctgggattataggtgcccgccaccacgcccggctaagttttgtatttttagtagggacaggttttcaccatgttggccaggctgatctcgaactcctgacctcaggtgatccgcctgtcttggcctcccaaaatgctgggattacaggcatgagccaccacacctggccccaaatggagcttttaaatttgacagctgttaccctagaaaagcagatcttcatcactccagtttcttcattttggtaagaaaaaggaactttaaggactccactatgatacgttttccagaaaaagtcactagtacattaatacagttgttaaggaaatgtaagtctgttggcttgggatttttcctttctaccacagcacctaagtcttgggagacaaattgatttagcaaggaaatctagcaatctgcaaaataatccagaagggtaaataacttagacccttttctctcactgaggtttattgatagaaaaaagtcaaatgccggccagatgtggtgactcacgcctgtaatcccagctttttgggaggccaaggtgggtgg

SEQ ID NO: 588205 - DNA, 4001 bp, Homo sapiens
attttttgtattttagtagagacggggtttcaccacgttggccaggatggtctcgatctcctgacctcgtgatgcgcccgcctcggcctcccaaagtgctgggatcacaggcgtgagccaccgcgcccggcctgctttggtattttttaagagcaagttggtaaatggaggcattatatggagagtgctcgagtatatatagcacaggttagagcagcacgccggcaccttgaagcgaacacgggctcctccactcccgtcaacactgggacttttctgtttttatcttgagtttgaggccgggcttcttagcagacctcagtctgaaactgaaataaacctggacgcagcgtacccttgaatcgcaagaacgccgccttcagtgtttctccggagaaaagcattcacgccaggttgtgacgaaaacattttttgagaactcataatgtttattccttggatgaatccattatatttatttagtgtctcaggaaggatgatgggcatattgcttgcaaaagttgatttgaatcctgatagattccactaacttttttgtctttttttttggctgccttcttcgagaatggtgtcaacccttaataacacctagccttacgaatccctggggtgattcccgacctcgccagctttgtggggctcccccgacttgcctacattccctggcagcctcgcagcttcgggcagatggagcttccggcctgcgcgcagtggtcgcctgtcgtccgcccgcgctcccttcggccggaggtcggcggccccgggcagagcgcgccgtctgccccagtatcgggaggccagttccgcgctgggcccacgccctcctcgcccgccgctgcctgcgcgccaggccgggtggcggagccggccgtcgctgctccgagctcggaccctcccccggggtgatttcggcttagaaggtggaaatgcggaagtttccagcgccgaccgacagacgaggtttgcgcttggctgggcatgttccgcggctactctgcggcgcgccaggcccccgctttccgcaccccgcgaccctagaagccaccgaaccgccggcgggccatggccactctgccgagcgcagagcgccgcgcgttcgcgctcaagatcaacaggtaagacgccccccgcggcgcgcaggttgcggccggacagcccagcgctggtgtgaagcggagcttcgctgcaggggccgaggccggacgagtccattcgcgtccgcggcggggcgcgcctgagacctggggcgcccggttcccgaggctgcggcggtggagccgctggacgcgcggcggctcctgcgctgggcccggcgaggtcctccccaagaatctcggtgctcctggatgtcctcagccgccggggatcccttccccgaacaacctcgcccgctccgccctccaggttcttacaggtggccgggtcccagaagggtgataggcgcctgggtaaccgtgttgggcgcgccacggagtgtctcataaacggctccttcctttgaggcaagtctgagcgcggggggaagaagtgaagtggctgaaattagagttgcgtttgaggcaggctgcaagccttctgtcgtcctgagcaaggctccgtcctcgcctgcttcattattccagaaagagcttggctcctggtggcatcgctatttttataccctggtccaaaggagccatgaagtggaaaaagtgattttttaaaaaatctacacttaaataaaccaaaagaaatggcctgtggctgacattttgagatttacagaactccagcaaaaagctaaggactgggggatcccaactcaccatccaattcctaatcaaagttgcacaaactaaatatgtaagcacatttactgctcaaagttctcagtaaaggtgctttaactgcagtttttcctccactaaaaactgctgacaagtaattgggacatttttgtcttgccctgagaaagctagactgtctagttaaaagataataggaaactcattctaaagtgtcaacttattctattgcccacagggctgtccgatttgttaatcttcacttagctgagcctgtgaaaggtggattccaccgtaggttcatctttgtgctgttagtgtgtgaagaggtttgaacaaggaattaaaagcctagaaaaacaaggcgataaggtcttctagagggcatatcgagctttattgacgattttatttccacttgatacgtgactgccagcaaactgtttctcttaccttactatttcgtcatctgtaaaatgagtttaattatttatgtatattgcatattaatgttggaggccaaaaggtactagtcaaaaggcataaagaggctgggtgccatggctcacacctctaatcccagcaatttgggaggcccagatgggaggattacttgagcccagagtttgagaccagcctgggcaacatagtgggacccctgtggctacaaaaaaataattttaaaacattagccaggtgtggttgcatgcacctgtagccccagctattcaagaggctgagacaagagcatcgcttgagcccaggaggatcacagctgtgatcatgccactgcattccagcctgggtgagagagtgaaaccttgtctcaaaaaacagacaaaaaaaaaaaaaaaaaagcaaaaacaaggcatgaagtatatcagggatctccctatgggaatttttttctacattaaggttcatagctgttgcatgccaggaggggtaattcattcaaggagtatagggaatcaaactgaagttactgatgggtgtattatttgctatagctcctgatcctctgtctttgtgaattttagatcaggaagtgtgactggggcagaaagatgttagaaactatggggttgggcagggttgatctggggtgagtggccgagacccggactaatcctacaggcagtcttgcaagcaactgcggggtcggtgtcacctgggggttaagaataaaggccctggttagtgtctgatctgcttgcaaattggctctctgctacaaagtcactgtgcaacattggacatgttacttaacttctctaagctttggtttctttatgtgccaagtagagttgatcatagtacctacttcttatgactgtggggaggattaaatgaataataggtacaaagtccgaattgccaagtgctggatgtgtaacatacacattggaatttagagacagtacagaaaaaataatgcaaaatgtcttgttaatgattttcatgttgattgcatgttgcttgtagtgtctggctcagaataaatggtgaataattcttagttgccatcattaacattacaatcagcttcactgctgtcattatctccatcatcaccatctttgagagcctaagatagaaaggtaggaaggaaagctgaagttggagagcttcaggcagagatcagtttgggttaggtatggagatgccagtggctggctgggagctttcttggggccagtgtttctccgcctgtgccttccatctggtgctgagaacccaaaacacattcaatggaagaaaatatgtgatgaaatctgatcaagaagagccccctcaagtttaataaagtataaaaggttctataatcctcaggcaagaaaatggattggaaattcgtattcttagagttctgttttcctttttgaagcactctgtgtgttgtgtgggagagttatgctaaggagcttggcagaaattattattcaaaggagcagattaataaggacatacctagtattcatatatcatttaatttcaccatttattgtttacttattgtgtcccagacactatattatacagttaatggattttatgattaaattctcacaaaaagcctatcaaactcatgaagtcttgtacagaagaggaaaaggaatcttggagatacagctgcacaaggccatgtaattttttcaagaccatacaaccagcaatggcagagctgggattgca

SEQ ID NO: 588206 - DNA, 4001 bp, Homo sapiens
gaacacagccacaggccgggacgatacatcaagctcgcacccacggccctcacatgtccacgaagaccatgaagcaccagcccaggcccccgaccagcagcatggtgacgtggatgccatagacgagcagctcgttcaccaggcggaagtccacgcgccggcggcccagcagcagcagcagcaccgacagcttgcgctggaagcgcagcaggacgcgaacgcccaggtactgtaggcagaagagggcggccagcgcaccccagagcgccgcagtgaacaggctgcagctaaagtagagtaggaagcggatgaagccgtacagccagcgcgtcttgatgtacacgtcgaagttgttgtacttggtgcgggccaggtgggaggcgcgcacgggcccgcaggccgcatgcaggcaggtggtgtgcgggccgtggaaggagcgcacccgccgcggaatgggcatgaccggcattgggccccggcggcggcggcgctaggtcgcagtggcggcggcggtgtccaggcggctgttggcgtaggggtcatgggcgcctaggcctgggagcccgcagctgaccctggggggaggcgtcggcctgcggggagagccgcaaaacccacgtcagtatgaggacaccatgcggatccctccccaggcaatcagctggcgaaagtggacacaaactccagcaccaggactacgggaaaatggagtccagggcgggatctgcaggcactcctgggctcttttccacaaaccctcccaaggatacttccaaggggcccaccacctggggaagccaaagtgcttgttctagggcagcactggggaaagggggccttggggacagtggccaggggaggcccccggaagtggtcaatgccaaaacggatgggaaggggcaagagtggctctttcctgcaggatcctcgcagctccccactagctggaccacactctgctcttaggcagtttgcccgttactgccctggtcttctgcggctgcctgacccagggctgatgcaagcccttaaatggcatctgcaagaagccaccacagggccgggaaaagggactccagggctcgcaggtgaaccgaaaacgagcccggcgggagcaggtgactccagcaacctgctgggtgccagatggacggctcgggggccgtggggtcaccttgctgggcctgaaccctggcactgtccttccctagcagtgactttgggcaggtcacctgaccccaagacggctcctgctctgtccaatgggggtgccaatagcactgcctttgtgggtagctgtgggagggaaggggctgggcctggcgtgcacagtggggtcggcccggggcctggcagcggcccttacagactgggctgcaaagagcagaggcggcatttggctctccagcttcacctagtaaaggccgtttataccttgccgaaataatctgtagacggaatgaactcaaaggtcaggaaataaaatctgagcaggaaagttggtaacattacaggggactgttgccaagagcttcgcctgccttcagattcagcctggggccctgccgtggggacctggccagggcggaggagggaggggccggggccgcctgaccctcccgtgcccgcaggggcccgacctcgccctctccctccgcccggctcctccacggggtgcaggggccagagcggccctatttaaggccggccttggcctggagctcgccccggccgggaccccggccatggcggtgccactcaaacgcgactcggcggagctgtgtccccgcagggtctcgcggcccgcggctccatccgggtccctgcgtttctgcagacgcccgctcggcccggcccatggacccaggactgtttcctcggggccgcagagacgcaacgggccccggccaactccgcgtgagcaccgggcctgcgccgcgccgcgccgggccccctggctgcagagcccctgccggagccacttccgggtcccgcgccgcgcgttgccctggagacggcccccgcctaggccgggtccccgaccgcagctcacccggtgccctctccgcggcggcgccggcgtcccggacctcggggccggccggcggtgctaggggccgggcctgcgggtgcccctgtccctcggggctccgtgcgcagggcggccgcatggtgctggggcgcgcggctgggggcgctggcaaggcggctgagggcgtggttcacgcgtcgccggctggggtcgccctgcaggtgaaggggctctcgggcgcggccgccggaggcgtttggcctagcgtgggagccgtagcgccgtccctcgacggccaccgtagggcggcctcacgccccctccacccgcgccgaccgagccgcacttcccttccccctgctccgggcccgcgctgggcgtcccggactcgtcgcttcccgagggcgtgcgtgcgtgcgtgcgtgcgcacgctgcgagcagtccgtagcgttccctcccccgaacgccctcggtgccgcgcctggtcttctgcgcctgcgcttgccgttcctgggccgcgcctccgcgcacgcgctaccgcatcccgtggagaggcagtgcgcaggcgcgcttccgtggagcagtcctttggccccagcagagggcttgaccgtggtcctggccccggactgaggtgtctgcgacccggcgcgctgctgccgtcgctggggtggggccgggccccggaggaagccgctttcccggcgggggtgggcggcccagggaccgggagcaggtctggtcctcgcggggccgtgtgcgaaggcctcctgcgcggcctggggctgggaggacagggcggcggcgggaatgagggcgccccccaggctccaggagggcggggaagggtgggggcggctgacgccacgcggacccgggcggcacggatcgggtgtgtagctgcgaggcccggtgggccggcggcgacgtcggcagccgaagtagggacagccccggagcacgagcaggcccagcagcagccccagggccgcccccccgccgccccccagtgaaggaaggggacttgtgttagtgtcctcacgcctggttcgtacaggctggcggttgtcctgggggtttccagcgaggaatgtgttggggagcgctcctgggtgtggctgctgggtaggaggggaaggcagggtcagcagcccctggggcgaccgtaaagtgggtggcccttcaaattcaaggcactggaacaagggggctgggccctcctgcccaccaggcccgtcattggctgcaggcctcccgggacggcgagctggctcctgggcccctgtcctttggaccagggccgccctgagggctggcacagctaccttctccactgtggccccatccccgccacaggagagagagccgcctttacccgacatgagcaggagttcgaggaacatctggacgagcaaaggccaccaggaggtagcacagcaaaaaaggccaagagcctgttttctttaccgatggctggcggcaaatattccgaaagaaacgtgtcaggcaagaagcgctagttcacgcctgtcattccaccgctttgggaggccaaggcagggggatcacttgccccagaagtttgagaccagcctgggcaacatagtgaggcccctgtctctacaaaaaacttaaaatcaataaacaggtctccttccttcctcaatagtcctgttggtggctcacctctctgcctctccagatgtgaggcagatccacacgtttagctattgagataaggctgggcgtggtggctcacacctgtcattccggcctcagatctcttgtgcccaggagttttaagactagcctgggcgacctggctggcaacatggcctccacaaaaataaataaaacattttaaatatataaacattgagataatagcatcttgatgcctgtcttcattttttgtcttctgttttaaggactattagagacaaactaaccaaagataattctcccctcc

SEQ ID NO: 588207 - DNA, 4001 bp, Homo sapiens
gggcatgaccggcattgggccccggcggcggcggcgctaggtcgcagtggcggcggcggtgtccaggcggctgttggcgtaggggtcatgggcgcctaggcctgggagcccgcagctgaccctggggggaggcgtcggcctgcggggagagccgcaaaacccacgtcagtatgaggacaccatgcggatccctccccaggcaatcagctggcgaaagtggacacaaactccagcaccaggactacgggaaaatggagtccagggcgggatctgcaggcactcctgggctcttttccacaaaccctcccaaggatacttccaaggggcccaccacctggggaagccaaagtgcttgttctagggcagcactggggaaagggggccttggggacagtggccaggggaggcccccggaagtggtcaatgccaaaacggatgggaaggggcaagagtggctctttcctgcaggatcctcgcagctccccactagctggaccacactctgctcttaggcagtttgcccgttactgccctggtcttctgcggctgcctgacccagggctgatgcaagcccttaaatggcatctgcaagaagccaccacagggccgggaaaagggactccagggctcgcaggtgaaccgaaaacgagcccggcgggagcaggtgactccagcaacctgctgggtgccagatggacggctcgggggccgtggggtcaccttgctgggcctgaaccctggcactgtccttccctagcagtgactttgggcaggtcacctgaccccaagacggctcctgctctgtccaatgggggtgccaatagcactgcctttgtgggtagctgtgggagggaaggggctgggcctggcgtgcacagtggggtcggcccggggcctggcagcggcccttacagactgggctgcaaagagcagaggcggcatttggctctccagcttcacctagtaaaggccgtttataccttgccgaaataatctgtagacggaatgaactcaaaggtcaggaaataaaatctgagcaggaaagttggtaacattacaggggactgttgccaagagcttcgcctgccttcagattcagcctggggccctgccgtggggacctggccagggcggaggagggaggggccggggccgcctgaccctcccgtgcccgcaggggcccgacctcgccctctccctccgcccggctcctccacggggtgcaggggccagagcggccctatttaaggccggccttggcctggagctcgccccggccgggaccccggccatggcggtgccactcaaacgcgactcggcggagctgtgtccccgcagggtctcgcggcccgcggctccatccgggtccctgcgtttctgcagacgcccgctcggcccggcccatggacccaggactgtttcctcggggccgcagagacgcaacgggccccggccaactccgcgtgagcaccgggcctgcgccgcgccgcgccgggccccctggctgcagagcccctgccggagccacttccgggtcccgcgccgcgcgttgccctggagacggcccccgcctaggccgggtccccgaccgcagctcacccggtgccctctccgcggcggcgccggcgtcccggacctcggggccggccggcggtgctaggggccgggcctgcgggtgcccctgtccctcggggctccgtgcgcagggcggccgcatggtgctggggcgcgcggctgggggcgctggcaaggcggctgagggcgtggttcacgcgtcgccggctggggtcgccctgcaggtgaaggggctctcgggcgcggccgccggaggcgtttggcctagcgtgggagccgtagcgccgtccctcgacggccaccgtagggcggcctcacgccccctccacccgcgccgaccgagccgcacttcccttccccctgctccgggcccgcgctgggcgtcccggactcgtcgcttcccgagggcgtgcgtgcgtgcgtgcgtgcgcacgctgcgagcagtccgtagcgttccctcccccgaacgccctcggtgccgcgcctggtcttctgcgcctgcgcttgccgttcctgggccgcgcctccgcgcacgcgctaccgcatcccgtggagaggcagtgcgcaggcgcgcttccgtggagcagtcctttggccccagcagagggcttgaccgtggtcctggccccggactgaggtgtctgcgacccggcgcgctgctgccgtcgctggggtggggccgggccccggaggaagccgctttcccggcgggggtgggcggcccagggaccgggagcaggtctggtcctcgcggggccgtgtgcgaaggcctcctgcgcggcctggggctgggaggacagggcggcggcgggaatgagggcgccccccaggctccaggagggcggggaagggtgggggcggctgacgccacgcggacccgggcggcacggatcgggtgtgtagctgcgaggcccggtgggccggcggcgacgtcggcagccgaagtagggacagccccggagcacgagcaggcccagcagcagccccagggccgcccccccgccgccccccagtgaaggaaggggacttgtgttagtgtcctcacgcctggttcgtacaggctggcggttgtcctgggggtttccagcgaggaatgtgttggggagcgctcctgggtgtggctgctgggtaggaggggaaggcagggtcagcagcccctggggcgaccgtaaagtgggtggcccttcaaattcaaggcactggaacaagggggctgggccctcctgcccaccaggcccgtcattggctgcaggcctcccgggacggcgagctggctcctgggcccctgtcctttggaccagggccgccctgagggctggcacagctaccttctccactgtggccccatccccgccacaggagagagagccgcctttacccgacatgagcaggagttcgaggaacatctggacgagcaaaggccaccaggaggtagcacagcaaaaaaggccaagagcctgttttctttaccgatggctggcggcaaatattccgaaagaaacgtgtcaggcaagaagcgctagttcacgcctgtcattccaccgctttgggaggccaaggcagggggatcacttgccccagaagtttgagaccagcctgggcaacatagtgaggcccctgtctctacaaaaaacttaaaatcaataaacaggtctccttccttcctcaatagtcctgttggtggctcacctctctgcctctccagatgtgaggcagatccacacgtttagctattgagataaggctgggcgtggtggctcacacctgtcattccggcctcagatctcttgtgcccaggagttttaagactagcctgggcgacctggctggcaacatggcctccacaaaaataaataaaacattttaaatatataaacattgagataatagcatcttgatgcctgtcttcattttttgtcttctgttttaaggactattagagacaaactaaccaaagataattctcccctcccatgtggctcgtgctgggacgccggcaccgtgagatggcgcccgtggccagatagagggtggcgtgtaaagcaggtggtcacccgtcactcgacttttcgcgtgctggtgagggtggtcgcatgtccatggatcagggctcacacctggcccatctggtggctgtgccatgggaggagcagagccacagccccgctccttgctgtgggtttcccgtgtcctccctgccctgcagtcccctgactccagctctggattagacaccccctgcttcccactgtgcacccgcccagagaagcacagcatgcgtgcctgcacttgcccccacgctgctaccctgctctgggtaccaaggacacaggcacagcagagcccccaccctcgaggcacctgtcatcttgtgacagggacaggctgaggggcaaatgaccagaaagggtggcaagtgccatgtc

SEQ ID NO: 588208 - DNA, 4001 bp, Homo sapiens
gaactgtttacagtaccagaaagttcacaacactttctcaatcttcaacatcagggaagactggaaggtgaagttcatatcactatctggccatttctcacagttccaagtttctcagacaataggtaggctaacctagtcctcctgggaactatctaattaacgtagaatagaacccgagggcagacttgaaaaacagaagtcctccttggtttactttgtttctctgaaagcaaattgtggagtgccaacatagccaaacaaaatattttatcaacttcataaggtgcttgtaattttttcctggagcaggtaaatgctggcttagtgaacaatctggaatgtggtaattactctcgttcttgtttcagatgtactatcagcatgtagcagtttccaactgattcagggttttcctaaagtggcaggccttggcagaggtggtgacaacaatgcccgtgtcaaatgacaccgtatttcaagtattctgactccaggttattaatatcccctatatgatagtcttgtttctgtgatattcacagattatgttaaaagtttcccaaagtctgagaaaaatcatatcttaacagtatcttttttttttttgatcctttgtacaaaagtagaagtaatgccagacagattacgtacccttgttgtgaacaactggtgcatggcaactgtttgaatagaaatttaccaactgccacaaccaggcaactactctcccagagcctaacaatctcgattgcatctgaaagggccacccctcctgggaaagtgcaggacctccctcctgtttctgaatacaaagcctggtggtgttcaacgcggccagatagacccaatgagcacacggacatgtaatctgtgcacttctttagacaactgattaccatcagtcaagtgatgcccaagtcacaatagtcacttcctttaagcaagtctgtgtcatctcggagctgtgaagcaaccaggtcatgtcccacagaatggggagcacaccgacttgcattgctgccctcatatgcaagtcatcaccactctctagaagcttgggctgaaattgtgcaggcgtctccacacccccatctcatcccgcatgatctcctcgccggcagggaccgtctcgggttcctagcgaaccccgacttggtccgcagaagccgcgcgccgcccaccctccggccttcccccaggcgaggcctctcagtacccgaggctcccttttctcgagcccgcagcggcagcgctcccagcgggtccccgggaaggagacagctcgggtactgagggcgggaaagcaaggaagaggccagatccccatcccttgtccctgcgccgccgccgccgccgccgccgccgggaagcccggggcccggatgcaggcaattccaccagtcgctagaggcgaaagcccgacacccagcttcggtcagagaaatgagagggaaagtaaaaatgcgtcgagctctgaggagagcccccgcttctacccgcgcctcttcccggcagccgaaccccaaacagccacccgccaggatgccgcctcctcactcacccactcgccaccgcctgcgcctccgccgccgcgggcgcaggcaccgcaaccgcagccccgccccgggcccgcccccgggcccgccccgaccacgccccggccccggccccggcccctagcgcgcgactcctgagttccagagcttgctacaggctgcggttgtttccctccttgttttcttctggttaatctttatcaggtcttttcttgttcaccctcagcgagtactgtgagagcaagtagtggggagagagggtgggaaaaacaaaaacacacacctcctaaacccacacctgctcttgctagaccccgcccccaaaagagaagcaaccgggcagcagggacggctgacacaccaagcgtcatcttttacgtgggcggaacttgtcgctgtttgacgcacctctctttcctagcgggacaccgtaggttacgtctgtctgttttctatgtgcgatgacgttttctcacgaggctagcgaaatggggcggggcaacttgtcctgttcttttatcttaagacccgctctggaggagcgttggcgcaatagcgtgtgcgaaccttaataggggaggctgctggatctggagaaagtgaagacgatttcgtggttttgaatggttttgtttgtgcttggtaggcagtgggcgctcaacacataattggtggatgaaattttgtttttaccgtaagacactgttaagtgcattcaaaactccactgcaaaccctggtaggggacagctccggcactgcgggcgggaatcccacggtcccctgcaaagtcatcgcaattttgcctttacatgtaagaattctctcaagcatgattttcacactggggaatgtcatttttgctagttgcaatatgtggatgagttgtttttttttaacttttgaaaaacgtaccattctgtttgatgtgtaaaaaacacaaagatttttgaaaccttgcgtcttttggtctgcaggtgtatagattccacttactacagatgagtagcatttacaccactcagatgtgtaaaaaaacaaaggttttttaaactgtgtgccttttgatctgcaagtgtgagatggcacttactacagtgagtagcatttaatctttttcatcactaaaaatcacacagaacgttttaatcattcaccgaggaagaaagggaggaataaatacacaaaatggctctcaacgtctacaccttctgcagaaacagacccttttcctactgttctatgctttgtgaaagttgatcatacaaattgggtcattctttttatacccaactaaaatagtgggggtagggggtagaaaagcacttaggacaaatgacactgctcccacagtgtaattctctccaagtccagctgctgcaactgcccgttgtgacctgagaccagttttatctaatagttgctaaaatgacctgctgcagctctaattttatctaccaccatcactcaccagttgaaactcaccagctcctcagatccttaatagtgccaatgaattttctcaaagagcactatgtaacatttctcttttttaacaaaacctcccccttttctttgttgtgtggatataccgaagaccatctgatctacatgtatgccctaattgcaattctttcttcccaaataaatcacttaatttagagattcatctctgtatttttattttgactgacagcttataacaagtagctagcatttaccaagtttctacactgagttgtacttcacttatacgtggaattaaaaaacaactgaatttatagaaacagagtagacccttggttggggggcttggggggaaagaaaattgtagggtagggtacaaagttgcagttacgtctaatacatctagagatttaatgtacaacatgaggactagcgttaataattgtgttagtccattcttacactgctataaagaaataactgaaactgggtaatttataaagaaaagtttaatggctcacagttctgcaggctgtacaagaagcatggctggatcagcttctgggcaggccatagggaacttaaaatcatgatggaaggcatagggagaccccagacttcacatggcaggaactgggggaagagagaaatgggaggtgctacatacgtttaaacaactagatcttgtcagaactcactatatagtaccaagaggggactgtacaaaaccattagaagccaccccataatccactcacctcccaccaggcccaacctccaacactggggattacagttgaacatgagatttgggtggggacagagatccaaaccatgttattccaactctggcccctcccaaatctaatgtccttctcatattgcaaaatactgtcgtgccttaccaacagttccccaaagtcttaactcgatccagcattcattcaaaagtccaaagtcccaagtctcacctgag

SEQ ID NO: 588209 - DNA, 4001 bp, Homo sapiens
catccaggctggaatgcactggcaggatcatagctctcggtaacttcaaactcttgggctcaaatgaccctcctgcctcagcctcccaagtagctaggactacaggtgcacatcaccacgcccggctaagtttttaattttttgtagagacagggtctacgttgcccaggttgagcttgaactcctggcttcaagtgatcctcttgcctccgcctcccaaagctctggcattacaggtgtaagccaccttctccaacctggctctcaatacttgtaaccatgctgtttattttctcccagcccaaagagaagcaggatcctaaaccgtccactttccacaacaggagctgcccaggaccacttcaaggacagtgaactgtttacagtaccagaaagttcacaacactttctcaatcttcaacatcagggaagactggaaggtgaagttcatatcactatctggccatttctcacagttccaagtttctcagacaataggtaggctaacctagtcctcctgggaactatctaattaacgtagaatagaacccgagggcagacttgaaaaacagaagtcctccttggtttactttgtttctctgaaagcaaattgtggagtgccaacatagccaaacaaaatattttatcaacttcataaggtgcttgtaattttttcctggagcaggtaaatgctggcttagtgaacaatctggaatgtggtaattactctcgttcttgtttcagatgtactatcagcatgtagcagtttccaactgattcagggttttcctaaagtggcaggccttggcagaggtggtgacaacaatgcccgtgtcaaatgacaccgtatttcaagtattctgactccaggttattaatatcccctatatgatagtcttgtttctgtgatattcacagattatgttaaaagtttcccaaagtctgagaaaaatcatatcttaacagtatcttttttttttttgatcctttgtacaaaagtagaagtaatgccagacagattacgtacccttgttgtgaacaactggtgcatggcaactgtttgaatagaaatttaccaactgccacaaccaggcaactactctcccagagcctaacaatctcgattgcatctgaaagggccacccctcctgggaaagtgcaggacctccctcctgtttctgaatacaaagcctggtggtgttcaacgcggccagatagacccaatgagcacacggacatgtaatctgtgcacttctttagacaactgattaccatcagtcaagtgatgcccaagtcacaatagtcacttcctttaagcaagtctgtgtcatctcggagctgtgaagcaaccaggtcatgtcccacagaatggggagcacaccgacttgcattgctgccctcatatgcaagtcatcaccactctctagaagcttgggctgaaattgtgcaggcgtctccacacccccatctcatcccgcatgatctcctcgccggcagggaccgtctcgggttcctagcgaaccccgacttggtccgcagaagccgcgcgccgcccaccctccggccttcccccaggcgaggcctctcagtacccgaggctcccttttctcgagcccgcagcggcagcgctcccagcgggtccccgggaaggagacagctcgggtactgagggcgggaaagcaaggaagaggccagatccccatcccttgtccctgcgccgccgccgccgccgccgccgccgggaagcccggggcccggatgcaggcaattccaccagtcgctagaggcgaaagcccgacacccagcttcggtcagagaaatgagagggaaagtaaaaatgcgtcgagctctgaggagagcccccgcttctacccgcgcctcttcccggcagccgaaccccaaacagccacccgccaggatgccgcctcctcactcacccactcgccaccgcctgcgcctccgccgccgcgggcgcaggcaccgcaaccgcagccccgccccgggcccgcccccgggcccgccccgaccacgccccggccccggccccggcccctagcgcgcgactcctgagttccagagcttgctacaggctgcggttgtttccctccttgttttcttctggttaatctttatcaggtcttttcttgttcaccctcagcgagtactgtgagagcaagtagtggggagagagggtgggaaaaacaaaaacacacacctcctaaacccacacctgctcttgctagaccccgcccccaaaagagaagcaaccgggcagcagggacggctgacacaccaagcgtcatcttttacgtgggcggaacttgtcgctgtttgacgcacctctctttcctagcgggacaccgtaggttacgtctgtctgttttctatgtgcgatgacgttttctcacgaggctagcgaaatggggcggggcaacttgtcctgttcttttatcttaagacccgctctggaggagcgttggcgcaatagcgtgtgcgaaccttaataggggaggctgctggatctggagaaagtgaagacgatttcgtggttttgaatggttttgtttgtgcttggtaggcagtgggcgctcaacacataattggtggatgaaattttgtttttaccgtaagacactgttaagtgcattcaaaactccactgcaaaccctggtaggggacagctccggcactgcgggcgggaatcccacggtcccctgcaaagtcatcgcaattttgcctttacatgtaagaattctctcaagcatgattttcacactggggaatgtcatttttgctagttgcaatatgtggatgagttgtttttttttaacttttgaaaaacgtaccattctgtttgatgtgtaaaaaacacaaagatttttgaaaccttgcgtcttttggtctgcaggtgtatagattccacttactacagatgagtagcatttacaccactcagatgtgtaaaaaaacaaaggttttttaaactgtgtgccttttgatctgcaagtgtgagatggcacttactacagtgagtagcatttaatctttttcatcactaaaaatcacacagaacgttttaatcattcaccgaggaagaaagggaggaataaatacacaaaatggctctcaacgtctacaccttctgcagaaacagacccttttcctactgttctatgctttgtgaaagttgatcatacaaattgggtcattctttttatacccaactaaaatagtgggggtagggggtagaaaagcacttaggacaaatgacactgctcccacagtgtaattctctccaagtccagctgctgcaactgcccgttgtgacctgagaccagttttatctaatagttgctaaaatgacctgctgcagctctaattttatctaccaccatcactcaccagttgaaactcaccagctcctcagatccttaatagtgccaatgaattttctcaaagagcactatgtaacatttctcttttttaacaaaacctcccccttttctttgttgtgtggatataccgaagaccatctgatctacatgtatgccctaattgcaattctttcttcccaaataaatcacttaatttagagattcatctctgtatttttattttgactgacagcttataacaagtagctagcatttaccaagtttctacactgagttgtacttcacttatacgtggaattaaaaaacaactgaatttatagaaacagagtagacccttggttggggggcttggggggaaagaaaattgtagggtagggtacaaagttgcagttacgtctaatacatctagagatttaatgtacaacatgaggactagcgttaataattgtgttagtccattcttacactgctataaagaaataactgaaactgggtaatttataaagaaaagtttaatggctcacagttctgcaggctgtacaagaagcatggctggatcagcttctgggcaggccatagggaacttaaaatcatgatggaaggcat

SEQ ID NO: 588210 - DNA, 4001 bp, Homo sapiens
ctttgtttttaaataacacaccctttgcaaagcacaaaacctgcttcaagatgtcctactaatgctgctgctacaggccccagctctctgagggaacctagacccaggcagccgctaaaggtgaatttgcatctaagcttgtcctgaacttacttatctttgcccctttccttcagtttcttcatatccaccataccacctgtcttcatctgaaagggatcatcctgcagaaagcaaacacagttaagaggaagcatctaaatacatggtagtggaatttttttttttgtgaagcacgctcactcactgaagagcactgcagggagggctgccataactactcagggaagaccccataacttaccactagagtggtctcctcttgtaccttctctcccaccagcaaggccacagcactgagcaaaaccaaaaaaaaaagagagggggagagagagaaatggcataattcagagataaggaggaaccctctcaggtatgcggattgcaacattagtgcaagggtgggatttgaggggtgggtaggcaagccggctggaaaagcctataagcataagacagggctcaacgagcaccgcagatgctggaagaagggtgcgctggtggtgaagtggtacactttgccactttcctgtaaagccatttggcattatcttggcctggaaatctcatttctaagatattctcatcatggaaagtgcagctaaagataaatttaagagaatatccactgcagccttatttgatagtaaaaatttacaaaatcacctacatgtcccaaaataggggatttgttaacaaattacaatacacacatctggtggaatattatgcagccattaaggctttctgaaaaatattccacaatatgggtgaatgcccacaatgtcataatgagttgaaaagaacagggaataaaagtacatagaaagttgttcacaatctgagagagagagacgaaaaaaaacagattggaaagagtattcaatattaataccagtgcattcttgggtggctctgcaaggaaaaaaaatgttaacactgatcatttccggatgggagaattatgggtgctttttatcgtcttgactatacttttctaaattatacaaactcttaacgatcgatatgcatttcacaattaattggttttaataaaaaacgcgagttagtgatctgtttctgtatctctggagcacaccccgagacgacacagctcagggcatgtcctggttaaacatttgcaaagaacgctgttctccaagttgggcagtggaaggtgtacagtgtgtcaagagaaaaatctacgtctgaggagatatttgtgacagcgacccggacgcggatgtgtctgtcgtccccgccgcctcctcctcctccccgcgtggtacccacctcaccccgttgggcctcttcctcaagttctgtacctctctggtctcttccagttttaatctttaaaaagaagaagaagcagcaatgcataagctgagtgattccccgcggaatccaaagctaacagagccaataaggcaccttcgagggcatcccagcccagctactgagccaccagcacagtggtccagaggacgaccttgtgcctagacccaccgggagtcagagccactgcgcatcccggaggcatctctctcaaccgttcgagcttggggcggtggcctcaccccttgagcctcaatttctgcgtccgcagaaggaaccaccacccgagctcacagttaacaatgtcagcgaagcgccgagccggtggtgagtcccccaaacaagtctatctttaccaagcctatgggagccccgccccaaacgcaccgaacctcctctgagtcctgctcatcttcctctgactccgagtcgccccggcggcgacggaaaatcttccggacgaccggcatggtgacaacggccgagttgtacagccgccgcgcctctgcgcagcggcccaggctgcttccggcgcgcggcagagcggtcagagcgcctgccccgtctggccccgcccccggcacgcacagtccgcgtggccacgccccctctcctggcgtcagcctcttccgattggacggcagagggaaggaggtggggcgtcgccagacggccccacaaccctgcgcgtcgcctcagagggggcgcgcttgactgacaggcggcggcggcgcagttgcgagtgcaggtgagttccgggccgccaccggctgcttctgtgggccgggcctctgagcattggcgaccccagcccggctccgggctgacagggcctggcttcgccaggtacgccagacgcagcggcccggtgagcggagcccgggacccccccggccgccgccgcccctctcccctcctccggtcggcgcccaggggggcctctgggccccagcaccaccccactctgagctccctgggggctcgtggcttctccagaaccggggccgcccccctctcatttctgccggggcctgacctagcgttgaaagcatccgcgtggcgtctcgcgtctcgggcgctgacttttctttcctcgggctctgagccctgacgtgcgtttttttctttcggaacaaaagatgaccacttctctgcggtgctgacttagagtcccagcgccgactgcctcacaaataatggcccccagcttctccgcgaggagaggcgcgtctgatgttttgaagccacgcaagagggtttgagccgggggactcctcctcggtgcttgccggccacccccctggaccttcacgggtctggttttcctccttcggcaggtctgtcgctctaccctctgccccttccaccccgaagatgctgtgaggataaagtttatttgaaaaactggtatcagcaaacgcttaggaaatacctaaatgcataaataatggcttctaggacttttaagaaccccttaagtaacagtagttttccttttctcagtgtcatcccttactttgagaactacctcttattaagcagttactatgtggcaggccctgggcaaagcatcatctcattgaattctcccagcaatcctttgaggtagattgtttttcgttttacaaatgagaatgcggagtctccgaggggcagtgcacgcctcaagttacccagctaggaggtggaacaggaattggttgcaggtcagtctctgccgcacggtttgcacagggcctggcacggtaggagtgcagtagatgtttgctgctgctgcagctgctgttacatctcattggctagggggaggggccgatgggggctgtctggggttcccctttctggaagaccattccgaagcagggcagcatttctagaatgccttacgttttctctggaacagtctccactgagattgttcttctcttccttgggctggaaaaaatagtagactcgggacttcttgcaccagcgttttatctttggtcaaaagccatatattaaagtctcaaagtcttgccctctgcagactggttcagccaaacccagatgcacgtgcactcactggatacggagtccctgtcagatgatggagaggctccttgggaattgctgcaggagtccagggggtcaacgtctgcagctctcacgctctcagaggtggctctgaatctgcccatcaagcagcccatccaccagggggtactggacactactaaggaaagggcaagaaggccaggggcatttctggaccctcctcctcagctgaagtcccagggtacagatgagctgctcccacccttgctccatgaggccagaggacccagtgataaccaccacctgtgctgtggcagatctaattgagtgctctttagcaaaaggaatgctgaaaaagtggcagctatgaatctggcagtaagtggctttgccaagagactgcagcccaagtctcactgggcccttttaagcgtaggatgagactgtctctcaaaaggaccctccgagaaatacaggttctatgcagttcaaagatgaatccaagg

SEQ ID NO: 588211 - DNA, 4001 bp, Homo sapiens
attttgtgtgctattgaaactaaatgcatctttgagaagtttggcctttaatatgcaaaagatgctatcatccttgttaaacactggcagaaaactaaaattcagtcttggaccctctatattcttactcttgcaatattctcattagctcaagtactattttttgtgtataactcacaaatcaatatttctagttcaggtgtcaatttttaaactagacatgactacttaatttcctataccaggtatattgattacaattattggaagagattttaaagttccctatgactggcctgcacaccagaccaatttatcagaatatatctcaggcttcaacatttttttttaactattcaggtaattccaacatacagccaaggctgagaaccactatttagaagtaaatttgacttcttaattgatacatgttcattccattataaaatctttttaatttgacaattgtagacaatgtatattacacaaattttacaaaaatgtgcctcactacttttactaaaatattattgaaagccagtattacaacctcatttaaacatattgtatcttctagtttctcttgacaaaagttcactttatccatacaaaaatcttctttcacaaaagcttccaaagtttcttgaagagagaaacattcccttaaaaaaaaatacattaattagtgtttactaaaagcaagttacatactaaatgtagccaaccaaaacacataatcattaaaattaaagttgaggtaaaacgatgataaaagttattggccgggtgcagtggctcacgcctgtaatcccagcactttgggaggccgaggcgggtggatcacctgaggtcaggagttcaagaccagcctggccaacatggtgaaaccatgtctctactaaaaatacaaaaattagctgggcacagtggcgcacgcctgtagtctcagcaaggctgaggcaggagaatcgcatgtgcccaggaggcggaggttgcagtgagccgagattgcgccattgtactccagcctgggcgacagagcaagactcatctcaaaacaaaacaaaaaaaaacattgttgataacatctaagcttgtgatcatactaaaacattttcacctcttaaaaatatttacagcattggtcaattaagtaagtacctggaaaaattagcttctgtgaagatctgtcctttgaaatctaaaagaggatcctttaccaaaaacagttttagtctactcaagagagtaggcaaagttggtaggtgttttctactacttacaaaaagtattcctttatcatcaataaataaatctgaaaagaaataagaaatataaaggaataagaaaaaaacaaaaagttatccaaagagatctagatagttaatgtaatcagtcattagatacagctgggtttttcaatcacattttaaactctgtagctcttcattgtactgtgcatatagagcatgtagcatagttctggaacaaaggcaaaagtacaataaattttagtattatctaggacaccgaggaatagccaaatatcccaaaagagctgtaacggctaatactttatcaataaagattaatcaatggaggaaaatatcttatggacttacacttcaaaatagccaggcgtagcctaagcaaaattttaaagaaatagaagtatttgacttctgctgaccttggtcttctctgcatcattttacctcttaatatctccaattcatcccccagagtctctgacatgtagggaatggagatggtctacagtgcctacaaatgagactgattctattattcttaagttattcacatggttgctataaaattatttacagtgaaagttttaagcaaagaatctacttgaggagtatgatatagcttatgtattaagaaacactactgctaacagttaatttctggaataaatttctcctctcggtctccaccctgccttgtctgggtttctttagaatcttggctagctgtctaacagctttaacagtttctaagtcacaggaaggaacataaacttgcccccaattcttcaataagtttttgagtagaaagagaaaaagaaaaatataagctcagatgaagaactactcaaaaagccaagttcccaaaaaagaaagccatcctgaagggagagcaatggtttctcatcctgggtattgacttttcggttaagtgacgctgaatggcataagaaaagaatagtacggagttttcaggtagtaatgtctcccacggttaactacataattggtatgcaggcagcaagggaacatccctttgcttggtgctaacttgatatgccttaagagaacttgtggtatgaactagcttcctaaaagagatttatctgaacttaagttcctgacaatctcatggccaaaagcttcccatgacacaccaaaggaagttagtcaatcaattccatgtctaaggagggcttatctgagacagttaaatatggtttactggtataatccattctgtaagtattaatgaaatcacattaatagtaaaaacccaaacagcattaatttatatcctatatccaccttctgcttctaaacagatcctccagccatcttccctatctacagcctcattctggatatttctggaactaaatggctgacatctgaagtcagttatatggtcttgttttccatccacccttttttgatgaaaccacttgagggcagcatcacaccacaactaatattctttgtaattctaccaaggttgtttatagcaagagtgccacttccttactttctttgagttatacagcatgccctggagttcttattttactacagctaatacatgtactatacagatataaggagactgttttcttctattgtagaggaatattaaattgtcaccaggaaacaaaattttggctagttaactatgaaaagaagcagaaaaaggtctactaatatgaaagaagagaggtttattctttacaaaggacacttttgtctccctagaaaattcaagataatgaaatgaaaacaaaagagttcactaagttatctgataaaaattatacaattaatgtttttttttaatatataaaaacttggtcataaaaattaatggaaaaaacataaaaataccaatttgtgaactatcaaggactaaacataaaaatattcagaaagtatatgcaggaaatgatagaactttattgaagatcatttttttaaaaatttgaaaaaaaggcaagataaaaaacactttcctagctagaaagactaactatggtaaaattttaaaggatcccattaccatttcaagaggtctgttttagaacttggaaaagtgattacaaagtaaatctggaagaatatagttatgagagtagaaaaaagtaataaaataggagattatttatatattataattatacatttaatagttaaaattatatgatactgacacaataataggcaaaatagatcataatagaaaatccagaaatgaattctaatgtggttaaggatttaatatataatgtgagtggcatttctaatcagtgggaaagaaaggactatttcataaatgatattggggcaattatcaaaaacacttggaaaaagatttttattcctacttttaaacatacatcaaaatctaaaataaaactaggcaccttcagctgggcctggtggctcatgcctgtaatcccagcactttgggaggctgaagtgggcagatcactggatgtcagaagttcgagaccagcctggcctacatggcgaaaccccctctctactaaaaatacaaaaattagccgggcttggtggtggggacctgtaatcccagctactcgggaggctgaggcaggagaatcacttgaacctgggaggtggaggttgcagttagctgagatcacaccactgcactccagcctgggccacagagcaagactccatcttagaacaaaaaacaaacaaacaaacaaacctcat

SEQ ID NO: 588212 - DNA, 4001 bp, Homo sapiens
atcacttgaggccaggagttcgagaccagcctggccaacatggcaaaaccccatctctactaaaaatacaaaaattagccgggcatggtagtgcatgcctctagtcccaactacttggaaggctgaggcaggagaatacctcgaacctgggaaacagaggctgcagtgagcagagattgtgccatggcactccagcctgggcacctgggtgagagtgagactctgtaaataaataaataaataaataaataaatttgtatgtgtacatagcttatctcccaaattagacctttggttccttaaggagaaagaccatgtcatatactactgtcagaatatacaactgagtattccacctaccaccagtgttacttcttactagttttgttaccttgaacaaatcatttaacatctaagcctgtgcctcattgaaaaacatgaaaaaaaatacaagagtttagtggtactttgggaggctgaggcaggtggatcatgaggtcaggagatccagaccatcctggctaacacagtgaaaccctgtctgtactaaagatagaaaaaaattatccaggcgtggtggtgggtgcctgtagtcccagctcctggggatgctgaggcaggagaatggcatgaacccgggaggcggagcttgcagtgagccaagatagcaccactacactccagcctgggagacagagtaagacttcatatcaaaataaaaaaagaaaaaaagtttagtggttaagagtacaggttctggaaacactctgcctagattttaatccttggactgctacttattatctatatgatcttgggtaaacatctcaacctttttgcacctctgttttttttatgtacaaactaggaagaatagccttttcagagtgtcgttgtaaagattaaatgtaatgtggcatgcaaactgcttagaacactttaggttccatagccagtcccataaccattgctttcaaagagtcttgattctcttgcctctctttctcttgtactaacttagaacaacccctactctacactttctgtgtatgtacactaaaacagttgaaaattactggaaaaaaaatcacccagccgtgctaaaggaactcattccaaattatgactacaaatttcaaatggccacccaacattgacagatgataatagtataccccttaataaaactggctttcttgaccacagatgaggtctaaaaaaaaaacaaaaacaaaaacaagaaacaaaaacaaaactggctttcttgctctttaagacagctaattcacatattaccccttcaaatctttagtgtccattccattatccactttcagtgtatgatcttaccttcacatagaaaactgatacagagaactacctcattttccaccaccaattctaccaacttactggcataagtacctgcaaactctatcttcctatctacacaggggaagaattattttagttcctactgaatactaacttctctaactgtgctcttgatcctatccccttttactcctgttatcctttttctttcctgcatcatcttattctctttttaccaaaattgtttccattggcaaacattttacagtctctctcatcatgtattttttaaaaatcacacataaaaaacaaaaaagaataactctttactccacttctcccataagttagtccatcatttaaaaatttttcttcatagcaaaattccccaaaatattcaaattcactctctcactttcccacttcccattatcttctcaacatactccaatcatattccaatatattcctatcacactccaattatattccaatcatattaataaccaatattccaggcaaaccactcttatcaaagtcatcaatgacctacatttagtcaagctaatggtcaactcactatcctcacataacttgagcttttaacaggagcccaacacattggactactacttccttcttgaagcactttcttctttagaattctatgccagaatcatttgattttcctatctcgcttcttaggtaactccttttacatcagacttttaactgttagagtgttccagggctctgtcctaggtcttctaatctatttatactcatgctctcagtgacttcatctagtttcacaggtttatgtgtaatttacatattgaaaactccaatttgaagctctagcttgagaagcaggttcactgtataccgattaccaacttgtttgagtatggtgagacagaatacccatacacaggaagttacatgaagtagatttattacttacagataggtaacaagggacaacagaagcctaggattcattgtgaactggtcccgtaaggctcaggaaagctgcccagggcaaatgaagtcttcatatgccacacttgcacagcagctgaagaaccccagaaagcagtccacctgggtttgatgttctgagatcaaaggacgtgctaggctaaagcactgaaggacatcctgttttgtgggtgggggaagactggcacagagagtaggctgttctggccagctcctcctttatctcagaatgttgcattcccagcacattttatagttattcttaagaacttcaagtgaggaaaggaggccaaggccacccagaaaactgtcctgagcagctgtgctcaagattaatgtaaccaattgccttcttaatgatccatttagatgcctaataatctggccgaagcacagctgttgactctgaccacaaattggcttctctataagcctttccctattttaggaaatggcactgtcatctacctggtttctcaggtcaaaaacctagaagaaaatctttattcttctattttgtgaccccctcactgttgacaatttgtaaaataagctagattttaagtacatctcacatctccgttactataagccttgtccaagacactgtaatattttatccagagtttagattctgggctactacaatagctccctgatagatttctctgtctctcctcttgacttttaaatccccaccctttctattctccagacaatcataactatctttctacagcataaatcaggttatatcattccctttcttaaaattgtccagtgacttcccatatccacaattgtcttagtcagtctatatagctataacaaaaatatcatagactcggtggctcaaacaacaaacattcatttctcatagctttggaggctgggaggtccaagattaaggcaccagaagattcagtgtctagtgagggcccacttcctggttcatgggtggctgtcttcttgctggcctcacatggcagaaaggtcaagggagctctttggggtctcttttataagggtactaatccctttcatgaggactccatcctcatgttctagtcacctcccaaaggccccaccttcaaatataaatttggggggacacaaacattcagtctattgcagctgtaatcaaaataaacaaacaaacaaactcactgttatggcctacaaagccttattcggaaattgcctacttctcagtccctttttcattacccagtcacaatagcttaattttctggtccttacacacatcaagttcgttcttgagtcaggaactttgcatttgcttgaagggcttttcccccatatttttcatggttgttgctttcccatgattcaggtctcaactcaaatgtcctcctcctgagagagacatttccctaactatcttaggaaatagcactccctactcccgcaatttcatatcacttagcattactgtctcttctctatacatttatcaatatcagatactagtttatatatttaatggttttgttgctgtatcctccttaccagtctaaaacccactgagagcagagactacttctatgtcttttaagtactgtgtccttagtacttataacagtgcttggtacataatatataccaagtaaatgctgttaaccgacttgactcctccaaggatg

SEQ ID NO: 588213 - DNA, 4001 bp, Homo sapiens
ggagagcacttaatttaaaatattcttccttattctcccttactgagctgtgttgcccttcaccaatatttatcataatttgtatttacttatctttctgctttctttttgcccatatcacctagaaactataaactccgtgaagggagagtcagctcttttgaacacggtatacctatgaacacagggccttgcacacggaaggtgcttattaaatatttgtagaataagcaaagaaagaaagaggaaaggaaaaggagatcacaggttaccaaaaacagatgactttgctttcccaatcaatgtcgggaaattaatcacttattgaacacttactatgacctaggccatttatgcataatcatatagtttcgcctcccaacaatcctgacaaatttgcatttgagaccaaagtaaggctcagagaaattaaatattatacaactcactcaagccgcacacctagtaaatttgagctccataacttttgtgaatattaggtttatctgagtgatgctggcccctaatatgcccctgttgtcaatgattttctctccatacagctatggagacagggagagagattcacagcaaagagcaaattagtagttttttgtttttgttttttgagacggagtcttgctctgtcgcccaggagtgcagtgatgtgatctcagctcactgcaaccaccgcctccagggttcaagcgattcccctgcctcagcctcccgagtagctgggattaccggcacccgtcaccacgtcggctaatttttgtatttttagcagattgggagtttcgccatgttggccaggtcgttctcgaacttctgacctcaggtgatccgcccaccacctcggcctcccaaagtgctgagattacaagcgcccgccaccacgcccggctaatttttgtatttttagtacagatggagtttcgccatgttgaccaggtcgttctcgaactcctgacctcaggtgatccacccgcttcggcctcccaaagtgctgggattacagcactttgagccacggcgcccggcctgcaaattagtacttatatacaacccaagtcctctggctatctagacagtctgaattttttagcaggactttacagaagtcctgctaaagataaacagcaaaacaagtatttttacattaaccaaatatttttatcttcaaaacaattgttacaaaacagaaatttcacacaatactagtgaggacagcctaagacagcttaatcattcacatttcctctatgggcttggggtttttggaaaaaaaaatcgtagctgcataaacttggtgtaaaatttgaaaaagccactcatgccacaatcctcgtttccctctgctaatgtgatccagatgggaacgctgaacgacgtaactgccccatctgcaccttagatttcattagggtcctgttcactctgtgcaattagttaagtgtgctgaccatcaaatatttaccaggagacaacatgtccaggtcaaagaaagggcgtgagaataacattttagaaagagttgcactgcagccaagactaactctgggctgcggtccacactcgccccagccgactcctctcatttcctctctcccctctccagtgagccattccttcctggagtcaaagacggtgcaacaggcaggttcctaccttggtctgcacacttttatcgaacttgtcatttttgaagctaaacgtattctggtgcttctgaggtctggaacgagccacgttgcctttctgggagctcatcgccgaaatcaaagccacccctcgccgggagcaggcaaaaggatgaggggaaagaaaaccaacgaactactcccaggaattgacgcttctgtcaatgacccggaagaaacaaacgcagcctttccgccccggctctgggtcagcccacgtgactcttctgggaggtcaaagagcatcgctctgccctccctgctgttaagccaagccactccacgcggcgcagcctcgacccctccggctccgcgcagcctctttctcaaacccggagaacaagtcccactttcttcgaaatgagaattcccccattggcccgaatgtgtagtccatcaaatcaaaggggcggggaacctttgttcctattggttcttcttttccgcaatccccgcctcctgctgagcgagctcagcctctccttgagctcagagcgcctcccaccctgccgggcggcctctgattggtggaagtgaggcaaggctgggctccgtctctccccccgcccgctagtaggctggagccggggtcagctttggcaccttcctccagtcagtggccaactcctggctcagtggggattgtgctcgtcccctccgttcccctccagtcttcctcccgctaccggaacgagcctcgcgcttggcaggctgaggaggagcaaagaaagcaggattaaagagaaggaagacctggctaggtctgggtggcgtctgcagtgccagaaagggaggcggtggcggcggcggctgcgaccacggccgcgcgggacgtgaggcccgagagcaaccgacgggcagcggcggccgctccagcgccccgcaccggggccgttagtcagcagaacgcgagctcttgtggaggagcagggccggcgcgaggcgagactcgggagcgtgagcggggcccctggggcgccgccgtccttcttcgccccggcgccgggggctgtagccctggtccccgctcctctgtcgggccagtctgcaggcggagagagtcggacggcgcccggagcgcggatctcgccttgtggaggacagcgcgtcggctgcggttctctctcgaccccttctgcccggcgcttcggcccgggccgctcaggtgcaggtgcgtgcggcctcggggtttggggacgccgcagcccggctcggggagggggcgctaggccgggagccgcagcgcgggagggacgagcccgggccggcggggggaggggagcgggaagcgtctttgttgttggcgaccgggatcccttctcggcacaggggaaaggcggggaagccactcctcatcgggtctgtgtttttgagaggattctctgatggttgcgtgaaggggagcggtaggacagtccctgcggtccgtggagcggccggagtcagggggtgggggagggaggaccgaccgacactctaagaaggtctttggtcctcctcggtgaagagaagggttccatttcatttcctttgcttttctctcagtggatgaaaagatggggtcaggttcccattcccctcactggcgcactgagagattcgcgggtgcctaaaagctttctcctgaatgtccttatatctctgtcgggcgcgattttagattgaatctgcacggggcttggcgatttgtgtattccggtggggctgtcgtagggttctttttctttagatggttgggctttaatcttatttgttttcgaactctaaggtaggcttatcaggaatcgtttttgaattggaaaatttaaaggttttgtttgggattttttttaaccccgaaacaaagttatgtcaaattagattgtactgtgtgggggctctcgtgaaggaaagagtgtatttaacctggggtttttgtttaaaaaaaaaaaaagttcagatctttgatctttggtgagatctctgccaatgccagaagagaattttttgtaaatgatgctttaagtcagtgtgaagtagatttggtaagcaaaaggatgaataacggaatacagagggtgacctttaaatttcgctgtttatgaaatgtgttcctgtttaatactttttgtgatatatgatgcttgatctatagatgattcatttggaatttttttatgcctctaataaatctttggagatcttgtgccaacatatgaaactataatacctaatgagtcggagtagaaagccagatacatgttgtaataacgttaatctgtttagattaacagggaaatttacattaaaatgaacttt

SEQ ID NO: 588214 - DNA, 4001 bp, Homo sapiens
ctcagtgctcagcccaactaaaactgctcactccccggcacagcccagggggtaacttgtcaagcacctgccccacgcagacacctcctcagcgttctgcaggcactggctcacatgcgctgctcacagcgagggctggcgcaaggcaggaccccagttggtgcatggaggcagtgagcctgggactatgggtctgcagcctcgcagggctgtccatatgaccctcccagagctgtgctccatgggccttggttccccatcccaaaaactaagggttgtgagggaatgtctccaggcccagtgagtagacatagcaggtaggaagcatacactggacaaggtgaggcctatagtcagagccttcagggacccctgcctgatgtggtttcccagctccagggtccccttatgcaaggaagcttccctgacaggcagaaagggacaaagtccctttgtgcaggaaggctccttaatggacagcaaggcctcaggctctgccaacacccagtccctgggacagggctccctggagaccaacacagctctgagttgtgtcccacgcattctgatgaactcactaagggaattacggaatcccagcctgggcagggcacaatttaagactttgtttccccatctgtacacagacgagatattccaggtgtccccatctgatcattttcaaacaggaatcacccaacacagggtccaatgcacagtaagtgctcagaaatgagagccacaaataagaagagttagaagggaggacaaaggggagcaggtggcagctggggtctcttgtggcctaggctggaagtctcttctggcctggtgtcctggaagtcatcagtttccagcccatgagatcctatttgtgggcaggacctaggctgagactcaagagagcgagcaccgagagaggactagggacttctggggctaccctgagcccctgagccaattctgctccatgaaacagaacagtaagaatgaagtgtagcttctgggaacccccatactccctggccgggctgccatggggtcccttaccagcccatcaccctcatggggcttctccaacaggggaaggtccacagggcagagtcaccctgtttgggatcaggaggatggtgggcaggtccccagaccagagaggccctggggaggaaggctgggctggggccactagcgtggagcacaacaaccttggggggtccagtcgctgtccccgattctcttagaactaaacaggggcaagagcgtcgtggaccaccgaaggagtctgggagactccaagagtcccacaggaatcacatgccgccgaggaacgcatcgcctgtcccgcgacctcgctggggtggttgtaaggatggagcgttgtttccgtggccagaatcacagcaggaccgctgtgaattctctccggtgtcatttctaccacctcctactctttcagaccaaattccccaccacgggacacacacacattggcagtggctgagcccagaccgcggctgtgcagccccaccctggagctgccttgtagcccccgccctcttcgggccccgcacctggccaccacccatcatgcccggcaccgcctcggctggcacggccccgccgggtagaagccccgggacacccaccacttcgcgggggtgcactcgcgcaccaccgacagctgacgggccaaggtcactcggcccccgctgcccaggcgcggcctgcaggcgactcgcaaggcagccggacccccgggccgggccacccatccagggcgcccgcatccctgccgcccagccgaccccgtgcccacctgtcatggcgacggacacagcgccgcccgcagtccccagcggtctgccccgccgcgcgtccgcccctcggtcagccgcccggtccaccagctccagcgaacgccgcccgcgggccgtgctcgcccgccccttttggctaggccagccccccggctttggctgtgtagcctcggggactctaaaccccgccctttgacgagccccgccccctaccgttaggccccgccccttccgcgcccgctacggctcccccagggctctaaactccgcccctctcactcgagtcccgcccccttgccgtcctgggataggccgctgcgaggatcctggagccttgcccctcactcgagccccgccccctccggcgtcggcttccgcctctcccggagttctgagccccgccctgcacctgaaccccgccccctccgacgacggcttccgagcctcaaggaaccccccaccgggccccgccccttactcgagccccgcccccctccgtcgtcggcctccgcgcctccaggggccctgagccccgccccttcctgctctgccatgcgactgcgggcgtgggcgggcgactgcgggcgtgggcgggcgccaccggactcccgcccctcccagcgtcagttaagacgccgcgaggggcccagagtccctcccctcgctgggccccggtcccgccggcgtctataacgccgtcgcagcggcctttaaccccgcctctcactcgagccctgcccgcgtccaagtcccgccctcaaggcggcctcagctacgaccgccgcgcgcctccctggaggcgcccgctcctgcccggagccctgcccgtcttgggcccgcccttccgggccctgccgcgttgagtggcggagtcgggatccaggtggcccgccggccggctcagtccacctccccgctcccggcctcgcgccccaccccttggatgagaaaactgaaactgagaggggacgtgactgatccaacgtcatacagaaagtcaggccctggggagtacagggccaggcctggggcaaaaggccggtgggcgtccagtacgccacagggaccagccaaaggaggcagtgcccagtgatgctttcccaaatccaggggagaaggactcaacggtgtgacctcgctcggcggggtgggggggggacaccttcttgggggaccccagtcccccaccttcaaaagaagacactagcttgacagtgtgacccgaactagagaggtcacttaacctgcctgagcctcagtttcctggactgtaaaatgagtgaccttgggccaactccacttccctcccgctttccttcctgctttccctctcgtaggcctggcatttccagctccggagcccgccacaagaagctcctagccccacatgatgtgaatgcactgggccccagccaggaagtggagacccgtgaaggaaggaatagcagcactctcccagccagcagcagcagtttcccttcctctttccttccctgcctgtgtgggccgttcccccatagcagctctaatttgagatgccagagcctgacccggaatgggggcccaactcagtgtccccttctcggacagcacagtggtccctgcagtccatgcgccatctgtctctttgcctcagttctcccctgtgccatgacctcccatcagggccggcatagggggcatcaggagaatgggtgcagttgtcacctggaaacctcaaaattcttggggcccagtcatggtcactatacagcagccacccctgtccccaaacactgaaggtgagccccgtccatgctccccaggaggccaggctgccatcagacccagcctgccccaggcccatgtacagggccgtcccagggcaggagggtagtggaccagcctgtgggtccctgcaggcctctcatctgcttgtgtgcctgggtgagtccaggctggctctggcctccaggtgctcccctggaggacccagagggggcttccccagagggcctcttttgccccagtgggatgcagcctgaccccaattcttctgcatccatcacactgttatgacgtgtagtacttacttctctgggtttattttgcacacactcctgcccctgagtgatgtcagagccataagggtggcgacggagtggaagggggacacagtggggactgcaggggctccaggcactg

SEQ ID NO: 588215 - DNA, 4001 bp, Homo sapiens
ttgcagtgagccgagatggcgccactgcactccagcctgggcgacagagcaagactccatctcaaaaaaaaaaaaaaaaaagatagctgcaccttgccatactgaggcctgaggcaaaaggagaaatcagtaacactgagcctacctttacttaaatttttgacatgttattctaaatggattttaggcagcattatttttgatttttaaaatatattgcattaaaacgtgaaaaacatccacctcaatgattgaattgccggcactcccttaagttttgtgctgagggtgcatcacttgccttgccctaatgttggcccagggcttacaaatgactcaaaggtgaagctccagaaaagtgagagagagcacataggtggagttccagggagaaagggcgtgtgccctttcggcctggcttttccctcatcatggtgggagctgtggttggtagtggttgagaggaactgactctgttcttgatcctagcaacttgtgacatgcacgccaggaatgtcatgagaggagctgtaataagctatccgaagtgatcgtcccttgaacgagagccactgcagccaaattagtgtggatgaagggcacaggggacgggcacttctcgatctgggggaggagggaggaaaaaaatgattacccataggttttaggctttaattgatttgtatttttccaggctgctaaagaagattgaatcatggtaggaaaagcgcctagggcttaaaataaatgaggagaaaggcaagtcatttcagaaatgtccaggaagcaaaacaaacctctccagtgcaaatggcaggcatggctgttgtgttctttgctcagggggaggcagcttccttttcttccccagctatctttacagttgggtttgacaagcctaccaaggtgtacacactttgaggaagcggtttggaggggaagaggcaacagtgctggcttttacgttgggagggcatgtctctgggctgatggctggtagaaaagggctttagctggagcctggatgcagagttcatgccctggctctgcccaatctaaccagtggccctagccaagatttcccccttttctgggcctcagtttatccatctgtcaaatgagagagtttggattagcctcttcttcaagaggccttctggttctaaggctgtatgatcaacaactgatgagaaaagaagcccagaaaggggaagtgactcacccaaagttacccagccaaccactcctcattgttctaatcctccaacttctcatctgtaaaatgggaatgaaggtgcctatttcacaggattgttggaacgattaaatgagatactactactaatagtagccccatatattgtgtgcttactgcatgccaattactctccaatacattagctcctgaaatccttcagcagttccctcttcacagggcaggaaagtgaggcacggagcaagcagagagtttgccaagctcacacagtaagaagcggagccagaacttgaagctggggctgtctgcattgactgtgccattttccctctccataaggtacagagacaacagaattttgccgagagcacaaagagttcaacaaactcttacagctcctacgattaacggcaacagacaagagctagagatcccaattcagtgttgcgactaataaaatatcaagctgccccgtaccactgggaattcatacgacttaaaaagctccgtctccagcgcgaaccttcccctcgcccccaccccgagacagctgtgcaggcccctccatcctccggacccctccatctttccatcctccaccccagcttccagtttctgacccagaggccggggtggggtccgagtgggcccacccacactcatccctgtttacccttgcttgtcctagagcgctcttcgctccacggagcacccagagaagttggagtgactccgtgagtgtcggtgccccggagggtggggaggcccgttccaggacttgggaggcgagggtgggtggggacgtcgggcgagaaggggcggggccgcgggcgtgattgttaccgccggtgccatagcaatcgggtcacttggcggcttggccagagccggggagctgggaggggtctaccggggctcgactctaggagttgggctgaggatttccacccgatcctcgaacctccggcccatctcatggacgcccctcccccttcaaacaccctcccccacatttattcccgcgtctgttttaaagatgggtaaactgaggcacagggagccgggccggggagcactgacagaaccagaagcaggttctgcctcccgtcccctcggagggccgacttgccccttctgggtttcgtcgggggtctcagatacgaggaggcccagctggaagccacctgagggtgtcccccgctaagatgcgcaaatgggaaaagcgaggccggggttggggaaagaacttgcccgagccgcagagcgcgtcagccggggaggtcggggcgggggcgacccgcgcgaccgaggatcgggtatctgggcccggcgcggagcctgcagggcggggccgcggcgcgtgctgatgacgcagtcggcgcggcggccctagcgacgcggttactagggagcggcgagccgagacggctacatggacgccactatcgccccgcaccgtatcccccccgagatgccccagtacggggaggagaaccacatcttcgagttgatgcaggtgaccggacacccctgcccgtcgcgacgctggcggcggctcgggagcctccactgcgacgtcgggtgcgcggccgggacccgcagctggggccgagtcgcgcgcccacgaagcagcccaactcgggatgtacgattcgtgtgtcgccgtgaccccgagggggccctcgagctggggacgctcctggtcctgcccgggtttgcctcaggcggacccagggggaggaagggggccactcgagccgggatttggtcctggctgtgccgccagcgggccttatggtctggaaccagtcctttccttttctcggtttccccacctgtgaaatgccaggttgcaagaggtggtctcccaggggctctcccggcgctgacaattaccatctgtcgaatttgtggggagcctctcggcccaggtttctgaggtgggcattgtccgagttcaagctggcatctccatcctcagagagggccgcctctgggacagcagcatctcccaccttggtccctcctcctcagggccagacgtccccggcagctccgaagctctcattctggctccaggcctgactgggcccccagctcaccgtgtgactttgggcgaggccccgtccccgccagggccccagttttcccttttgcacgtggtggaggtcaaggctttcaggagctggaggggaagaactctcagccactcaaaggttctgagaggcaaggggaagctggagctcagttttcagatcatttgtctgcttcccagggtacaccccatccccaggggcatggcatggagggcatagtggtgtctgtggtcatttgaggttctgccctgcacactagacagctgagcccagacgaagaaacccgtgtctgcacctccatcaaacacatttccctcggaaagtgttaactgatagagggagagcaagagattcctaaaactgcttgagtggccaatcacaaatcaaatagctagctgggttagaagtcagcaggtcagggcaggatgggggatcatctggagccctgttgtctgctctagagaacctggtgtgttttccacattgattgttggaggaattgcccaggaaagcttttattgattttgaaacagggtcttgcactgctgcccaggctggagtgcagtgatacaatcatggcttactgcagccttgaactcctgggctcaagcaatccttctgccttagtccctccagagtagccgagactacaggtgcaggccaccatacctggctaatgtttttttttt

SEQ ID NO: 588216 - DNA, 4001 bp, Homo sapiens
catcgtagctaggggcctacagcccagagaagctgtactagagtctcaaaaaggcctgggggaccgagcagccacgagggaccatgcccaggctggagttgcacaggtagcctttcagactgcgtggaaggttccatttgttgcaaaatccccccatgaggcaatgtctttcagaagaaaccacagcactctacttggccccatcagcctctcacaaagtactaatcagcaggctttattccattcacctggaggctgtttcctgtaatagctaaaagtaaccggccctgtcctgccgcttctcacctgtgtaaccttgagtaagttacttctctgcctcagtttccttacatgtaagtggggataacgacagtaacttcaggtggttgtgaggtttaaagagttcacacatgtaaatcactcaaaatagcactgggcaagtaggaatcattgaagaaatatagctgccatcatttttactccacagacatttcctaagcaccttctcaggccaggccctgtgctatcttgagcacgaaactggaaataaaatctgaagttcctactcagccctccctgctagggatcaccatctggtaggaaagacaaactcagggaaagacaattacaaaacaaacaattgcaacaaggcagtgagagggagcaccttggttggggtgggggaagggttctccggaaggcttcctggaggaaggaggctcctgggcttggcaaaggtggaggtgagagccaagagaggccagtgccaagcagaaagggatatggaccagaggccaggacatgcccatcagggcagcctgtgtggtcaccttgcagcccctcattcaaccaggaagctgcagagggcaggaggggtgctggcaagacctcaagggcagatgcctatcatatgtcctgaaccccatttccccatccagctcagccctgcaccagcccgaggataacacagaaggtcagacagacagcagggtggaggcagagcagggggagtgagcacagccttgaggcccctgcaactaagcaggaaaactagagcttctctgggtctcctctgctgattctgcattttaaccagaacttccagatatccatcttgcacaaggtcaactcccctctttttcagcccgtagagagcatctgcaaaggaacatactcttaagtcctattgcgcaaaggcccccagctctgcagacaccgagtgcccagcctccccgggaactatgtgcagcactgagattcgtcagtttcctaagtcaggttttgttttgtttgtgaaaaacacaacacgagaccctaagagggcctgttacagaagtttcggggcggaaaaaccttgagacacaatgagtccgagctctccattttacaggtgaggacgttaagacccagaaaagaaagtgtaccatccaaggtcaaggagccagtcctggactgggccagaattgaaacccaggctccttcacgccagctggagctgtctcgccatacacggccttggccttgggcagctgtctcgtcccagtctcagtctccgccctctggaactgtccaggtcggctgaggatgggggatctccttctccccataaatcagtctggccctccccaaccgcgggcccccaggaggcttgtcagagccgctcccacggccggcacgcgggggaggggccccagggcgcacgaaggaccccccgcaggctgcccgccgcgccgaacccaggccgtctggcccgaacgcaggccaaggcggaggcgcccaggctgcttcccggccccggagccccacagcaccaagcccggatcgcaggacacgggcgcgcgcccgggcccgcgcacactcaccgcccgcgccgccgccgccgccgccgccgccaccccgggacgcggaaggtcgggggcgccgagcccctaatgccgcagcctctgggcaccgcagccccgcgcccagcacgcctcccgcgccgcgctgcgccgccttcacgggcccgccccccgcccggccggccccgctcggtcgcccaaccccgaggagccgcccgccggactcgctttggggccaagagggaacgcgcctcccgggcccgcggcggagcggagctggaggccgcgtttcatcagccgagcgcccccccgggacgccggaaggagcctccgcgcggagccgaccacgtgcacggcatcttggggcacgggttcccgccgtctccccactgtaaaggagcggcttactccagaggtccagccccctcacacacaatcacggaacccgtggatgaggcagtatttgagaccagaagtttattggggacttgggtttggtttttgtttggttggttttgtcgttgtttttagagtcgggggtttcgctgtgttgcccaggctgctatcggactcctgacctcaagcgatcctcttgcttggcctcccaaagtgttgggattacaggcgtgagccaccgcacctggccggggacttgtttctaatggaaaattgtgtatgtgctgtattgttaagagcattggtttggggtcagactaggctgtgattcgggtctctccacttcttattatcgtctttggtaaattatttaacctctttgtgccttcgttttctgtaaaaagcagataattatagctacttcatgaggtcgtgtgaagatttaatgagatagtgtgtgtgaaatgttcacagctaccagacacatactcactcgtgttcccaattgctatactcacaagggctcactcccatcgccatccttcgtaatttcaaagggtctacggttaaaagtaagtaacctttcccctgaggaaaacactaaccttgtgctttccttgtatttttccttagagcacatatgtacctgtgcgtgtgtgcgtttacacaaaggaaggccttttctattctgttgggcactctgctttttcattcgacaaagtaccttggcgctcatcggccagaacgcgccacactgcctcatttccttttaaggggcacataaacgtccctatattaatattaggtttgcgcaaaagttattgcgtttttttgccattaaaaacattacaggctgggcgcggtggctcacgcctgtaatcccagcactttgggaggccgaggcgggaggattacctgaggtcgggagttcgagaccagcctgatcaacatggggaaaccccgtctctactaaaaatacaaaattagccgggcctggtggcgcatgcctgtaatcccagctactcgggagactgaggcaggagaatcgcttgaacccgggaggtggaggttgcggtgagccgagattgcgccattgcactccagcctgggcaacaagagcaaaactccatctcaaaaaaaaaaaaaattgcaaaaaccgcgattatttttgcaccaacctaatagaaagggtctttgttttcttaacccttctttcttagtggacatgaaggtgatttccagccttgctgacaggccttgccctgatacacatagcagcattgttgcatacacgcaaacatgccacagcctgcatttctttctttctctttctctttctttctttctttctttctctctttctttctttgtttctttttctttccttctttcatttctttctctctttgtttctttttctttccttctttctttctttctttctttccttccttccttctttttctttttctttttctttttctttttctttttctttttctgagacagggtcactctcttgcccaggctggagtgcagtggtgcagtcacagctcactgcagcctcggcctctcctctcaggctcaagggatcctcccacctcagcctctctggtagatgggtctaaaagtgcatgccaccactcccggctaatgtttttgtttttgtttttgtttttgttttgtagatgcagggtcttactatgtttccccagctagtctcaaactcctacactcaagtgatcctcccacttcagcctccca

SEQ ID NO: 588217 - DNA, 4001 bp, Homo sapiens
gttgtggaactcatctaagaaacataataaaatattttgggaagaattttagtaagcatgattgaaacaaaaatgaaaagatctaataaatcttctgttagccagaatattctctacctcttataattctggttggttgaagttttcttataccctcagggtttgtcataacccattcaaagtattgcctagcaagtctttatgggggctgctccaacgtttgagtggtgcatacttccacttctggtatacacccaaaagaactggaaatgagggctggaatgaatatttatacacaagcacataaaaagatgctcagattcactaatcattagggaaatgcaaatcgaaaccacaatgagataccacctcacatccattaggatggctactaacaacagtagaaaagccagctgaaaatatcaagtgttggtgaggatgtagagacactggaacccttctgcacagttagtggaaatgtaaaatggtgcaactgctatggaaaacagtatgaagcctcctcaaaaaatgagaaatagaattaccgtgtgatctggaaattctacttcttggtatatgcccaaaacaactgaaggcagagtctggaggaaatatttatagacccatgttcatagcagcattatgcacaataaccgaaaggtgaaagcaacccaagtgttcatagatggctgaatggataaacaaaatatggtatatacatacgagagaatactatgcagccttaaaaaagaatggtacatgctacaacatggatgaaccttgaagacacaatatgaaatgaaataagtcaggcacaaagagaacaatattgtgtgatttcatttacatgaggtacctggagtagttaaattcatagaaacagaacgtagaacatagaatagaggttaccaaaggctggagggatacagggaccagcacctggaaggagttgttgaatgagtagagtttcagtatggaaagatggaaaaggtctagagatggatggtggtgataattgcccaatgatgtgaatgtacttaatgccattgaattgtacacccaaaaatgctaaatttgttatttatattttaccacagtaaaaaagcttaaatagaaaaagaataggtgcacgcagaatgctacttgcatggatataaggaatgatcacagtaatctcttctctccacagccttaagacctttcactttcctggcttgtttatgccacagaggatgctcagccccatggtctccgttgtcatcatccaataaggagtgtgtaagtggcactgctgtaaccacatgcactttacaaaaataatatttcatccttaccattggtactgtctgtggctgcacgctgaatgggaatcatttcagaaggttccagctggccttcctcaaaagataaagaaaatcctctaaaggatgatttttctgggatctactaagaagagcataatgaatgttgtagaacaaaccaacttaaaaagttggtggtggggggtagatattgccgacttgcagaaattccctctaccccctttataccaaaggagccatatcttcatctcataataaatgcaaacttggaaaggctcacaagcccgcctgcctcttcagctaacgacagcttcaattatgaggcctaatcctgcattcctgacactccccttatccctgcataacttccaggggagtcaaagggccctccgccctggacctggtgagggagacattagttatgcaggagcagtgcctggagcttgctggcaaatttaagggtctgttcctataactgcacacacttggaagccttaaatcctcatactttgactcttcaccttatgctgaaataaaaagccacagtaactccattaaaacgtataaaattcctctacaggaaatgagtactagtttgcttccaacttacattggttttaggtttcttcttcccaacccctttttacttttaatgttggtgttcaattccatggaaaatattttctataagggaaaaaaaataaacacaagcatcatgcagggtctttgcattttatttactaaactgggcaaaacatctttgatttgctggctcttactccctggtaaatcagtgggaattcctcacaaatacaaggttggcttaagtcaccctatggggacacccagtgacctctggcttattgagaagtgaccttgttttatatactaatcatccacccagctatattagtaacgagactataactcattttcatcctaggcacacactgtgcattatcagtctcctaattaatcccagactattcagggggcaggtattcttagttctgattttcctcactgctcctcaagccagagagtcagagagtcggcaaacagagggtcgtgctctgtgtccctgaggcatgtccttatgtcccagcccagagctcacttcacccccaacaccctccctctggactggggaagccctgggaacgagcacacctctgctgatctctgaggcagtggtgcttcctcaggggagaaggaacctggggtcagcagatatcctgcaagcctgcttaatggacaaagtcaacagcagcttccccacaggcagaaaataaattcaaagcattggtagacagcaagcaggctgggctctgtgctctgggcagctcagactcccacacgtttgcctcaaaccctcatcgcattcacctttgtctccggggatgcagaggagtggctccagcctcccctccccacctctctgaagagacaaaaacacgtaacacattgctaggcatcagttccaaaacactgagctggtattagctccttttcaaaaaggaagacacaagcagttgtacattttccatcatttaattgcttatttttaacgtccccagttaaaagggaaaaggggcacctataatatccaagctctcagcttgaatgcgtgatctcattttatcttcacacaactccatgaggtaagtactatgagtcccatgttacagatgaggaaacttagaagctacatatcttgcccagtatcacacaaccggtgggtagatgagctaggctttcaatccaggcctgcctgagcacaaagcccatcttgtcctgtagaactccatttaaggctctatgccagatgagaatctgagggttcgtgtgcttgaaaacgtgttcgtctatgagtgtctagtattgctaaatggagtataattgcttctgctttatttctttgtaaaaatcaccataaatcacgccccagcttccctttctccccaggttttgaaatctggcaaggtgaatattaaaccatgagcactggcatctataaacactttcaaaggaggaccagttcttttcagcacttgggccctccaacgctgggaaaccttcccttgttgggtttaaaggagcactaggcttagggtcaggagctctgtgttcaatttctaacctccgcaagccttggttttctcctctttgtaatggagataataatacttatattgctgctgtctttgcagggtggttgtgaaatgatagtcctcagcctcctttctaagcttctattctaatcagtcagtacgttttggaaggcctcagtaaagcagtcttgaccatctctcttcttactccatctccctaggcaattcttgtccaccccagtagtgaggatgtcagcattccacccagctgccctgggatctctttttaggctttctctgcctcacccctcaccagctgtggtgtgctttcagctgcacctgcggccgttggaggaggaagaggtggaggaaggttgccctcagggattgcccaggagtttgcacagcccctcccagtgaggttcctttgcaatagttggggaagctgtggcttattcaccagagccccagagagatcgggctaaagcctgtcctctgcaggacttaccccttgataataccttaccctgagataaccctgtgctcagcttcttcccttcgcctgctc

SEQ ID NO: 588218 - DNA, 4001 bp, Homo sapiens
gttgcgcaggcgcagttctgggagcggcgggagctggaagcccaggagttccagggggcgcagggccgggcagaaggcggcgagctgggggcggatatccaccggggactggaagcggcccgcgcaggctggggacacccggggccagggcgggtcgcctggggtgggagagtatagtgaggaagtctgacgcctaggtcaggaacttagggaacccgggtagaaaaggtgagggggtgggacggtgggcggcgggtgggacgcccgggaccagtgttcagggacggctgtaggggagatccacagagctgggttcccagattgggtctgtgcagcgggtgggtgtctcacctccatagcgccaatgactctggtcatcccctgtataaatgaaaaggatgaaccgctcaagcttagagccccaatcccttcctggcgaccaaaacgatgtcacaaacgcagatgccttacaggagcattacgggtaacaaatgccttaagcgggccaggtgcaaagcacaggagaccgcacccaaactcaacaccgcagctgggtgggccaaacagcaatcctaccagcttgcaatcattgtcttagggtctgtaaaagtgagtggctgcttcaggccaggcgctgtggctcacgcctataatcccagcactttgggaggccagggtggttggatcacctgagatcaggagttcgagaccagcctgaccaacatggcgaaaccccgtctctactaaaaatacaaaaattagccgggcgtggtggcgcatgcctgtaatcgcagctacttggctagaggctgaggcaggagaatcacttgaacccgggaggtggaggttgcagtgagccgagatcgcgccattgcactccagcctgggcaacaaaagtgaaagtttgtctcaaaaaaaaaaaaaaaaaaagtgagtgggcacttcagtcctgagtcccaaatgagtgagtacaccatctttcctttctcccttctttcttctccccactcatccctctgccttgtatggtctccaacccctttccccaaattcctggcttgggagtcaagaagccacgtttctctacctgctgtgtcccttcttcctaggtctcaatttcctcattgtagcctaagatgagatgacttctaccagctcttcttgcttgtctctggtacccacttcacctcccaagctttccttttctcttcccctcaaactctctgactctccttctccacctatttttttcctctgtctgcacattttttctctcatctgcagttctcatccctttctcttctccagcctcccccttctctcccatctcatccagctcacctctctccttttgcaccctttttattttctctccacatctgtccctttctacctccgagagtggggatggggatattggtatgggacctctggaagggcttctgtggggagtacagtctcccctccttccctgagtgaacagagcctaggctggggtatgggaggggagtcatgaacctcctggaacctggatttggagattgatgaccacttaccttctttgtccctgtgggcattattctggggttcttgaggatctccaggagcctcaacagtaggtagatcctctaacttcagggagccctcttcttctgatttaggcttaacttcaggtagatcctcctctccaggtagatcctcctctccaggtagatcctcctctccgggtggatcctcctctctgggtgaatcctcttcactgggcagatcctcctcgcccagtgggtcatcttccccagaagagcctcctcccaagggggaatcctcctgcatccggggcaacctctggggatggacaggcaccagaagcagcagtgacagcagcagttgcacagtgaggcctggagcaggggccgggatcaacagagggagccaggggctggggcacaggggagccatgcggctgactgtggggtgtcccagcacacggtgtgtacgggctgtacgtgcattggaaacgagagctgggtgggggaggagcaagcctggaggggagcaggctgactcacagagcgcccttttgcagagatggagccaaagtctcacaggtttgtctggccctgtgccctctcccccataccaaagctaggatgggggtggagtgaggggcaggtgtgtgcacaggcagaaggttatcggggccatggactcagcttggaacccaaggcaccacctggcactatgcaggctctccctggcaccacccagctgcttgccagccagcctcagctaaccctggcctgcttcccagctccaggcacagaaggggaaaggcaggggagctggggcccccatgtcctctggctgagagggaaagcagctcatgtatacatccctgactccaccaggaagcaggtaaagaggtagggcaggctgctaggggagcccgagggtgagttaagtaatgggtatgtgggagacaaacttgagcttgaatgaaaagcaagtgtatgtgtcagaggggctctgataggtttaacctatatttatttttcaacacattactctcctgctcaaaagccttcattggctccccactgcctgccacgatatgcacattgtgtacttctgacttccaacttccttcaaaaccttgcccaagagacctttccatcttgtctcctactactctccctcatactctagccaaattaaactattatttttttctccaaaccttttaccacctttgttaatctagttcttgctccctgaaatgctatttactattgcattcaacaaatatttatttagtactaccataggtccagcactgggctatggactagggacatggaaatgaataagacacggtccctcattttgggaggctgaggtgggtggattgcttgagtccaggagttcgagaccagcccgggcaacatggccaaaccctgtctctactagaaatacaaaaaaattagccaggtgtaatggcatgtgcctgtagtcccagctactcaggaggctgaaatgggatgatggtttgagccgaggcggttgaggctgcagtgagctgagactgtaccattgcactctggcctgggtgacagagcaagaccctgtctcaaaaaagaaaaacaaaaacaaaaacaaaaaacgctacctgccctgagcagctcacaatctagtgagtgagggcaaaccctgtcaatatcatcatattgagggaagagagatgaattctgctttagaagataatatagaagtaggcaaatttgatcatgtccttgaagaaataccagttccattggtaaaaacaatagggagaatgatattctgggcaaagggaaggcataaaatattatgagcaggagagtgacagaatccagttctcatactaggtcacgttgagggcttgagggctagtatggagcacagattgcaggggaagactgggtgcaaggagatggggcagaagagtgtgaggacaccaagaatgggcttaggcctcccagtttttttcttttcttttctttttcttttcttttctttctttttttttttttttgagacagagtcgcactctgctacccaggctggagtgaagtggcgcgatctcggcccactgcaatctccacctcccaggttcaagcgattctcttgcctcagcctcctgggtagctgggactacaggcacctgccaccacgcccagctaatttttgtatttttggtagagattggggttttgccatgttggccaggcttgtcttgaactcctgacctcaggtgatctgcccgccttggcctcccaaagtgctgggattacaggctggtttttttttctaattaattatttttaaaatttattttagagatgggatctcactgtgttgcccaggctggagggcggtggctatttacaggtgcgaccctgttactgatcagcattgagttttgacctgctccaatttccacctgggtcagttcaaccatcctt

SEQ ID NO: 588219 - DNA, 4001 bp, Homo sapiens
cagctactcgggaggctgaggcaggggaatggcctgaacccgggaggcggagcttgcagtgagccgggatcacgccactgcactccggcctgggcaacagagcgagactccgtctcaaaaaaaacaaaaaaaaagaaacacatacatgaaagtaaaaatactgaattccagccaagtacaacaaactcaacaaaccaaacagcacttgtcccaagactccaaagactgttcaacatcaactaacttatcaacaaattacattatctgactaaaggagaaaaagtatgtgatcatctcaacagaatgccagaaaaccacctgataaaatctctacataaactgtttctactctaccaaagagaataatgagcagaggatatgtacagaaaattacataagaagaaatcaaatggcaaataaaaatattaaaatgttcaatctcactaataaggaaaataaaaattaaaacaaactattaatttgacccactagtctggcaatttttttaaaaaatgccatcaaaatgtcatcaaaagctagttaagaatctcagaaataggtattcttatatatatactgtttggactataaatctgtaaagtctcatttggaaagcatttggtggcattcataagtttttaatagcataaactttgacccaggaatttcagttctcacactctctcccaacataactcttgtaggagatatatacataaaggtgtttgtattgtagtcacaacaatacaaaaaaacctgcacacccaaatatcagaaaaatataatacaataccaggcagtcagtaaaaataacaaaccacgtatataaagaagcctatcacaacaatgcaggtattcaacagcgggaataacacaatacagcttaagtgtaggaacttaaaaacacgtatctcacgaggagtgattaaaagaggccgcgtatcaaaatactaatggaggggcaagaaaagggacttgacgctttccctttatttcctcattgaatgaatttaaagtacctattcattcatttgttttcaaacaaattatgaacttttttaaaacggcgttctcttggcagactggtggcgtataaagaacatggcttttgtagtcagatatttggattcaaacctaggagctattaacaaactctgtgaccgtgggtaaagtttaacttctttgggcctcaattttcttatctctaatgcggagttaaccatatctacgaaaaggtgaagacgaagggagaagtgtttggctcgcaagggaaatgaaggctagcttccaactcgtattcttccggcagagtgaaaccataggagtggaaggagccaagagtttaaaaaataaattaaaaaaaaagtgatcaggaaatccagaaacttgaagttcaagattcaagacacggatgggagtgtggggctcaccaggacttaggtaggaacatgaacctcaaggacggacgaccttgagattgccgcgctagcagtgagctccagcctgcgccccatccctctggaagcccgacttcttccgaaaaagcagcagctccaggaagcggccagaggggcgcgcacgcacctgctgcaaggagcccgagacgctggaagagtcggtactcctccgcttccggcgctcgctgcgctccacgctgctcccgccccaacagctgccgccgctcccaccgccggtgacacttccactaaaattggcgttcccacagcagctgacgctcccgcagcccccggcgctcccgcagccgctagtgcttccactgctgccgctggccaacgcgggtacgatgtccggggccgcgagcgctgcggccgcctcctgactgctacgtttgcgccgtttctcccgggaggactttttccccgtcatgatccctctgctgcaaccatcggaggaaagtccgctgtctctggtgcgaccgaagcccgactcctgcggccgtgggcggcaggcactggcgtcgcaggttatgcgtcacttccggccgtggcacagaacgtggtgaagcgttatgggccggggtggcaggggggttgccataaccagttgcgcttccccctccggtcgcggaggtcgatttgagtgtgtagcgggtagcctgtctagtcagagtttgttttgttttgtttttatatctctacaaaggatagaaggtggaacttacgtccttttaacttcaaaactttttattgttagtgttttgtctgtttacaataaggttgaagtatagttgctgattctccatttccgtttacctccaaatcttaagatattaacaacgctatgacaataaagagaatagggaaaagttgttccatctcattttcctcatcacctgggcaaattaggtatttcttgcgtagagtctgacatggacaagtagagcttgagttcgtttttgaaaattgagaatgggtcaaagctttatgagattttatgggtggatgtaatctaaatagaaggcagattttaagacaagggagctagaacacttaaaacgtgaaccaaggtctttgtcgtttcagcaggggcctttagccactgagggaaaaaggtagagcctggggcaaagctagctgggtggtagtaattctgtgcctttccctggggtaagaagcaattaaagaagcttcccttctctttgtctcctatttgtctcagtcattcaacaactacttaaatgcctaaaaccagcctagggttaataaatagggacacttccagccctaggaaaactgtcttcccccaggccccactcttaaattggccttgtaaggtaaatcctggggctgagcccactgtgttcccaggagttccgttaagtatcacactcattggagtcatacctgaaaggattgagagtgttgtgttcacagataggaaaaacacataaaattaataacatgttacatttataaacctgttatgaattgtgtccctgaaaccatcataattttaataaaactaaattgctagattttttcttttttcttttttttttttttgagacggagtttcactctcgttgcccaggctggagtgcaatggcacaatctcggctcactgcaacctccgcctcccgggttcaagcatttctcctgcctcagcctcctgagtagctgggactacaggcatgcgccaccatgcagggctaattttgtatttttagtagacaaggggtttctccatgttggtcaggctggtctcgaactcccgacctcaggtgatccacccgcctcagcctcccaaagtgctgggattacaggcgtgagccatcgtgccctgccaaattgctggatttgtgacaaaagataagcttttagtagaagcatagctaaacgttaaccaacttttcctatagcccacttccttatagctgcttattgctttatagatatctttgactcggttaagaaatctcaagttttccattttgagatatttaccagattctgtactccaatggtgttacagaagttaagaaattattttaggcagatagagaggtaaaggggtctttgggaagttttttttcttttaaagcagctccagaaatgtttcttgtctagcaaaaaagctgggctggcaagctatgatatgcaaatgcaggccgttagaaactgggtttactcagtatggcgattcccctcttcttcttgtccccacatgtgcctagcaacatggccatccccacatatccccacatgtgtagaacattgtggcaccctacattcgcatattaaaaggctagggtgggagggccactttttttgcaggctacgtgaatgacatacctggtcaaaccaattccctgggtcatatgcaaattagtcaccacctcctccagcctcataatataactggctcttgtctgctgcacccaaggttccctctttcatctgggagccctcttccctctggttctgtatgagggagcctcttctttcttgcctattaaattctccgctccttaaaacaattcc

SEQ ID NO: 588220 - DNA, 4001 bp, Homo sapiens
tcttaggacccagggtagaccctctccaggtactctctctgatcccctcaccctggaggaggaaaaccttacccaaggaccagcccggcacacaacccttgtctgaactcctgccgcatctctaaaacaccctgcatttttgcattctaccctgtaatacagcattttgatgttcacataaccatgcccccaaaaatctgcagatgcaactgacaactcagggcaatgccacaagtttctcctgaagcttcatctgtagacccaacagagccccaggaactcccaggaaaggcagaggtacctcactttgagaggcacagaactgagtaagactccacagcaaatctgggagtcggcagggccactgaccaagaaggaaggaggtgtggcctacaggccatagtcaggacctttcctttctcaccactgaccatgtcaccccactgcactgcccaccctaatctgcagggaaaacagctaaccagacatgacaggactggatccaatgcctaacttcaaacccaccagtctctcctacaaagtcaaaagcgtacttgccctgaagagcagtgacacaaactcggggcctttttgtgatttgggggtagggcctgccctaccgtatccgttgcctctggataagggcatgcctagcgagggcagcacactcctagcccagcaccctcctgcctcaacctccctccaccctctacccacctggaaaggctgtggaacccaaggtgaccctgaaaaggtggtccttctggcaggattgctgatggggcctgccctgcccaggcccagagctagccctctctgccaggcaggcactgtttaaaacctgcagacatcctcgacagacattctctaagaccttgcccactccagtaatccacaagattgagggcagacaggaaaggaaagggtatcactcagacagacttgtctttccctggaaggccagctgtacggcttccattcactcctggagctgacctgcctccctctttgtccttttctggctgtgcttaagagcctagcttccctggcagcctaaggtcagggtctgtgactgggatgcgtgcggagaaggggaggaaggccggtgacaggcggctaaggcagcagcaacgggggagatatgagagcggacagaggacccagggagaggccgggccctcagctcactgccccgcggccccaggggccacctgtgccctgacaccacctgaccctcagcaaacttccgcccagtggcttcctgccagaaatctagccagccgtgcacccgcctcccttacaaacaatccttgcccaaaggttagcaatgtggctgccgtcacctacgcccaagtcaacagttgacgctttagtacgggccaggtgggcatgcgccccgtgagcatcaccgagaaagtctcacaaaagcccctggggagcggggggagggctcagtcacgtgccccaggccggtgccccacccccgcccccgccgcccccccgccctggggtttctggtccctccgggaatgttcccagaagcgccagcccagcccagcccggggtaccaaggcgcccaggcccgagcgggtaaccatggcaaccccaggacgccggctcccggcggccccgccattcctccgccccgggaggcgcccggcagacccccgacccccagcgggtcctttcccctggggccgccggggcggggcggggcagggcagggcgaggagcgcatgcgcggcggggccggcccctctccccgactggatactcacagactgcccccagcaccccagacaggcgacacagccagcggtaccaccacgtcatgccctcttcctgcgcgggcggcgcagagctggcggacgccccgggcgccccacctgagctgctcatggtgccaccgtcaggcgcagctcacagccctcacaaagggctcggtagccggccgcgtccgagccggcgcgctgccttgtgggagagggagcatattagcatagggggcggggctttcaggctgcggcgaggcgcgcccgaagggaggcgggtgctcattaacatagtgagcgggaccctcatgccgcgactaggggcgtttgaggggaggtaggtgctcattattgtagggggcgggacccgcaggctgcggcgaggagctgggggtggggagctcgttagcatacggggcggggctcgcaggcatcggagaggtgtgcccgaggggggcgggcgtcattagcgtagggggcgggggctcgcagtttgcggcgacttgctcccaaaggaggcgggcgcttattagcatagggggcggggcctggaggcgcgcagacaccttagcggtcagagcctcacaccaggacacacgggtggggcttcgcagggagctggctaatgcgccatcctcggagtggaatcctgattggattttcttcctggataggaagaagataactagggacgtccagcggcttgctcagatcaagatagagccaaccgcggccagcgaatccctgccttgccatgggatgggttttcaagccaggtctggacagcttataagaaaaaaacgccggtcagcctgcatgttttatttattggtacccgaggaaatgggggctgcttttccagagtccccacctccaaccccctagccttttggacattggagaagactctaaagtagatacctaagattggaaaaagttcgaattggaaagcactgagaccaggggtcaaccctccagggctggccagacacggaacaaatgttcaatgaccctcaggttccttcctttcccttccaggactgagggtcctgcatctccggtacccatgattggagggtccagtactggccccgcaggctggcctgagccttcaggaagccctcgctgaactccatctcagcctggctgctctctgactcccagtagagcacctgctgcccatggaacgctgtggtcctcaagctgtgggtgtcccggatctgagagaaaaggggcagcccagaaggaccggccacaagtaataattagcactcacggaagccttcgtgtgcaagggctcacagattccggatcacatttaatgcttacaaagccctactaggaatacgccattactctacccagaaaaccgaggtccagggacgttacatcacttccccaaggacacacagtcagggtgccagagcggggccaggctgcctcctctggggaagctgataccctgcagaacacagttctcccaggacacttgaaacctcggggagggtgcagggtgctattctgtccaagttatatcagactgtaaaattatgcttcagtcttgggttagctgtcagtctacatcagaaaggtctttaccattctttaccatttcgctttttttttttttttttttttgagacagagtctcactctgttgcccaggctggagtgcagtggtgcgatctgggcttagtgcaacctccacctcccgggttcaagtgattcttgtgcctcagcctcccaagtagctgggattacaggcacacgccaccatgcctggctactttttctatttttagtagagacaaggtttcatcatgttggccaggctggtctcgaactcctgaccttgagtgatctgccctcctgggcctcccaaagtgctgggattacagttgtgagccactatttcactcttgtaggtagctcaaaaaacatttcttggtgaatatgtggaggaagctatcttctcccattctttcactaatgattttgagggttttagtctgaaataaactgaagggggtcccctagccctgcacgccctagggaaagctgtccagaatcacagcacaagtccccatgctgggcctcaccaagatgtagctggcattggctccctcggtcccagcgcccatgttggtggccagggcatggatggcaatccgtgcgtgcggagccacattaatgaagagccggcagccccctgcattactcgtggctgga

SEQ ID NO: 588221 - DNA, 4001 bp, Homo sapiens
cctgttgagccacggagaccttgccctggcaccctgactcacacagactctatgctccaatgggggctaccacgggggcctcttggctggaatctggggacaggtaaaaatgattcagaatgtttgagaaggaatgcttcccacaggatggtgaggcccactggagaagaggttccaagcaggcccgcacaagacaacttggaggatgaggctcagggttcccacatccaggccaaagcccatctcagcccagcagggcacacatggcattcagagctgaccttcccgaagacatgaatgccccttccccaccccaagtttagaacatggttttctggatcaaagtctagcgccgaaagccaggacagccattgaggtgcaggagtagctcgtggcacagggcagactggcccagggctaacgtggccacgcccagggctaagccggtgaccccagctgccctggccctcgaggaaggtgttatctgccaggcctaccttttccttcagacgcgaggggcactgcccagacgaccctgcccgaggaagctgttctcaggcacagaccataaaggaaagtggagtcgcggcctccccaccaccctgccctcaggcccagccgggcactcaccagccgctcggacatgggcgttttgtccccatcagggaggtgctgctccagggccagcacgatgcagttggcgatgatggtggccaggatcatatactcgaatggagtgcgtgagttaaggactggccggcagacgccgcacggagggaaacacgaggccgacgccagcagagcccagtgcagcagccaccgctaggccgtctccggaggggctgagacaactgggtccggagcccctctcctggcggaagcggcctggtctccctcactccctgcccccatccctaggggcggccgcgaggcggggcctccgcagtctgggccgccagcccctcggcacacccgggcggccgtcagcaccgcggacagcgcctccggcccggctccgcccgactccagggccccgaggggagggggccgagcgcccccaggcgaggctggagggagaccccgcgcaggcgcacgctgctccctccagacacgcagccacatgtacctacacaggcacgtgaacatgcatgtagcccgcatcgcgagcgcacgcacgcgcagcgccaggctccagctcagcccgcacacgcaggcacctgcagccaggcgcgcgcacggccgcgtccccacagcgctcgcacctgcacggacgcggcttcgccctcggtgccctccaggctagccgcgcactgtgcaccgaccaggatccccaggacccggcgtgcggagggacgagtccggagcagaggggctccgccccgcgcccgccgcactcacggaaatgctcccgcacccgccgctccgaggggccctggggcgctccgtacccccctcgcccgtctcccgacgcctccccaggtcgcgccctcccggccaccgggaagatggccccggccccggcccccaccccggtccccgcccggccccgcccggccccgcccggcaggatatggccactcggtgatgcgcttcgcgtatttgcggacgacgttgtcctcgctgaagacgaagagcgagcggttgacggtgaagcagttctgcttgaccgggatggggttgtacagcgccatggtccgcgcgcgctgcgcgatcgattgcttgtagaggacccgctggccgggctgcagccccccgggacccgggccccccgccccgccggccccgccgccccgggcccgctctccgccgccggggcccccatagcggccgcccagctcgtccccgaagcggaccatggctcccgggccccgcgtgcatccccggcccagcggccccggcagggagggcgcggggcgcgccaggcgctcagagcggagcagccacggagccgccgggaccgcagcggacctcgcccggccccaccgccgcagccgccgccgcctcacccgactccgcggccccgcgccacgccctataaggggccggtcacgtggcggggcccggccaatccgcgccggccccgcccaccctgccgcgccggccccgccccgcggccgcccccgccccgccccggcccctccggctgcgcctccctcgccccgcgcctcccaccccggggctgggccgggcccaggagcggacgagcctgtgggtcctcgacggccgctcagcgccagcccgggccgtccccggagcccactctgccggccgcaccgcccctgggtgccctcggctcctcaaactcggcccagacggacccctcgctccgcccggaggcgccaccagccctggggctgcagcccagagctgggcgccaggcctgggccggcccgccccgtccccgccgggtccccggccttcccaaccctccgggtgcgctcggctcgcggccttggtgccacgcggacgcttctgtcgggggcccccagcccgggtgcgggacctgctgtttccacgcacggggctggctccgggatctcagctcagagaagcctctgaccgccttgcaggccacgccccgttagggaacctgtcacggtcactgccattccccaggcctccttgagcgcccaccgcgggccgggcctgtcctgggctcccagctctgccctcacggagctgaccgttttgtacaaagcacagcaaccatttacacagcgctcacttcgtgcaggcccgtgggtcctcacaacctccaaaaaggcggccccggggtcggggagaccttcgggaacaagggaccctctcggacctgaagctcgctcgcaaggcgctgagtgcagagtgaggccgggtgcgggctgcgccttctgagagggaggcagtccgcacagttccgagcagaggcgcgtaggcctctgaagggtccctcgggctgccgtgtggagtgtggactgcaggaggctggggtgctgaatcacttaggatgcattcagaggcgaacaacccgcttcccagctagcagcagcttgcacgatgccattgtgatctcactgaatacgaagccaccatctctcctccctccaaaatccccacatacactttctgccttcctgcctgttgcctcatgccccagggtggctgtcatagcacagggcatcacaccgctacaccagcatctcaaacgggaaggaagtggcaggtgtacaaaggatgaccactttgtgaatcaggttacgattttcttttctaacaaaggaaaagcttctcagaggctccccctgcaagtgtctctttaaccccgttaggccatgggccatgtggccggccctgactttaacagggtgggaaagtgaacatgtgtcaaagtggaccaggatggccagcccccactaggcgagcacatagttgccccaaacaaaatcagggttcgcttagctgggaagcaggtgctaaggctgtcggggaggctgccaactggcctgtcacagagaaaaatcagagcccagggaggggttttgacagcagcacagagagagatgatgtggtttgaacatgggggccatgagcagtgcctctttctcttagagagagtgcgtccagtgtaaatgtgaaggagagatagaaacacaggctcttcatttttggtctgagtgactgagtcgagggggatgccctttgccgagatggggaagacagagggaagagcttgttagtcacagggtggaaattaagaattgcctactggggacagaagtggagatgctatgcaggggtggagtttctcgagggatgccaagacgagaggccactgctgcagccctgcgcctggaggctgggctcgccacatctgctctgcccttccctccgtgctgcgtgacgctggagctggcctttgaaagccacatcagcctgttccttgacctgtggtttctggttatgctagcccaacaggagcaccaaaggcccttgagggaaggaaagagcaaggccaaggtgtc

SEQ ID NO: 588222 - DNA, 4001 bp, Homo sapiens
tatcagattgtgaattcatcatccgatgagtcaacaaggattaaagagtgacctggtaccggaagtgaaactagacgaacccaatactaacacagagacacgcgtacttatttctggatggctgacaaatcccatgctgaatgccaaagctaaatgcaatgaaataaaaaatgcatgcaccttgctaaagaaattggaaagcagatcgtgaaagttctttttatagcaatttgtctaacatccgctgcctgagccctcagccctctccacatataaaatcttaaaaaacatgcaggagtaaaactttgtgctcggatcccaggagccatgcccaagaatgcactgggctccacagcacctacgggagcccagccagcgcccacgagcagctgcggtgaacagtcctcagtgagacactccacagcagcggaaatgtggaaaagtgaagatgaagtcaagaagaacctaagaacgtaacgtgggataagggaataacaaaagccagtctcagaaagagacatcattggcaaaggtgtaaaaactagttcgtggtgtaagcacatgcggcaaaatacaaagaaaagcaaaacagtgactaacacaaggtgtgaggcaggtgagcccacgcagccggcagtgactgcaagatacccaggcgtccgctctcgggctgttctttgcacctgactcaagtttcatacctacatcttaccaattccgttctcaaaaactcatgtgaagtcttggatgtagcagtgtttcttcctcattacaacacagaaactaaggttccactgagccagtaaacaagaactgtaaaactgaaaactgtcaaaggaaaaactctttcccaattactacttacacagtacaaaaaccagtttgaaataaggcgagttatttaatccctaaaacttacaaaacgcgtttgtccttatgactaactcgagtctagctggggcacaggccactgtcaaacagggcaacgcctactcagcgttttccaaactggtcaactgaactcttctctggaagggctgtctcctttagtcttactctaaaaagggtaatttttcaccagaataaaggcaaatattttaagaatgcttcaaatgaaaagaggattgcagaaatattaacctttaattgtacctgaaacaaagcacctgaaattaataaagaagtcagccactgacgagaatcactaggtctgtcctgttcccagggcacgaaacagaagcgtcttaatccactaagcacattagggcctaacaaactggactgagtaacaaggttacctagttcttccaaacaggaattaaccaaaggggatcattatgattaagcacaatgcgcggaatacgcaatttctagttggggaattcaacagctgacagcttgtaagcatcaaaattcataacaagtgcaaggctcggaatcacaggtccagcactggacgatgcccggcgcgccgggaagcggcgcctcagacggcggccccgcgtccccatggtccctccctgcgcccagaaccgggcagctccttcccgccgccgccgccgccaacgggaggctgggggcactcccgaaataggagcggaagccccgacccacgccgccctccgccgcagggacgcccactcgccaggtgaccgcgtccccacgctccgcgttgcccgggcgccgccaggacctcggaggcggccggcccagccccgaccctgtgcggacgcggcacaaaggcgcggcgcgcggaccccgacccggccggaccccggccgcgtcccccggccccggcccgcgcccctggcccccgccccgcgcccctcacccggcccacctcggccgtaggccttggcgcagatccactgcaggttggcggcgatcttggcgcgcgccgcgtcgtagcggtccaggggcacgaggtcggcggcgccgtccggcggggcctccatcttcctccagccctcggcggcggcgcggccgctcgcgtccaccatctgcagacaaagggctgaggcggcggcccggccgcaacaaaggcgccgccgcccctcgccgcgccgggcccggtgcgccccgagccaccactcggccccgcagccggccagccgggaggggcgcccgagcgcggcccccgcctcacctcacagccgccgccgtcgccgcccccgcggctgctgcatgctgcgggcgctgagcccgagcggaggaggtgccgagcccgcggcccaaagaggcggcggcaggagggcgcgggccgggggcgggggcgggcgcgggggcgggagcgggccgggggcggtggcagcgcgtgcgcggtcccgggtgagcggcggcggcggcgacagcggctgaggcggtggccaaggagcgggagcgcgctcaccgccggggcctcgcacaggcgcagtaggcaccgcccgccaccccgccctcgaccccgcccccagctccgctcccttctcgcgcctgccccgcccctttccgcaggcgcagtaggcaccgcccgccagcccgcgcccgccccgcccctttccgcaggcgcagtaggtggcacccgcaggcctgtgcctgccccgcccctttccgcaggcgcagtgagcgtcgacccgcccctccccgcccgcttccgcaggcgcagtaggacccgccctggtccgcgcctgccccgttgctttcctcaggctctaaggcccgcggtgtggagcgcggcgtaggcagcggggagtgggcggcgcggggtgggtggagtgggtcggcggcggggatcctgccgagcccgcagctgccctcttttagcgccgtgtctcctccccggccctggctcgtcccacctcagccacagcccggccccctggccggccgaggtctcgccgccggcgccctggggacctcgtgggtgtggccggcggcgacctcggcaggcgacagcccagcagacgggcaccaggtggacgtgccagtctccagacccccgtcccggtgcagggaaggtgggcgtttggacccctgaggcagaaacaggtgcggccccgccggcgcatcccccggaagggacgctgacttcgttcccctggagcctgcgtcggggcccgcgctgggctgagaattacgggaacgccgtgagagtttgcattccgaggatttggtctgagaacctcaccagcgaaatagagaactgcccccgggagagccggcccacgtgccgcccaccggcgccttgacggcagggagaggtcgagcttccagggagcgggcgcccggcgcggggctcccagcctgtctgtacctggtcgagacaccccgtgccagaggcggaacatgtatgaaatgccaggtgcccagaggacccaggcagtccgtcattcacataccaacccacgtgcaggcttcaattcaaccttgaagccatttgggcctgggcttttttgatgacttatttgattcatagttttttggttactaattgagtctcttcacttgttataggtctgttgagattgtctattttttcttgagtcagccgtctgaaaagaacacgaggtggacagggcagagcggtcaaggaaagccataggaggagggcacttatttgagcaaagaccggcgggacgtgggcgtcgagggtaaggatatctgcagaagtactgtcttgagcaaggagcacggcagacagagcctctgagacacgagagcctggagtgtaagaaacacagtagaggccactaagtcgagaacgcaggagctggaaggactggtaggaaatgggaggtggggacatggagggatgcagacaggtcctgcacagtcagaactgtggccccttctctgcaggaaatgggcagccttcggaagactgagcacacggaaggatatgactaaccctttaaaagggtcattctgactcctgggtgaagaacagactaggaagggctgaggaggaggcaggaggccatctactgttatatgggatgtggagtgtgacccggaaaggtcaa

SEQ ID NO: 588223 - DNA, 4001 bp, Homo sapiens
gccccgctgcccctcttggcagcaccaagccggcaggagaggctgggggacgggccacgtgccagggttgaggttgggcctcagtcagaggccaggggcaaagccaggcggggctctcctggggttgagggtcagggtggcagagcgtgcagccacctccgagctgactctgtggttgggtttggggcctggggcccgcggggcaacactgacccactttccgtttgcggatgaccaggttggggtcgctgagcacctgctcctcatcatcggggttcaggaccttgcactgccgcaggtaaggtgtgatgcgtgaggggtcgatgaccgaggtgagcgtcacccggaagccctccaggacgctccagcactcgtcatcgttctcgtagtccgacatggcctcagcaggcaggctggggagtgtggggcagtgctgagagcgatgccggctcctgcccccacccgggcccagctcccactccttctcagacgctgggccagggctctcgtcagggcatcgagggggatcagcccaggggcatccaggagaggtgcccagctccatgtcccatccccacgctggatcccccagggaggcagcagagacacagtgaccccgctccccaccagaccagccgagggcccctccgcagcctttcccagcccttgctcctgcccgttggcatccatgtcacccagatacgcagcgggggaggcacagatggggtctgagagaggaactccccctacagcatgaccccctctggcctctgcctcctggacactcccatcacgccctggagcctgcaaggttagccacctccatggctggaatgggcagaggagctgagggcaactgcctggcactatggccagcccaagctgggtgagagcaggttggccagtggccctcccaccagcacagcagctgggggagccggttcttgtgggacttcctcattcccctgaccgacgcctgctcacatccctggctgtgccctccctcctccacggccggctgctgatgatgcaagagtggccacccagccctgctgcagctgcggggtcgctgcactggccgggaagagctgcccacaggagcgtgtctctgtcaccccctgccggccccgcaaccctgggaggggctgtcagtgttgcccttggctggccaggagtgctgctgcggtgttttctccaggttgaggtgccgggcaccagtgaatccctggactcttctcctgccccagatgaggcccggcccccatcccagtggctgcaacagaactacccatgttgggaccagccactgctgtccctttctgccagcatggtgggggcctcagccgctgaaagccactccctctgagactgggactgcggcaaggctgggagcagccacgtggtcctcagacagcctccagccccgctgggaaacgctggtttccagcccagaggagctgggtcactgctcctggagacatagttgccccaggcttggtcttttgaggcatttctcaacttcccgctgcactttgtcaccccattcaggacagttttgacagacaagggactgaataaaaacactggccacacggtagacagtcctgggaacactgggcccctttcctgcttccccagcttgaaatgcagggtcccatctgccaccgtaattccactgaaatgaacacatctccgcccaggggccgtgaaagggacggggccgcatggcggaggctgcctggctgcctgtgggaagcctcaggctgctctgggggatcagtgccaggatcctgaactaggccaacgccaaccttcctggccacctttcagaaagcaccagacccacccacctgagggtcttccaggagccacctgcactgcagacacaccaggagcctgggccgcggagcctctgggagatgctgcccggggctgcagggagggaggagcacgccggacgcctgtgcacttcctgatgggttctgcttaactccacagtcccgccagtcctcccacagggggacagtccctggtgacctgctttctgattcgcccagcccaggaggccccaagaggcagacggaagtggaagtccgctgccctccagaggaaagctgctcccagccctcccagcctggccgggggctgggggtcctggggatgccccagaggcccagccctggcacctggcaagtagaagagacagcagagacccccagggggctggacaaggccagcccgcacccagccactttgacctggtcacaggcttctggagacttcttcagtaaggcatgctttgctctgtgcgaacaccctcgccctcgccagcatctcaggacagcggggcagggcatgtgcaggggggcacacagccacacggcatggccagcacacgccttggtcacagaagggctgcagcccaccttatggagcccaggaggccacagcagcctgccaggggccatggcatcggccaccacccagctgcacacgggggagaaacgtcccttccagaagtgtcgttatcctcgttatccccatcatgaggcatccctgctctccaccaggatgcatgtgaggactgaggccactctcggggtcccccaaaccagcttcagaagagccggtgacagcagggcacagctcggcccccatccagggacaacggacagcagagtctgccctgaactgtgcacttcagcgtgtgggctgccagagcctcatccctgcaggcttgggaacccccaggccccgcctcacccggtaaagctggttgaactgagttgccacccaacaggttcgagaaggggccgccaggctggaaggcaaggaagctggtgtggagcttgcctaaccgttctcagcctccagccctcaggcctctgtgcggacaacgtctgacatcacacattaaggagcggacagttaggggtcctcctgggctctcgggaatgccacattccagggggccgtgcccctgctggacccctcaccatcaacatgagcgagtgtgcaggccggggccatcctgggccctgccagggagcgaaccggagctggcaccaggccctcatgacccagtgtttccccagcgtttaaaacgcggaccttagtgacttccctgtggtgtgtgtccttaggagtgaacacacataccatgttctctaaccatatcggaagctaaaaatcggtaacagatatcggcaaaatctctaaatatttggaaattaaataatataccgctaaataacccacagatcagagtggcccccagactaggcaccagactagagaaccaggcacagcaacacatactcaggagtgaggtcggccatgggaccgtcccgtctgccaggtgcccagggctgaggccccacagtggctccagtgaaggatcgaagcccagatagccaagggcctgggggcgctgctgccacagagacaaaggaaagggagctaggggacagacggagaagatgggggctagtcttatgccaataaaggcccatgcaaaaggaacagtggagggtgggggctgccgccgtgtcggggtagccaggtcatctgttccagggaaccccctgggtcagccagggcagcgcgagggctggcagccatctggggagggtgccggctagcctgaaggacaaagccacagatgctttccaggaaatgggcgaaagaaagcctgcttctctgacaggagggcagccggggtacgggaggccttccaggaccccagctctgggcccccagcaccctgcttgttcccgaactgcctgcactagggtggctcagccactaggcagcagcctgaccccagccaggtggggggtccctgtacactgcccggtacctcaggacaacaaaaccacaacagcctgtgtccagctccacaattaaaaacagaactttattcctccaagtgttcaggtgtgcacttggggaacagccatgctccatgccacacagtcagtcggcaggcccgcctctgttca

SEQ ID NO: 588224 - DNA, 4001 bp, Homo sapiens
acatctagccagaggagtcacagtaaaaaagtacctattccaaggggctaaaacacttggcacctttgaagtaacattagttcattgtgcggggccaatttggcaggctggaaaggttggcaagatccagatcctacaggtccttgtaattcatgttaaggaatttggattttaacccatagggatgccactgaaaggtgtgacgcagtcggattgacatttataaagatcattaaggctaacatgcaacgaataaattaaagggcagcaagactccagattagtcaggaggcttttagagtattccaaatggttgggatcacagaagcaggatttggggggatggtaacagacgaagtttcagacatgttaagttttaagttgtaggacatcaaaatagaaattacacaggtgtgtagctaaagatggacaaagggggaaggaggagggagccttaaaaagaagccagagaagcaggtggaaaaatcagaagaaaaatgtagtagaagccaaaagaacagcgtttcaaaaagggaaaatggtcagggataggagtgaaactatccctagattcagcaacaaggttgctggtattaattctcactcctgagcttcagatcattttctccagtgatctactgacctaccagtgagcaatacgggaaaggcccgagcggcacgtttgaaatacattgttttggacaagaaatttgttcatcttctcagcagagcagcctctgaataactgtggggaaacgccaaaaataaattcctttataaaattacttccgagcaaaaaacgggaataaacttacagtctacaaagtttttaaaaaaaacaaaagcagttatttcttatttttacataaaaggtcacgaagtggcccaagtctgtacctgtctctagcaacaactaggaatattatttcccggaaacagtattttatttatatttcttaactttttccaaacttctaatacagccatatatttgttctagcccttctatttaactgtaaggtttaaaaatatatttctcaaacttttccagtaagaaacttctagtgtaagtgcataaaccgcccttcacgaaactaccaagttcacaaacttgtggtttcgagtatccctgtacactctaaacgttcttagtttgagaaatagtcttggaggacagagattttattcttacttcctacgcagtggtttacaaacagacctcaaaaaaaaagtgtttaagataggagcgctccctgccagctggctggaggactctggctcgtggggaaggggaatctactgacgaaagccccacgtgtcgggcattttacagacgggacatcctttaatggcaacaggtaggtggttccggccctgtttcacaggtgacaggtatttctccattttcaggtgaggtagatgagcgtcaggaaggtaagataacttggtaagaggtcacagagacaattaggggggcgtgtcttagcgtcaaagccttgcttcaaaggctaactttccatctcacttgagaaatgggaatctaacgcagagggggccgggcatcattaactcccaagatgagaggcaacccatacgagaagcaagtgacccagccccgacctcgaagacatttgctcttgatcatgaggccccaatgcctcaggagaagaggcaccggcagcccgcaaaatcccatgacaccagaggtcacgccattttgtgactgggatggttagttacctaaatacccggtgataattgtgactgggatcttggcgccgaggccagacttttcctcctcctcgctttgcgtcgtctcaatgggaaccaattcaggacaatcctcctccgcaggatcctcctcctcatccgcagatccaacagccggtaacattccggcctacagcacgtccctacctcagctgaaccgctgggaccaacacgccgtaccgcagccgcgcacgcccagcacgccactcccggcctgcccggggcctgacgtcatcacatcgcgacgctcgctgatcccgcccggattacctgggctctggacgagaagcgcctcgccccttagccacaccccccggggaggtgggctctccccgacgacagctggacacgcccctgggcgtgttctgtgaacctgagcgacgctgcggagagtccctagggcgcactaaccacctgtctgaaggtgtcactggcgcctagagccttaataagctactggctgtaggtagagctgaggccagtctgctggaaatctggagtgggtagcctgacctaaccagttcccacagggcatagattttatcaccttgattttttagtctcgttaaaaaaaaaagttttaattcataggggaaagaatggaaggttataacattataattttaattgtaatttttatacctgaaggataaccagtgacacttttttctttttttattattacatattatatatgtaattccaaatttttagtattcatgcatcacttttatttacttttttctcattatttatttggacctcaggtaacctaagttcattaatcatatttgctggtgcatgacactctcatcactaatccatagatagcccttctttctaatataaatttatagtgaactcctttgacgtcattcctaacgtaaaagcattaccagtaagttacacgtacctatgtgcaccgcccctgcttccaatccacagcctgccccataagatagtaacaacagtcatgaattggttctggattgctgatcattccctgttttctttttaattttatcacatatcccacgtacgtacttagagaatatgttgtttaattttgggtgtttttgagcttcataaaattatccatataatatataaactcctgaggcttgctatacttttcagcatcactgctgtcttgtattctattgtgtggctacacggcaatttattcatttcctctcaattgttccaggttttgctcttatgaacagggctgctatgaacatttttcctgatatatgtgtgtgcaacttcctcttgagtgtctgtgtaagagttgaattgctgggtcctagattattcaaatgttttacttcacaagaaaatgcacaattatttttcaaaatgtttgtacaaattgatacattttcccagcaaattataagagatctcattggtctgtaggtcaatattatcaggcatgcatttttcaccaatcaattgtgtacaaaagaagacttcattgtgatcttcatttgcatttccttgattactaacaaggttgagaatcttttcatgtgttttggcaatatttaattcttagaatgaccctgtagagtgttatccctctttcaaacatgaggcaccaagagttaagttacttgtccaggttaggtcataaaaatctatctgatgcacaagtagaatgttttactactatcctgatgccaaataaaaggttgacttttccttccttctctgaaattccccataaaatatactgtgtgtattccattagttctactgataaggacatataacttgaaagtatttatcacgccttttgcagaacacagttaagacagagggtttatatttgtgcaaatgagtatattatattcacacatacactcggtctgagaaatcaggtcttgaatgctttgccagctttgacaatgtaaccatgaaccagctgaggaagaaataaggcaaataccttaggcgtggtggttcagttcactttattctaccaaaggagagaagctgtgatgggtagcccaaaatagatagcttacaccctaaacacaatggttcataagctttttcgtttcaggaatgctatgaagtattgatttttttggcaacctaagggaaggagtaacattgcacccacaggcatcacactatttgcttgatgtcccttcagcactgcattactgcctgaatagcagctattacagccctcaccaccttctttgacatattttttaaagtac

SEQ ID NO: 588225 - DNA, 4001 bp, Homo sapiens
atggagaacctaagagggacatctagccagaggagtcacagtaaaaaagtacctattccaaggggctaaaacacttggcacctttgaagtaaccttagtttattgtgcggggccaatttggcaggctggaaaggttggcaagatccagatcctacaggtccttgtaattcatgttaaggaatttgaattttaacccatagggacgccactgaaaggtgtgacgcagtcggattgacatttataaagatcattaaggctaacatgcaacgaataaattaaagggcagcaagactccagattagtcaggaggcttttagagtattccaaatggttgggatcacagaagcaggatttggggggatggtaacagacgaagtttcagacatgttaagttttaagttgtaggacatcaaaatagaaattacacaggtgtgtagctaaagatggacaaagggggaaggaggagggagccttaaaaagaagccagagaagcaggtggaaaaatcagaagaaaaatgtaatagaagccaaaggaacagtgtttcaaaaagggaaaatggtcagggataggagtgaaactatccctagattcagcaacaaggttgctggtattaattctcactcctgagcttcagatcattttctccaatgatctactgacctaccagtgagcaacacgggaaaggcccgaggggcacgtttgaaatacattgttttggacaagaaatttgttcatcttctcagtagagcagcctctgaataactgtggggaaacgccaaaaataaattcctttataaaattacttccgagcaaaaaacgggaataaacttacagtctacaaagtttttaaaaaaacaaaagcagttatttcttatttttacataaaaggtcacgaagtggcccaagtctgtacctgtctctagcaacaactaggaatattatttcccggaaacagtattattttatttacatttcttaactttttccaaacttctaatacagtcatatatttgttctagcccttctatttaactgtaaggtttaaaaatatatttctcaaacttttccagtaagaaacttctagtgtaagtgcataaaccgcccttcacgaaactaccaagttcacaaacttgtggtttcgagtatccctgtacactctaaacgttcttagtttgagaaatagtcttggaggacagagattttattcttacttcctacgcagtggtttacaaacagacctcaaaagaaaagtgtttaagataggagcacttcctgccaactggctggaggactttggctcctggggaaggggaatctgctgacgaaagccccacgtgtcgggcattttacagacgggacatcctttaatggcaataggtaggttgttccggccctatttcacaggtgacaggtatttttccattttcaggtgaggtagatgagcgtcaggaaggtaagataacttggtaagaggtcacagagacaattaggggggcgtgtcttagcttcaaagccttgtttcaaaggctaactttccatctcacttgagaaatgggaatctaacgcagaggggaccgggcatcattaactcccaagatgagaggtaacccatacgagaagcaagtgacccagcccctacctcaaagacatttgctcttgatcatgaggccccaatgcctcaggagaagaggcaccggcagcccgcaaaatcccatgacaccagagttcacggcattttgtgactgggatggttagttacctaaatacccggtgataattgtgactgggatcttggcgccgaggccagacttttcctcctcctcgctttgcgtcgtctcaatgggaaccaattcaggacaatcctcctccgcaggatcctcttcctcatccacagatccaacagccggtaacattccggcctacagcacgtccctacctcagctgaaccgctgggaccaacacgccgtaccgcagccgcgcacgcccagcacgccactcccggcctggccggggcctgacgtcatcacatcgcgacgctagctgatcccgcccggattacctgggctctggacgagaactgcctcgtcccttagccacaccccccggggaggtgggctctccccgacgacagctggacacgcccctgggcgtgttctgtgaacctgagcgacgctgcggagagtccttagggcgcactaaccacctgtctgaaggtgtcactggcgcctagagccttaataagctactggctgtaggtagagctgaggccagcctgctggaaatctggagtgggtagcctgacctaaccagttcccacagggcatagattttatcaacttgattttttagtctcgttaaaaaaaaaagttttaattcataggggaaagaatggaaggttataacattacaattttaattgtaatttttatacctgaaggataaccagtgacaattttttctttttttattattacatattatatatgtaattccaaatttttagtattcatgcatcacttttatttacttttttctcattatttatttggacctcaggtaacctaagttcattaatcatatttgctggtgcatgacactctcatcactaatccatagatagcccttctttctaatataaatttatagtgaactcctttgacctcattcctaacataaaagcattaccagtaagctacacgtacctatgtgcaccgcccccgcttccaatccacagcctgccccataagatagtaacaacagtcatgaattggttctggattgctgatccttccctgttttctttttagttttatcacatatcccacgtatgtacttagagaatatgttgtttaattttgggtgtttttgagcttcataaaattatccatataatatataaactcctgaggcttgctatatttttcagcatcactgctgtcttgtattctattgtgtggctacacggcaatttattcatttcctctcaattgttccaggttttgctcttatgaacagggctgctatgaacatttttcctgacatatgtgtgtgcaacttcctcttgagtgtctaagagttgaattgctgggtcctagattattcaaatgttttacttcacaagaaaatgcacaattatttttcaaaatgtttgtacaaattgatacattttcccagcaaattataagagatctcattggtctgtatgtcaatattatcaggcatgcatttttcaccaatcaattgagtacaaaagaagacttcattgtgatcttcatttgcatttccttgattactaacaaggttgagaatcttttcatgtgttttggcaatatgtaattcttagaatgaccctgtagagtgttatccctctttcaaacatgaggcaccaagagttaagttacttgtccaggttaggtcataaaaatctatctgatgcacaagtagaatgttttactactatcctgatgccaaataaaaggttgacttttccttccttctctgaaattccccataaaatatactgtgtgtattccattagttctactgataagtacatataacttgaaagtatttatcacgccttttgcagaacacagttaagacagagggtttatatttgtgcaaatgagtatattatattcacacatacactcggtctgagaaatcaggtcttgaatgctttgccagctttgacaatgtaaccatgaaccagctgaggaagaaataaggcaaataccttaggtgtggtggttcagttcactgtattctgccaaaggagagaagctgtgatgggtagcccaaaatagatagcttacgccctaaacacaatggttcataagctttttcgtttcaggaatgctatgaagtattgatttttttggcaacctaagggaaggagtaacattgcacccacaggcatcacactatttgcttgatgtcccttcagcactgcattactgcctgaatagcagctattacagccctcaccatcttctttgac

SEQ ID NO: 588226 - DNA, 4001 bp, Homo sapiens
tccaaggggctaaaacacttggcacctttgaagtaaccttagtttattgtgcggggccaatttggcaggctggaaaggttggcaagatccagatcctacaggtccttgtaattcatgttaaggaatttgaattttaacccatagggacgccactgaaaggtgtgacgcagtcggattgacatttataaagatcattaaggctaacatgcaacgaataaattaaagggcagcaagactccagattagtcaggaggcttttggagtattccaaatggttgggatcacagaagcaggatttgggggaatggtaacagacgaagtttcagacatgttaagttttaagttgtaggacatcaaaatagaaattacacaggtgtgtagctaaagatggacaaagggggaaggaggagggagccttaaaaagaagccagagaagcaggtggaaaaatcagaagaaaaatgtaatagaagccaaaggaacagtgtttcaaaaagggaaaatggtcagggataggagtgaaactatccctagattcagcaacaaggttgctggtattaattctcactcctgagcttcagatcattttctccaatgatctactgacctaccagtgagcaacacgggaaaggcccgaggggcacgtttgaaatacattgttttggacaagaaatttgttcatcttctcagtagagcagcctttgaataactgtggggaaacgccaaaaataaattcctttataaaattacttccgagcaaaaaacgagaataaacttacagtctacaaagttttttaaaaaaaaaagcagttatttcttatttttacataaaaggtcacgaagtggcccaagtctgtacctgtctctagcacacaactaggaatattatttcccggaaacagtattattttatttacatttcttaactttttccaaacttctaatacagtcatatatttgttctagcccttctatttaactgtaaggtttaaaaatatatttctcaaacttttccagtaagaaacttctagtgtaagtgcataaaccgcccttcacgaaactaccaagttcacaaacttgtggtttcgagtatccctgtacactctaaacgttcttagtttgagaaatagtcttggaggacagagattttattcttacttcctacgcagtggtttacaaacagacctcaaaaaaaaagtgtttaagataggagcacttcctgccaactggctggaggactttggctcctggggaaggggaatctgctgacgaaagccccacgtgtcggacattttacagacgggacatcctttaatggcaataggtaggttgttccggccctatttcacaggtgacaggtatttttccattttcaggtgaggtagatgagcgtcaggaaggtaagataacttggtaagaggtcacagagacaattaggggggcgtgtcttagcttcaaagccttgtttcaaaggctaactttccatctcacttgagaaatgggaatctaacgcagaggggaccgggcatcattaactcccaagatgagaggtaacccatacgagaagcaagtgacccagcccctacctcaaagacatttgctcttgatcatgaggccccaatgcctcaggagaagaggcaccggcagcccgcaaaatcccatgacaccagagttcacggcattttgtgactgggatggttagttacctaaatacccggtgataattgtgactgggatcttggcgccgaggccagacttttcctcctcctcgctttgcgtcgtctcaatgggaaccaattcaggacaatcctcctccgcaggatcctcttcctcatccacagatccaacagccggtaacattccggcctacggcacgtccctacctcagctgaaccgctgggaccaacacgccgtaccgcagccgcgcacgcccagcacgccactcccggcctggccggggcctgacgtcatcacatcgcgacgctagctgatcccgcccggattacctgggctctggacgagaactgcctcgtcccttagccacaccccccggggaggtgggctctccccgacgacagctggacacgcccctgggcgtgttctgtgaacctgagcgacgctgcggagagcccttagggcgcactaaccacctgtctgaaggtgtcactggcgcctagagccttaataagctactggctgtaggtagagctgaggctagcctgctggaaatctggagtgggtaacctgacctaaccagttcccacagggcatagattttatcaacttgattttttagtctcgttaaaaaaaaaagttttaattcataggggaaagaatggaaggttataacattacaattttaattgtaatttttatacctgaaggataaccagtgacaattttttctttttttattattacatattatatatgtaattccaaatttttagtattcatgcatcacttttatttactttttcctcattatttatttggacctcaggtaatctaagttcattaatcatatttgctggtgcatgacactctcatcactaatccatagatagcccttctttctaatataaatttatagtgaactcctttgacctcattcctgacgtaaaagcattaccagtaagttacacgtacctatgtgcaccgcccccgcttccaatccacagcctgccccataagatagtaacaacagtcatgaattggttctggattgctgatcattccctgttttctttttagttttatcacatatcccacgtatgtacttagagaatatgttgtttaattttgggtgtttttgagcttcataaaattatccatataatatataaactcctgaggcttgctatatttttcagcatcactgctgtcttgtattctattgtgtggctacacggcaatttattcatttcctctcaattgttccaggttttgctcttatgaacagggctgctatgaacatttttcctgacatatgtgtgtgcaacttcctcttgagtgtctgtgtaagagttgaattgctgggtcctagattattcaaatgttttacttcacaagaaaatgcacaattatttttcaaaatgtttgtacaaattgatacattttcccagcaaattataagagatctcattggtctgtatgtcaatattatcaggcatgcatttttcaccaatcaattgagtacaaaagaagacttcattgtgatcttcatttgcatttccttgattactaacaaggttgagaatcttttcatgtgttttggcaatatttaattcttagaatgaccctgtagagtgttatccctctttcaaacatgaggcaccaagagttaagttacttgtccaggttaggtcataaaaatctatctgatgcacaagtagaatgttttactactatcctgatgccagataaaaggttgacttttccttccttctctgaaattccccataaaatatactgtgtgtattccattagttctactgataagtacatataacttgaaagtatttatcacgccttttgcagaacacagttaagacagagggtttatatttgtgcaaatgagtatattatattcacacatacactcggtctgagaaatcaggtcttgaatgctttgccagctttgacaatgtaaccatgaaccagctgaggaagaaataaggcaaataccttaggcgtgatggttcagttcactttattctaccaaaggagagaagctgtgatgggtagcccaaaatagatagcttacaccctaaacacaatggttcataagctttttcgtttcaggaatgctatgaagtattgatttttttggcaacctaagggaaggagtaacattgcacccacagtcatcacactatttgcttgatgtcccttcagcactgcattactgcctgaatagcagctattacagccctcaccaccttctttgacatatttttaaaagtacattcttgtgggttcccaatatggcactggctgaatg

SEQ ID NO: 588227 - DNA, 4001 bp, Homo sapiens
ccaaggggctaaaacacttggcacctttgaagtaaccttagtttattgtgcggggccaatttggcaggctggaaaggttggcaagatccagatcctacaggtccttgtaattcatgttaaggaatttgaattttaacccatagggacgccactgaaaggtgtgacgcagtcagattgacatttataaagatcattaaggctaacatgcaactaataaattaaagggcagcaagactccagattagtcaggaggcttttagagtattccaaatggttgggatcacagaagcaggatttggggggatggtaacagacgaagtttcagacatgttaagttttaagttgtaggacatcaaaatagaaattacacaggtgtgtagctaaagatggacaaagggggaaggaggagggagccttaaaaagaagccagagaagcaggtggaaaaatcagaagaaaaatgtaatagaagccaaaggaacagtgtttcaaaaagggaaaatggtcagggataggagtgaaactatccctagattcagcaacaaggttgctggtattaattctcactcctgagcttcagatcattttctccaatgatctactgacctaccagtgagcaacacgggaaaggcccgaggggcacgtttgaaatacattgttttggacaagaaatttgttcatcttctcagtagagcagcctctgaataactgtggggaaacgccaaaaataaattcctttataaaattacttccgagcaaaaaacgggaataaacttacagtctacaaagtttttaaaaaaacaaaagcagttatttcttatttttacataaaaggtcacgaagtggcccaagtctgtacctgtctctagcaacaactaggaatattatttcccggaaacagtattattttatttacatttcttaactttttccaaacttctaatacagtcatatatttgttctagcccttctatttaactgtaaggtttaaaaatatatttctcaaacttttccagtaagaaacttctagtgtaagtgcataaaccgcccttcacgaaactaccaagttcacaaacttgtggtttcgagtatccctgtacactctaaacgttcttagtttgagaaatagtcttggaggacagagattttattcttacttcctacgcagtggtttacaaacagacctcaaaagaaaagtgtttaagataggagcacttcctgccaactggctggaggactttggctcctggggaaggggaatctgctgacgaaagccccacgtgtcgggcattttacagacgggacatcctttaatggcaataggtaggttgttccggccctatttcacaggtgacaggtatttttccattttcaggtgaggtagatgagcgtcaggaaggtaagataacttggtaagaggtcacagagacaattaggggggcgtgtcttagcttcaaagccttgtttcaaaggctaactttccatctcacttgagaaatgggaatctaacgcagaggggaccgggcatcattaactcccaagatgagaggtaacccatacgagaagcaagtgacccagcccctacctcaaagacatttgctcttgatcatgaggccccaatgcctcaggagaagaggcaccggcagcccgcaaaatcccatgacaccagagttcacggcattttgtgactgggatggttagttacctaaatacccggtgataattgtgactgggatcttggcgccgaggccagacttttcctcctcctcgctttgcgtcgtctcaatgggaaccaattcaggacaatcctcctccgcaggatcctcttcctcatccacagatccaacagccggtaacattccggcctacagcacgtccctacctcagctgaaccgctgggaccaacacgccgtaccgcagccgcgcacgcccagcacgccactcccggcctggccggggcctgacgtcatcacatcgcgacgctagctgatcccgcccggattacctgggctctggacgagaactgcctcgtcccttagccacaccccccggggaggtgggctctccccgacgacagctggacacgcccctgggcgtgttctgtgaacctgagcgacgctgcggagagtccttagggcgcactaaccacctgtctgaaggtgtcactggcgcctagagccttaataagctactggctgtaggtagagctgaggccagcctgctggaaatctggagtgggtagcctgacctaaccagttcccacagggcatagattttatcaacttgattttttagtctcgttaaaaaaaaaagttttaattcataggggaaagaatggaaggttataacattacaattttaattgtaatttttatacctgaaggataaccagtgacaattttttctttttttattattacatattatatatgtaattccaaatttttagtattcatgcatcacttttatttacttttttctcattatttatttggacctcaggtaacctaagttcattaatcatatttgctggtgcatgacactctcatcactaatccatagatagcccttctttctaatataaatttatagtgaactcctttgacctcattcctaacataaaagcattaccagtaagctacacgtacctatgtgcaccgcccccgcttccaatccacagcctgccccataagatagtaacaacagtcatgaattggttctggattgctgatcattccctgttttctttttagttttatcacatatcccacgtatgtacttagagaatatgttgtttaattttgggtgtttttgagcttcataaaattatccatataatatataaactcctgaggcttgctatatttttcagcatcactgctgtcttgtattctattgtgtggctacacggcaatttattcatttcctctcaattgttccaggttttgctcttatgaacagggctgctatgaacatttttcctgacatatgtgtgtgcaacttcctcttgagtgtctgtgtaagagttgaattgctgggtcctagattattcaaatgttttacttcacaagaaaatgcacaattatttttcaaaatgtttgtacaaattgatacattttcccagcaaattataagagatctcattggtctgtatgtcaatattatcaggcatgcatttttcaccaatcaattgagtacaaaagaagacttcattgtgatcttcatttgcatttccttgattactaacaaggttgagaatcttttcatgtgttttggcaatatgtaattcttagaatgaccctgtagagtgttatccctctttcaaacatgaggcaccaagagttaagttacttgtccaggttaggtcataaaaatctatctgatgcacaagtagaatgttttactactatcctgatgccaaataaaaggttgacttttccttccttctctgaaattccccataaaatatactgtgtgtattccattagttctactgataagtacatataactttaaagtatttatcacgccttttgcagaacacagttaagacagagggtttatatttgtgcaaatgagtatattatattcacacatacactcggtctgagaaatcaggtcttgaatgttttgccagctttgacaatgtaaccatgaaccagctgaggaagaaataaggcaaataccttaggcgtggtggttcagttcactgtattctgccaaaggagagaagctgtgatgggtagcccaaaatagatagcttacgccctaaacacaatggttcataagctttttcgtttcaggaatgctatgaagtattgatttttttggcaacctaagggaaggagtaacattgcacccacaggcatcacactatttgcttgatgtcccttcagcactgcattactgcctgaatagcagctattacagccctcaccatcttctttgacatatttttaaaagtacattcttgtgggttcccaatatggcactggctgaatgt

SEQ ID NO: 588228 - DNA, 4001 bp, Homo sapiens
tccaaggggctaaaacacttggcacctttgaagtaaccttagtttattgtgcggggccaatttggcaggctggaaaggttggcaagatccagatcctacaggtccttgtaattcatgttaaggaatttgaattttaacccatagggacgccactgaaaggtgtgacgcagtcggattgacatttataaagatcattaaggctaacatgcaacgaataaattaaagggcagcaagactccagattagtcaggaggcttttagagtattccaaatggttgggatcacagaagcaggatttggggggatggtaacagacgaagtttcagacatgttaagttttaagttgtaggacatcaaaatagaaattacacaggtgtgtagctaaagatggacaaagggggaaggaggagggagccttaaaaagaagccagagaagcaggtggaaaaatcagaagaaaaatgtaatagaagccaaaggaacagtgtttcaaaaagggaaaatggtcagggataggagtgaaactatccctagattcagcaacaaggttgctggtattaattctcactcctgagcttcagatcattttctccaatgatctactgacctaccagtgagcaacacgggaaaggcccgaggggcacgtttgaaatacattgttttggacaagaaatttgttcatcttctcagtagagcagcctctgaataactgtggggaaacgccaaaaataaattcctttataaaattacttccgagcaaaaaacgggaataaacttacagtctacaaagtttttaaaaaaacaaaagcagttatttcttatttttacataaaaggtcacgaagtggcccaagtctgtacctgtctctagcaacaactaggaatattatttcccggaaacagtattattttatttacatttcttaactttttccaaacttctaatacagtcatatatttgttctagcccttctatttaactgtaaggtttaaaaatatatttctcaaacttttccagtaagaaacttctagtgtaagtgcataaaccgcccttcacgaaactaccaagttcacaaacttgtggtttcgagtatccctgtacactctaaacgttcttagtttgagaaatagtcttggaggacagagattttattcttacttcctacgcagtggtttacaaacagacctcaaaagaaaagtgtttaagataggagcacttcctgccaactggctggaggactttggctcctggggaaggggaatctgctgacgaaagccccacgtgtcgggcattttacagacgggacatcctttaatggcaataggtaggttgttccggccctatttcacaggtgacaggtatttttccattttcaggtgaggtagatgagcgtcaggaaggtaagataacttggtaagaggtcacagagacaattaggggggcgtgtcttagcttcaaagccttgtttcaaaggctaactttccatctcacttgagaaatgggaatctaacgcagaggggaccgggcatcattaactcccaagatgagaggtaacccatacgagaagcaagtgacccagcccctacctcaaagacatttgctcttgatcatgaggccccaatgcctcaggagaagaggcaccggcagcccgcaaaatcccatgacaccagagttcacggcattttgtgactgggatggttagttacctaaatacccggtgataattgtgactgggatcttggcgccgaggccagacttttcctcctcctcgctttgcgtcgtctcaatgggaaccaattcaggacaatcctcctccgcaggatcctcttcctcatccacagatccaacagccggtaacattccggcctacagcacgtccctacctcagctgaaccgctgggaccaacacgccgtaccgcagccgcgcacgcccagcacgccactcccggcctggccggggcctgacgtcatcacatcgcgacgctagctgatcccgcccggattacctgggctctggacgagaactgcctcgtcccttagccacaccccccggggaggtgggctctccccgacgacagctggacacgcccctgggcgtgttctgtgaacctgagcgacgctgcggagagtccttagggcgcactaaccacctgtctgaaggtgtcactggcgcctagagccttaataagctactggctgtaggtagagctgaggccagcctgctggaaatctggagtgggtagcctgacctaaccagttcccacagggcatagattttatcaacttgattttttagtctcgttaaaaaaaaaagttttaattcataggggaaagaatggaaggttataacattacaattttaattgtaatttttatacctgaaggataaccagtgacaattttttctttttttattattacatattatatatgtaattccaaatttttagtattcatgcatcacttttatttacttttttctcattatttatttggacctcaggtaacctaagttcattaatcatatttgctggtgcatgacactctcatcactaatccatagatagcccttctttctaatataaatttatagtgaactcctttgacctcattcctaacataaaagcattaccagtaagctacacgtacctatgtgcaccgcccccgcttccaatccacagcctgccccataagatagtaacaacagtcatgaattggttctggattgctgatccttccctgttttctttttagttttatcacatatcccacgtatgtacttagagaatatgttgtttaattttgggtgtttttgagcttcataaaattatccatataatatataaactcctgaggcttgctatatttttcagcatcactgctgtcttgtattctattgtgtggctacacggcaatttattcatttcctctcaattgttccaggttttgctcttatgaacagggctgctatgaacatttttcctgacatatgtgtgtgcaacttcctcttgagtgtctaagagttgaattgctgggtcctagattattcaaatgttttacttcacaagaaaatgcacaattatttttcaaaatgtttgtacaaattgatacattttcccagcaaattataagagatctcattggtctgtatgtcaatattatcaggcatgcatttttcaccaatcaattgagtacaaaagaagacttcattgtgatcttcatttgcatttccttgattactaacaaggttgagaatcttttcatgtgttttggcaatatgtaattcttagaatgaccctgtagagtgttatccctctttcaaacatgaggcaccaagagttaagttacttgtccaggttaggtcataaaaatctatctgatgcacaagtagaatgttttactactatcctgatgccaaataaaaggttgacttttccttccttctctgaaattccccataaaatatactgtgtgtattccattagttctactgataagtacatataacttgaaagtatttatcacgccttttgcagaacacagttaagacagagggtttatatttgtgcaaatgagtatattatattcacacatacactcggtctgagaaatcaggtcttgaatgctttgccagctttgacaatgtaaccatgaaccagctgaggaagaaataaggcaaataccttaggtgtggtggttcagttcactgtattctgccaaaggagagaagctgtgatgggtagcccaaaatagatagcttacgccctaaacacaatggttcataagctttttcgtttcaggaatgctatgaagtattgatttttttggcaacctaagggaaggagtaacattgcacccacaggcatcacactatttgcttgatgtcccttcagcactgcattactgcctgaatagcagctattacagccctcaccatcttctttgacatatttttaaaagtacattcttgtgggttcccaatatggcactggctgaatgttat

SEQ ID NO: 588229 - DNA, 4001 bp, Homo sapiens
atctagccagaggagtcacagtaaaaaagtacctattccaaggggctaaaacacttggcacctttgaagtaaccttagtttattgtgcggggccaatttggcaggctggaaaggttggcaagatccagatcctacaggtccttgtaattcatgttaaggaatttgaattttaacccatagggacgccactgaaaggtgtgacgcagtcagattgacatttataaagatcattaaggctaacatgcaactaataaattaaagggcagcaagactccagattagtcaggaggcttttagagtattccaaatggttgggatcacagaagcaggatttggggggatggtaacagacgaagtttcagacatgttaagttttaagttgtaggacatcaaaatagaaattacacaggtgtgtagctaaagatggacaaagggggaaggaggagggagccttaaaaagaagccagagaagcaggtggaaaaatcagaagaaaaatgtaatagaagccaaaggaacagtgtttcaaaaagggaaaatggtcagggataggagtgaaactatccctagattcagcaacaaggttgctggtattaattctcactcctgagcttcagatcattttctccaatgatctactgacctaccagtgagcaacacgggaaaggcccgaggggcacgtttgaaatacattgttttggacaagaaatttgttcatcttctcagtagagcagcctctgaataactgtggggaaacgccaaaaataaattcctttataaaattacttccgagcaaaaaacgggaataaacttacagtctacaaagtttttaaaaaaacaaaagcagttatttcttatttttacataaaaggtcacgaagtggcccaagtctgtacctgtctctagcaacaactaggaatattatttcccggaaacagtattattttatttacatttcttaactttttccaaacttctaatacagtcatatatttgttctagcccttctatttaactgtaaggtttaaaaatatatttctcaaacttttccagtaagaaacttctagtgtaagtgcataaaccgcccttcacgaaactaccaagttcacaaacttgtggtttcgagtatccctgtacactctaaacgttcttagtttgagaaatagtcttggaggacagagattttattcttacttcctacgcagtggtttacaaacagacctcaaaagaaaagtgtttaagataggagcacttcctgccaactggctggaggactttggctcctggggaaggggaatctgctgacgaaagccccacgtgtcgggcattttacagacgggacatcctttaatggcaataggtaggttgttccggccctatttcacaggtgacaggtatttttccattttcaggtgaggtagatgagcgtcaggaaggtaagataacttggtaagaggtcacagagacaattaggggggcgtgtcttagcttcaaagccttgtttcaaaggctaactttccatctcacttgagaaatgggaatctaacgcagaggggaccgggcatcattaactcccaagatgagaggtaacccatacgagaagcaagtgacccagcccctacctcaaagacatttgctcttgatcatgaggccccaatgcctcaggagaagaggcaccggcagcccgcaaaatcccatgacaccagagttcacggcattttgtgactgggatggttagttacctaaatacccggtgataattgtgactgggatcttggcgccgaggccagacttttcctcctcctcgctttgcgtcgtctcaatgggaaccaattcaggacaatcctcctccgcaggatcctcttcctcatccacagatccaacagccggtaacattccggcctacagcacgtccctacctcagctgaaccgctgggaccaacacgccgtaccgcagccgcgcacgcccagcacgccactcccggcctggccggggcctgacgtcatcacatcgcgacgctagctgatcccgcccggattacctgggctctggacgagaactgcctcgtcccttagccacaccccccggggaggtgggctctccccgacgacagctggacacgcccctgggcgtgttctgtgaacctgagcgacgctgcggagagtccttagggcgcactaaccacctgtctgaaggtgtcactggcgcctagagccttaataagctactggctgtaggtagagctgaggccagcctgctggaaatctggagtgggtagcctgacctaaccagttcccacagggcatagattttatcaacttgattttttagtctcgttaaaaaaaaaagttttaattcataggggaaagaatggaaggttataacattacaattttaattgtaatttttatacctgaaggataaccagtgacaattttttctttttttattattacatattatatatgtaattccaaatttttagtattcatgcatcacttttatttacttttttctcattatttatttggacctcaggtaacctaagttcattaatcatatttgctggtgcatgacactctcatcactaatccatagatagcccttctttctaatataaatttatagtgaactcctttgacctcattcctaacataaaagcattaccagtaagctacacgtacctatgtgcaccgcccccgcttccaatccacagcctgccccataagatagtaacaacagtcatgaattggttctggattgctgatcattccctgttttctttttagttttatcacatatcccacgtatgtacttagagaatatgttgtttaattttgggtgtttttgagcttcataaaattatccatataatatataaactcctgaggcttgctatatttttcagcatcactgctgtcttgtattctattgtgtggctacacggcaatttattcatttcctctcaattgttccaggttttgctcttatgaacagggctgctatgaacatttttcctgacatatgtgtgtgcaacttcctcttgagtgtctgtgtaagagttgaattgctgggtcctagattattcaaatgttttacttcacaagaaaatgcacaattatttttcaaaatgtttgtacaaattgatacattttcccagcaaattataagagatctcattggtctgtatgtcaatattatcaggcatgcatttttcaccaatcaattgagtacaaaagaagacttcattgtgatcttcatttgcatttccttgattactaacaaggttgagaatcttttcatgtgttttggcaatatgtaattcttagaatgaccctgtagagtgttatccctctttcaaacatgaggcaccaagagttaagttacttgtccaggttaggtcataaaaatctatctgatgcacaagtagaatgttttactactatcctgatgccaaataaaaggttgacttttccttccttctctgaaattccccataaaatatactgtgtgtattccattagttctactgataagtacatataactttaaagtatttatcacgccttttgcagaacacagttaagacagagggtttatatttgtgcaaatgagtatattatattcacacatacactcggtctgagaaatcaggtcttgaatgttttgccagctttgacaatgtaaccatgaaccagctgaggaagaaataaggcaaataccttaggcgtggtggttcagttcactgtattctgccaaaggagagaagctgtgatgggtagcccaaaatagatagcttacgccctaaacacaatggttcataagctttttcgtttcaggaatgctatgaagtattgatttttttggcaacctaagggaaggagtaacattgcacccacaggcatcacactatttgcttgatgtcccttcagcactgcattactgcctgaatagcagctattacagccctcaccatcttctttgacatatttttaaaagtac

SEQ ID NO: 588230 - DNA, 4001 bp, Homo sapiens
tgcgtgtaaaatacaaagtataatacgtgggaacattcactgtctacaactgtggttctggttgttcattttacaggcggggacatggaggcccacggagtacctggcaggcccacagtccacaggttggaaagaggtgcccaagccctggactttaagcctgggctctgaccttcaacgtttgcttttcacaccacacatcatgtcaataaatagttactggatgcctgttgtgtgccaggccccaagacgggtgttgcgtgactgacaacagaaaaagcatctcagtggcgagggataagctagatcatgggcattagtgtaaatctcccagggttcaaattccagcttctccacttcctggctatgatttttttttttttttagacggagtcttgctctgttgcccaggctgaagtgcagtggcccaatctcagctcactgcaagctctgcctcccaggttcatgccattctcctgcctcagcctcccgagtagctgggaccacaggcgctcgccaccacacccggctaatttttttgtatttttagtagagacggggtttcaccgtgttagccaggatggtctcgatctactgacctcgtgatccgcccgcctcagcctcccaaagtgctgggattacaggtgtgaaccaccgcgcccggccctggctatgatattgctaagtttcctaacctctctaaggttcttttctcttctattaaaagggaaaaataagacctcccaacagaagtgaaactaggcattggcttaacacgtgatggatgggagccacgactatcttcatcatcttatttttaattatctatctgtgcacatggtagtaaatttctcgccctggcccaggtacccaagaccccaattctgtcggagacaaccgcaattaacaacttcttgtgcatcttatcagacagctggcgcgcacacccgcagatacgcccaccctcaggcgtccttctacgcaaagatggatagcacccatcaacgctgttttttctttttttagacggagtctcgctctgtcgcccaggctggagtgcagcggcgcgatctcggctcactgcaagctccacctcccgagttcatgccattctcctgcctcagcctccagagtagctgggactacaggcgcccaccaccacgcccggctgatttttttgtatttttagtagagatgaggtttcaccaagttagccaggatggtctcgatctcctgacctcgtgatccgcccgcctcggcctcccaaagtgctgggattacagacgtgagccaccgcaaccggcccaacgctgtttttactgttgtttccttttttaacctaaggtatcttagaagtcaccctacattagtgcatattaaacattgttcgtcttaatggctgcacagtattccactgtatggattattttttaatttggttgccggtactgttatcagccagggaatttgcgaggacccagcgggatttatggagctgcagagttggagtctggggacccaattccaaccccagatctgtccagaattctgttgtctcgggtatcatctccaccggcgcggtcgtgggagggggatttgggtgcagacaggaccagccccagtgtccgagcgagaatcagcgagcagcacgcgcagttgattcccgcgggcggctcaatcattctgtgcagccactccgttatacttagtagcatcaaactcattaagcactctagcacaaccaagctcggaaccgttagccgaccctcccagcctcggcacctgaccttggggaagtggcgctccgacacagctactcaccctcacctgggccgcttcacccctcgttcccaagtacaccccgtaggttgcagcagtccctgtccctttaagggggccgagcccggctccgctacttccgccccgaagcagcagggcgctagcgcggaggcgagagcgggagaaagcgccgctagaattctcctcataaagatggcgacgccctggccgccgcgttcgcgcccggcggtgacgtcacttccggggcggaggaggctgagtggtgcagtgagggacaaacaaaaggaggcgccggagcagcgctgcggccggcggcgggacggagcggccggggcctggggctgcctgccgggcggccgggcgcggcgagcccaggtgagtggacggggtggggaaaggggcgcgagctgtcacctctcgaaacccacttacacacgccctcggccagctgcccggcccggggcgcccggggcatctggggctctgtctccgggccggccccctggggacctcccgcggtgttcggcctacctctgggctccccagtgcccggagtctccggggcaccaccttctcgccggctccgcggcgcgcgagccccctcccaggcacccctgtgcctccttgtgcttcagaaaccaggagtttccgcctcggctcccccatgtccccttgtcatcccctgggtccccccagatcctcacccctccacacacactctcccgttcctagaggttccacctctgggctctctccttgccatttctttttcaaagatttccttagctgtcttctcctgagttcctggtccccttctcttcccttgcacccctccttcctatcgttccgatgggggcagtgccctgacttgggggcaggatccccggctaggctcttggggcctttctgggatgggatatttgggaagaccggtccggaatctaagaacccagaccctgtcccagtcctgtgcattcaggtgggcccgagggcgaggcgagatccagtgaggtccaggcctggtgcagccctaggtgagctggatacccagcaaactgagctcccaggctgaaggggcatagctggggtcatggagttcatgatgattctgctgctttcgctgactgcttcttccccttgatctggaccggggtgaaccgaggtctgccggttctcagctgttgcgattgttgccttttttgggaaggagggatgggtcgggggttgtctggtagccgcctcctgatggagacttggctggaagggtgggcggttcctgggtgagccacacttccactgactcctcttcccctgccctacctcaggaagccttttgagaatgaggtgtggagggagagcacctggtaagaggaagggaactgggggagcccgaagttcccaaggacctcttccacctcttctgttagtagtactcttaacccctgccaaactgtattctgccctttggagcagacaacctggcagacagacaggctgtaagaagcgggaggagatcggctgttgctgatacttcctgtggaggggatgtgggagtgggagtttgttcagagagactgggcagtgctgattgctcagtctcactggtgttgcttccatgaaggtcaagtcttcctctggctcatgaagtgaggcaaggacagatgacctgtgctggaggaggctgttgtggacatgccagggatgagtgactgggtggctggtctctgcttccttgttttcctggtctcagggctttggcatggggtctgatgccctctgcgttctagggaccatagggtacagagcagggggtgcagggccgggcgtggtggctcacgcctgtaatcccagcacgttgggaggctgaagcgggcagatcacgaggtcaggagttcgagaccagcctggccaacatagtgaaaccttgtctctactaaaaatacaaaaaattagccaggcatggggctgcgcacccgtaatcccagctattcgggaggctgaggcaggagaattgcttgaacccagcaggcagaggttgcagtgagccaagatcgcgccattgcactccagcttgggcaagaagagcaaaattccatctcaaaaaaacaaaaaaaaaaacagagcgggggcacaggaaatgttcatgacttccccccagaacttgactagatgtggtggttctccatcccttaggcacaccc

SEQ ID NO: 588231 - DNA, 4001 bp, Homo sapiens
gggtttttacctcagagaatcacaatcctagtctatctagctcctcacccagcatatgaagcgacgtcctatgtcccacacatggtcagtttgctgaaacacctccaggaatgagcaactccctccggtttgaaaaaagctctggtggctgagtgctgtggctcacacctgtaatcccagcacttcgggaagccaaggtgggtggatcacctgaggtcaggagtttgagaccagcctggccaacacggtgaaaccctgtctctattaaaaatacaaaaattagccgggcgtggtggcaggtgcctgtaatcccagttacttgagaggctgaggcaggagaatcgcttgaacctgggagccagaggttgcagtgagccgagattgcgccgctgcactccagcctgggtgacagagcgagactccatctcgaaaaaaacaaaaactttggttgttagacagttcatgcacaaagccaaaatttgtcctttatgtatcttctttccatagtgcttactggagccttccaaaataatgtctcctcaaggtgacagcccctcaggaatttgaaggcaatggtcacaccctcacccactttcctgagttttttctggtttattaacgtcagtctttacagtcagtgctcattgacggtggttttctctggttgtttcctgaacacgtagtgctcttaaagcaatgccctgaggagaatacaattctccaggggcattctgattggcaggtgaagcacagtgccatgttcccagcactgatttgggaagtggcttgtcacatcccacagtgaactcagtcaactggaatgcctaactctctttcataagacctcctgctacattatgtttctcccagactgtactcaggtccaagaacagaatttactagtctatccttctcaaagttcatcattaaattcagtcattcatcctagcctgtcacatctacctggggtcattattagctatctcttctagtttcatatatctaaactggttccatcggttctattttataatgcaagtacgtaatagggtcacggctaaagacacagccctggaaggtactgtttttcaaaatgtactgtcaacttacatttcagggcctcctcccaaggagaacatgagaccacttcatatctggaactctagaaacactggctgcagcaatcaacctcctgtgccaaggctggccccactcttgtagcatggacactgctagctgggttcaaatcccagctccagcagttgccagcgctgggtgacctcgagcaagtgactactcctcactggattgtaggagaactaaatgtgatagtcattatttacagttcaccacacgctcttcacatccgttacctccctggatcctcaaaataacctcataatattggaaggccaacggactactgtctttattttacagacagggaagctgtgtcttgttcttggtaccctggcacccccatgggagattcgggctcaggggatccccacgcccggcggtcccgcacctgcaggggcacccctacccccggccgccccgtacctgcaaacacttgtacagcacaaaagccgcgacggccgcggtgtacagcgcccccagaggcagcgacccggcccgggtccgctcgcgttgatccttgagcggtggtcgccgccggggttccgtggctccagagccggggtgggctgcgttccctgcggagggaggatacaggcgagtcagccgagctggggcctgggacccgtgcgcagtcccagccctcctccagcagccctagctggtacctgggtgtgcccggaggtcgggattggcgcggtctcctaggaccccggacagcgcagacacaagcagcagccccaccacacccaagagcgaaactgcgcccgccattgccggcccacgggtggagggatcgggcgggcggtgccgaagcggtccggcattggccggccgccccaacgcgcacgcgcacgcgagcaggccggccggctccggggaggccacgcccactccccgtagggcggggccagaccatatttgcataagatagtgtcattctagctttcctgtatttgttcatttcgtgtctattagctattctgctagccacaatgcctctgaaagcctatagtcttagaaagttatgcccgaaaacggtttttttaatctcacgccaccaactttctcaccctaatcataaaacacaatttctttagggctataaaatactactctgtgaagctgaggacgtggttcgtgctgaaggcctgtatcctaggctacacactgaggactctgttcctcccctttccgcctaggggaaagtccccggacctcgggcagagagtgccacgtgcatacgcacgtagacattccccgcttcccactccaaagtccgccaagaagcgtatcccgctgagcggcgtggcgcgggggcgtcatccgtcagctccctctagttacgcaggcagtgcgtgtccgcgcaccaaccacacggggctcattctcagcgcggctgttttttgttcccgagaccacggctcactgcagcctcgacctccccgggctcacgcgatgcctcacctcaggctcccaagtagttgggaccgcaggcgcacgccatcatgcctggctaatttttgtattttttgtagagacggattttcacctgttgcccaggctggtctcgaacgcctggtgtcaagcgatcagtccacctcgccctcccaaagtgctgggattacaggcgtgacaccgcgcccggtcaacgcggctgcttttcatgcgcgggcagctttacgctgttcttggccttgctatgaagtccttgtgctcattactccaaatatggagcattcctgaaacagcctcctcttctacctccctctccctttggcaaacgccatagtagccaccattcactgtgtagctggtacacaacatatggactctgcttgggctagaatcctgcctcctgtactcaagagcggtgaccttgtgaaacttagttctctctccgtgccttcctttccactctgaggaatgaagataagcacttacttcaagagctatgatgattaaatgggatcactcaagttagaaccgtgcctacttattagtgatttttttttttttggaacggcgggtcgctctcttgcccaggctggtcttaaactcctgggatcctcccgcttcagcctcccgggtagttgacattacaggcacgtgccaccccgacggactctagtgattttttaacttgagcagctactactgtaagccagacagttgaaattacactgactctccctgacatgccgctgcattccctttctgcatactgggttctacacgaccttcagttctcagctcaagtgtgttcccatcattcggaacccttaattcaacttctaatttattctttagtgccgctatttcactttcttcaataccactagacaagcagtccccaacctttttggcatcagggaccggtttcgtggaagacaatttttccatggacgaagcggggtggagggatggtttccggatgaaactgttccacttcagatcgtcaagcattagattctcacgaggagcgtgcaacctagatccctcccatgcacagttcacaatatggttcgcgctcctatgagaatctaatgccgtgctcatctgacaggaggcggagctcaggcggtaatgattgctggccccactgcccacatcctgctatgtggcccggagcctaacaggccacaggctggtgctggcctgtggccgggtgttggagacccttgagctaggctggtcctaaattccacaagggcaggagccacctctcttttttctttaccattttactcccagagcctagcacagcacgtggcgcctggcgatagcaggcactcaatgaatcgttgttgaatgaaattaatgaatggttaaaatgacccaaaagggtaatatagttaagctct

SEQ ID NO: 588232 - DNA, 4001 bp, Homo sapiens
tttagatttcggagccactactggtaaaaaatttttctaccttacatctgagtccttcagttggtcatcccaaatgcactcatctttcagtgtgtctgcacagatcagaggaaaaacgagggatgggtggatgaaaaaatagaaattcctattattgagccacttactatatgccagatactgagatcagcattcctgatctcatttaatcccaacatctctatgagattatgcacatttcacagataagaaaactgaggcttggagatgttgaataatttgtgtaaaaatattcagccggaaaatgagaattcaaatccacatctggctaagtccatcctctttcactacgcagtgctgtcttcattagtaaccacacctgtgttggaagtgtttctcagcataggtacataatcaacctttaaaggggaagtttggttcttacatcaaaacaagaccaagaccaagggactgagacaaccaaaacgttttagaatcaaatgagactttagagactaagtccttcctccttatctgacagataaagaacctaacgcctaggaaggttaggtggtttgcctgtggggacgcagctcataaatggctgagccccaagactaacacagaaagctacaaactaagactatgcccttcatctttcctcttagcaggttgcactgcctttgtttcctctgcattttatgaaaaaccatgttcatcttctgctctaccactgttttgttgagagtaggaactaacagttaaataaaataagtgacatgccgggcgcagtggctcacgcctgtaatcccagcactttgggaggccgaggcgggcggatcacgatgtcaggagatcgagaccatcctggctaacacagtgaaaccccgtctccactaaaaatacaaaaaaattagccgggcgtggcggcgtgcgccggttgtcccggctgctggggaggctgagacaggagaatggcgtgaacccgggaggcggagcttgcagtgagccgagatcgcgccactgcactccagcctgggtgacagagcaagactccatctcaaaaaaaaaaaaaagtgacaaaatcgtatgttcttttctccaatattatgaaaaccataaaacatcggtatgtcatgtattcaaaagagctggacaccaactctaataaacaaaataaagacgtatttatctcatttacctaaaatgtatacatgaaatatgtattttcttaggatcaatatcataatggaataaaaaaattcaaaaagtcggctccatttctgcagaaaatttacagcttcgggaaaacgcacagctgactcagattctaagtctctcagagtcctggagggtaggtagaagctgcaggtgacagtctagcacaactcattcccgtttatcaaacatctgtagagtgtctagtgtgtggccggcatttaaaaaggggagagcgggctgaaagacgtggtccctatcctcgaggggcttactgattctcgggaacgaaagcgctccgcagcagtaaccctaagaagctccaaatcccggtcctctgcctcccctctggtccccatccggcgctctggtacagcctcagcgatctctggctaggatgctccacggagatcttcctccaggtgggcggggagacccagcccagggagctggaggcgtgccccaaagcctacgccaacagccccagggccgccccaaactcactcaggggcccctacaaccctctcaacacctccctcccaagtcgtccgcctcgaagcccccacaccgtgcggttacctcaggggtctcgcgtgatccgtgctgcacacccaagaccccaggggccgctccaagtctcacgggtgaaaggaggcccaggcagcccacgggaataagagcaaaaactgttggaacacgacggactccaggacccgggaggagggggacaaacagcaaaggggtacagaaggggaagagcccccgggaggtgaagtttacaactgccacttccggagctgaaaacactccgcttctctcgcagaccttcccagactttcacaggtcagcccaactcaggcccggccccactttttcctcccgcctcccgcagccctcagcttgcagctcctggatacgtactccgagaacgctggctcggattggaagagcccgcccgccaagcagcgcgccttcgctgagggacgaacgggcgcatgcgccgttgctggggagcggcgggctcgcgaccgcacgcgctctcgctccaggagctccgcgtccccgcgcgggggtgcgccctgcccacgcgctgctgtggcttttcagcgtgaggtgtccgcgttcctgtctcagtcgccagagccgagtggaaatgcagatttccagcttctaaccccttttccctgcctgctgaataaaaacctaagaggtcggatcccagatcctgctttttgaaactggttcttctgcccatctttagagccacagcaacggtgggctggtcccggggcctggggagaaattctctgggctcgggttctgcccaactgcctggtttacctctgtctggacagctctctgcctgcacagggcatcctgtcccctcttcccgtccccattgtatcccagctgggagtggtgagcagggtcggaagaatgcattgatgctgcttgcagtgcgtttcattatcaacattacgtaaccaggcacatcgtggaaaacgcctcggagccttagcatgtgtgttccctatctctttcctcgcttctctcacttttctctgacacacacacacacacacacacacacacacacacacacacacacaccgtcctcttattgataatttatactttggttcctcccggtggctgcttcacaatctgctgccgcctaagggagactggaaaaccaactcctcttttgttccttaacttttgaaagcctattcttccagagaacaatgcaaattgacaggatttggtcaaagatttttatcttcaccaccaccacctcctctgcacaaaaaggtgtttaatgcaaaacgagccttctatactaaactgggtccttgttgattgtaatcaacctgaaaccaggtgtaggggccgtcttttctctctcccatgggagagccaacggtcataaatgcaaacacaaattgagattaaaacctccttgattcttgtagcactgaaaccttaattggtttgattttagtcatttacatctaaaacggaggcctgtccctgattctttttactagagccataaagaggacaattgctccagaggaaataaagggaaaaaatagcccactctaaagtttagaaatgaaatggaaaattacaactgactaatgagattagaacttttatgttacaagctttaaaaaatatttttaaattttatttttttctttttcttttttttttttttttttttgaaacagggttgttctctgttgcccaggctagagtacagcggcacaatcacgcctcgctgcagcctagaccttcaggactcaagccatcctcctgcctcagcctcctgagtagctggaactacttaaaatttcatttgtgttggccgggcgcggtggctcacgtctgtaatcccagcactttgggaggccgaggtgggcggatcatgaggtcaggggaccgagaccatcctggctgacacggtgaaaccctgtctctactaaaaatacaaaaaaaattagctgggcgtggtggcgggcgcctgtagtcccagctactcgggaggctgaggcaggagaatggcgtgaacccgggtggtggagcttgcagtgagccgagattgcgtcactgcactccagcctgggcgacagagcgcgactccgtctcaaaaaaaaaaaaaaaaaaattatttgtgttttaacaaagtcacaaaagtgaatattgtatcgcaagaataaatgctatgtactatattgtatgtttttgaaatgaaaaatggatgtgatgtgaagacccgt

SEQ ID NO: 588233 - DNA, 4001 bp, Homo sapiens
tgaggcatggacaacaggacctacctgtggagaacagggttttccatgatccagtcgttggggaggctgtgcatccacttctgctgtcggggagacatcacctccccttcaggagtctccaccttcttcatcatgggtatcctgccactcttcagggtcacagaacgctctgcagcccgcttcctggtggccgccagggagtggaccagctgcacctgaatccagggaggaccaaggatgggggagtggtcagagctgctgacttcctagcactctcaggctgatggtggctgtctagaaagacatccagagagctgcccccaggaaggtacttttcaggaggccttcagccccaggtcatatccctataggagagctctcctcccagtaacagtcactcagccacttcaaagaaggcctctttctaagaaccttaaatgaagatcaagatgaacatctcagccttttttataatcacaagaaattggaaaaacagaactgactaataatagggattggctgagtaaacatggtatgtctgtttgatggaatgttaggcatttgttaaagatgagacccacaaataattttttataacctgaggaaatgcttaggagatgatatatggttaaatatatcacttacatgcattagaaattatagaattatagaaattagaaattagaaattataaccaaaactataccgtatgatctcaaaatttaaaacgcataggaaaaggccctgggggaagtatgccatgagttaagaatggccttagagagagcaggatcatgtgagtgatgtaattgttgttttggcttctttatacttttataatttccagaggttttacagataattatttaaggcttaaattaggaatgcaaatcccttttaaataagcagtacagaacttcaaaggaagaatttgggtctgtgtgtttcttttaagatcttgttttgtctatacagtgctttagagagaacaaggcaatttcaacaacctacactgttgtcaagagggctttactttaatacagttatgggagtcctaggtcaacaagtggggagctgctcagtatggtgaaatacatgggcgcccacgggcatagaaaagggtctgtgagatactgttatgaagaaaaagcagatttcaaaacactagtacagaatgaaacctattttttaaatacaaaaattagtcatgtttttatgcatgggaaaaacagaggtcacccagtggttccatccaggctatttctgagtaatttacatttaaaattttaatttaagttttctaattttcaagaactgacattctaattttgtattggtacgatttaagaacaagcaagaattatttttaaaatcaaagtaatttcaaagcccttgttttattcaatttccagtagggaagccctgggagggagggaagtttggaagaaagcaagggaagggggatggagaaaagcgggacagagggcggctcctacctcagcctggaagatctgctggtaggctttcccattcggaacctgggtcaccttccccactgacgacatcttggccgctggctggatgcccctgccgggaagccgtcgtccaggaaacgcgtctaggctttggtgtctcaattccaattcctgaggttgggaaatcgcccgtcccaaactcaggttcaggtccaggcgggacgacgtctggcctcgaggcggcaccccagggcaggactccccggggaaggactctctgctggggggtaggcggctggggaacgtcgacttagggttttaactttcaacgaaacgatgaaactaacctcagatgagctctgaactcgagcaggaggccggttctccccgccgcgcatggcgcaaatccgaagggactctgggaacgcgaataatacaggattattgcttgtgcttcactctgccatgctcttcggggaaaagttaacggcgctcaaggtgtcggttgggactggaactctaatgcggcgcagaattcgcatccgggaccctaatccaccctccatgggacacagggaggagaattggagggagagagtaacctgattcaggtcacgctaattaggcgcctactgtgtgctgagaagacccaaccagcctctgccatccccctccctagcccgccaagtagactgagcagcccctggccgtccccctgagcccggtagattggagggaggccttgcgtccggcctggccgcgtccccgcctgcagaaagcacctctcaaggcagccagggccggtccagcgacaactgcagctggacgcccatggtctccaaggcaacgcggaggggagggactgccccggccccgcccacgcttttcttcccagggaggggagattgctcttagcaatgggagcgccccacgtggcgtagtgaaactcaactatttctttcaatgccagttcctcctctctacaaggactacaaccccagggctgccaggagcagcactattaaatgttctgaaaggtggtaggatatatgagatgtagcactgagccatcacggtcaacaaagtccatcctaacttatttgccttggttaaaaccaatctctgctgggggacagcatacggtagtgtttgcctgtaagttagaagctgaaagactctggaagaaaccatctctttctcattttaaaagaggttgagagctcaaaattcagggatcaaggcttgcctggccagagatgaaaatgcttgtggttggcactgaacgtggcctcgggtttcccatacatatgagacacccagtgccgccttacagaatccctccctttggcagtgatatgttacaactgctaataaatgctccctatgccaattttctagaatgagtgattgttctgtccagactagaatcagaaattaagaaatggtgagtataaaacccttttattctcattcttcagtcctgggttttattaacaaggtgaagtactgtaacaaagattagattcattttagctggaaaaagaaaacgtgtaggtgactgagggaagggatgaaaacacaataacaaataggtaatgtccaggaattacttgcagtctcatatctctttcccatccaaggaggccctactggctttggccttgaacactagaaactattttccctacccagatgctttctgggttctggttccaggcacatctgtaatttaggggtttctttctttttaaaaattatatggctataaatagcaggcatggacatgtgaagtatgggattttgttttgattaaactccatatttattgtcaaaaattaaaaaaaaatgaaaaacttcaatggagaaagtaaaaataacccataatcccagcactgagaatttacctcccttaacttccaagtttttgagactgtgtttgagtttgcatcaaacgtggaaattcgtgtttgccttttggatggcatttccattctcctcccaacctgataatatcatagcgaaagactaaccagttagagatcatctggttagtccacctcctgtgtttagatacgggcaaaaagccagagatagggaacggaaagaatgacaccagggcctctggatctttttcttgtagctcagcatcatctttgatcttttccctctcactcttaactttgaaaatgtctcttgaccccatccttttccttcctctatcccaggctattgtctgtcttctgcatagtccagacaaagcagagcaatgaggaccaccacaagaggcaaatatttaatgagaagatttaatgcctgtagtgactatgagaggggtgccttaagtaacccattttactgattaagaaactgaaattcagagtcagtgacttggccaagatctccaagataggaagatctaggatatgaatctagaccctgtaattcaagtcttgaaccatctgacctgtgactagccagaaaaaaagttatttaaccaactgattggatgtgcatgttgaagcatag

SEQ ID NO: 588234 - DNA, 4001 bp, Homo sapiens
cagaatgagactctgtctcaaaaaaataaataagctaggcgccggtggctcatgcctgtaatcccagcactttgggaggccgaggcggatggatcacctgaggtcaggagtttgagaccagcctggccaagatgggtaaaccccgtctctactaaaaatacaaaaattagctgggcgtggtggtgggcacctgtaatcccagctactcgggaggctgaggcaggagaatcacttgaacccgggaggtggaggttgcagtgtgctgagattgcaccattgcactccagcctgggtgacagagcgagactgcgtctcaaaataaataaataaataaaaatacaaatacgaaaattagctgagtgtggtggcgtacacctgatgtcccaactaatcaagaggctgagccaggagaatcgctcgaacccgggaggtggaggttgcagtgagccgagatcatgccactgcactcgagcctgcgtgacagagcgagactctgtctccaaacaaacatcccctaaaagtgaagggggcctgcccctccacacctgcgggtatttctcgtcaggtgggatgaagactgagaaaagaaataagacacagaggctgggcatggtggctcacgcctgtaatcccagcactttgggaggctgatgcgggcagatcacgaggtcaggtgatcgagaccatcctggctaacacggtgaaaccgcatctctactaaaaatacaaaaaattagccgggcatggtggtgggtgcctgtagtcccagctacttgggaggctgaggcaggagaatgacgtgaacccaggaggtggagcttgcagtgagccgagatcgcgccactgcactgccgtctgggcaacagagcaagactccatctcataaaaaaaaaaaaaaaagacacaaagtatagagaaagaacagtgggcccaggggactggcacactcagcatgcgaggacctgcaccagccctggtctctgagttccctcagtatttactgatcattatttttactatcttggtgaggggagtgtagcagggcaacaggtggtgagaacgtcagcagggaaacatgtgagcaaaggaatctttatcatgaataagttcaaggaaaggtactatgcccagatgtgcacgtaggccagatttgtttcacgttacacaaacatctcagtgtagcaaagagtaacagagcagtattgctgccagcatatcttgcctctagccacagagcggttttctcctatcttagaatagaacgaatgggaatggtcggctttacactgagacattccattcccagggacgagcaggagacagatgccttcctcttatctcaactgcaaagaggcctccctctttcactactcctcagcacagaccctttactggtgtcgggctgggggatggtaagatctttcctttcccacgaggccatatctcaggctgtctcagtggggggaaaccttggacaattcccaggctttcctgggcagaggtccctgcggctttctgcagtgcactgtgtccctggttaatcaagaatggaggatggggatgacttttaccaagcatactgcctgcaaacacattgttaacaaagcacatcctgcacggccctaaatgcattaatctttgattcaatacagcacatgtttctgtgagcacagagttggggctaaagttacaggttaatagcatctcaaagcagaaacaatttttcttagtacagatcaaaatggagtttcttatgtcttccttttctacatagacagtaacaatctgatctctcttttccccacaaaaagttgtgcacccagaaacccccagacgggaaagggagactggtcacggcggtgcaggctcaccctggagctgagtgatggtcttcagctcctgggtctgctcttccacatctgtctcactgtgcctcctcatggctgctctcaggccccccaagggaccctgtgtacctcaaagcctccctgggctcagcttgctcagagccgccactcagattgtccccagaacctcagcccattatgatgagagccaggattctcagtgcctgggcaaccctggaattgcagggcctcctgcctcactctgcccccagccaccttggggtggcctccagacatgtgtcctaattgaaatgagtctcctggcagctgctcgaggcttaggagctctgccgggcggatgtgctttctttgagggggaggtttgtgatgggtctgcagcaccggcagctcacacctgcactgggttccctccctggcccctcccatgccccaagccatcctccacaaagcagcaggccgagcctcctaaaacgattctgatactattctgatactgccttacgggacctccctctgcaccccccacccccagccccaagtccaaactccatgcactgggtaacctggctcttgggacacccccaccttatctcttctgacttctgtccctgacctctctgtgctgtctggagcccaccctgcttcacccccactttcctttgggaattactgggtcttgggttcatgtgtcactccagaaagggtatgttctccatctctgcaccccctccacccttcccttagaggggagtacctggagcaccaggcagcctggaactctgtggggtatgcacgagatggggtacacacgagatggggtactttttcccagccttgccttagtaggctcaggcggccataacaaggtgccactggccaggtgtggaggctcacgcctgtaatcccagcactttgggaggctgaggtgggtgggtcacctgaggtcaggagttcaagaccagtctggtcaacatggtgaaaccccgtttctactaaaaatacaaaaattagcccagtgtggtggtgggcgcctgtcccagctacttgggaagccgaggcaggagaattgcttgaatccaggaggtggaggttgcagtgagctgagatcgcgtcactgcactccagcctgcgtgacagagtaagactccatctcaaaaaaacaaaaaacaaaaaaacaaaaaaacaaggcgccaccgactgggggatgtgaacagcagcctggaggctgggggctgagatcacgggtcagcagggctggtgtctcctgaggcccctctccttggcttgcagatgctgtcttctctgtgtcctcacgtggccgtccctctgtgtgtctgtgtcctaatttcctcttcttatgaggacaccccaatgacctcattttaccttaatgacctctggaaagcccctgtcttcaaatacagagacatgcagaggtcctgggggacagaaatttggggggacccaagccagcccgacaatggcctttgcccatgtgctgtcacatagatcccttccctttctggtcactgtttttggaaagccagtccaggcaaactccaggttctcccttctctccctcccacccaggcctcaccctcagggtgctgggatgtcctgctaagggtgtggtctgcttacctccccctcgttcttgggggccaggcttggaatctagctgaggcagagcctacctgctgtccttcttcctcagatataaaacacctgaattttagtgggcgcatggctgcccagagcaactctgccttcctgagcatcctggcactggatgtgcctgatgacttcgttcaggccaacagagtgagagcagcagtggcaggcaagctgccctctctcctgcctcttaaatgagataaagacacaatggccgaagctggtgcagccgcctggggccatgaggcagatttgggaacagagaccattacagcagggagcagactgaaaggagcctggtccccgattccctgtcaaccctggaccactcacttggacttttacatgaaagaaaaataaagctcagcccggcgcggtgcccagcggctcacgcctataatcccagcactttgggaggccgaggtgggcagatcacatgaggtcaggagtttgagacca

SEQ ID NO: 588235 - DNA, 4001 bp, Homo sapiens
tctccaccttcagggccaagcatggactggaacactaagaaggaaacaacaggccatcttcctctctttctctcattaaatcgtgaataataatgcatttacttattctcccacttaaaatgtttaaatcctttgaagaatcttgcaaggtagcttggctagacagcaggcaggacagtccagtgcctctggtggaggagccagggtcttccacttgcctgtcttttggtccagcaagaaggcatttggattgatggtgtagtcctttgtctggacatcgctggcagtggtgacacccccacatacaaacaccttgctgtctccaatggagcatatagcatgggacacatccaaggggcagctgttgggcaagacaggcactgaggtggtcgtcttgcttgccttcaccttctgcagattgatttccacactctgccggtggctgtgcacgcagaggatgttgtcctgttggaaagagagcaggggccgatggttgaactcaatggggaaggtgatacactggaccacgtccccagtgctggtgtcaaagcagtccactaccccgacccgggagatataacctttcaccaagcaccgtccagtgacaatgtacagatgcctgtctcctttagtgatcacggcggtgccatccatggggatgctcatctttcctgccaggcaccagacttccttccgctcatcatagcgatagatgttggagacataccgccttggggcaatgctcccgcccactgagtacactgtccccccacaggtcaccatggtgtggaagacaagcccgatgggcaggtcaggcaacttggtccaggagttgtcatccatgtcataccgccaggctgtcttcagccctgaaatctgctcagtggtgccaccagagatgtagatgtagcgaccagcagaggtggcactaagtgctgctgcccgatagggcatgtctgagagcttcatccacaggttctcctggatgatataagcaaacactccatcattgaactggccgtgggccttctggccaccgaggatgaccacggaatcaagcagggcccctttccgctggtagaccagcaggctgcatggccgctcctgcttgcggtccatcaggacactctcaatcagggttgtatgggatgaggtgttctccatgcccaccagcttgttgctggcaaacaccagcgtcttattggagacagcattgagattgatgtaattgaagaacttcttgaaatacttctcccgatcctccttccggaagtacacccaattgatgagtgcgctgagcgcctggtcttcattgagcacgtgaaggttttcatcacggagcaggcggccaaagataacaggtggacagcgcatgaagtgcatggagccctcaggactggcccagtagtggaagttgtcccgaatgccagagtaagctacgtctgatacctctttgagctcaaacagctcagccaagaagaggtagcgcaagcagttggcacggcagatggacttaataaggaagtcgttacagtgaactcgaaggcgtggtgtgttgaaatactgagccccacgaagcagctcctccacattttgctcggagatcaccaccttgccgctatagaagtagtccagaagctggtccactgtgaccgggctcaggtaactggtgtcaatggtgatgaaaagctcatcagcggtcttcatgtcattgctggagatgaggctcctcaccagtggggagacagcagccagcacattgcgatgtgcaaagaagacgtggttgtccacactcagggccatgtcccagtactctttgcgtttcctctgtctgttcaggttctgcagcacgaagctattgtagtttttctccgtgaattccaatttcatggtgcctcttgtcggctgaaacagatcagcagcaggtactggagagcagactttctcaggcctgtgggatcagattgatggttgtttgcagagcggttgaccagggagaagagagggtggaagagaggatgatgtcatagagtggatcaggtcatcacaatgcaggcctccctgaggcctgtctcagaggcactgggccttcctcccctctgatctctccaacctgccaaggccacataccctagcaggacctaaagccctgggcccagagctcaggaggaacctcagggatgggcggcaacttccacctgggactttcaaaccgtagttaaaggcttctggaatatcagagccagtctgggtggggcagtggggagcagtttgtgtaggagagataaggggaggtggggaaagggaagagattattagacctagaagaatcctcccattttgagggaaactgaggcccagagaagagaaggcacttgcccaaaatcacatagccagttggaagccgagcagggcccagaacctggggaacctcgcattcttcctacccttctggaagctcctgactacccagctttccccagtctctgactctcaactctccaagcactcttcctgccaaggctcctgggcatcagagaaaagctctgtcctttggcttctgaccttggtggccacagacatcattctccttcaaaatggagaggtggaggccactccctggagcagggatgaaggagttaaccacaaacgggggcatgggagggtctttaaagaccggatgatttcagctccttggcaaactagaatgttcccccaacatttccaagtgtccagttggaaaatgttgggggcttcagtgggtcagctttctccatcaaaggtggacttgggcgagttgatcagactttctaaacctcagtttcctcctctgtgagatggaactaatatttgatagtagtacccacttcaaagattattatgagtttatttttatttttatttttatttttttgagacagagtctcgctctgtcacccaggttggagtgcagtggtgcgatctcagcttgaaacagcctttgcaaaattatgactgagacagtgaaagagatcaacttaactgactccatcttgcttctaacctccaagctgtccttgctcattccttggcaaaggctgaactaactttgggagaaacctatatgtatagtttacggtttaaacaaagacagccctttcccaaagcagacctccttcttgcctggggactagattgcctttgtaggactaacattagccacaagattagaaattatggtttaggagtcatgtagctggaggctacaagattctaaccctccctaaactgctcctaagaccagtgcttgagatttctctttttttttttttttagacagtttcgctcttcttgcccaggccggagtgcaatggtgcgttctcggctcaccacaacctccaactcccgggttcaagcgtttctcctgcctcagcctcctgagtagctgggattacaggcatgcaccaccacacccggctaattctgtatttttagtagagatggggtttctctatgttggtcaggctggtctcaaactcccgacctcaggtgatccacctgcctcagccttccaaagtgctgggattacaggcgtgagcccccgtgcccggccggtgcttgagatattttgcagaacctgcacttgatggatcagctggcaccactcagatcaataaactggctcatctgatcttgtggcccccagacccaagaactgactcagcccaagaagacagctccaactcccatgatttcatctctgaccaatcagcagcactcctggctcactggcttccccctacccaccaagttatctttaaaaactctgctcccccaatgctccgggagactgatttgagtaataataaaactccaggccgggcgcggtgcctcatgcttgtaatcctagcactttgggatgccaaggtgggcggatcacctgaggtcatggtttcgagaccagcctggccaacatggcaaaaccctgtctctactaaaaatacaaaaattagttgggagtg

SEQ ID NO: 588236 - DNA, 4001 bp, Homo sapiens
attcagggaactgacccaagcttagtgtcgctgaactatggaaagcaatgaggctgatcctgagagcatcaggttgttaagtggaggtgagcaaggagaccccctaggccacagaagagaaaatagatcctgccattccacctcccccttcctattcctgtccacctggctagacagcaaacggacagcagacagatctatgggtgccaggtgcctttttttttttttttaaggctagttaagcagtaggagtggagaaagaacaaagaaatctgtaacaggttgtgatcaattagttgtaaacaccaggcggctttattggtagcattgcaatctgggggtggagcagctttactctgaccacactcaccctctcgctcacactcacactcacacacaccccaggccctgtcctggctggtcaggtctggtgcagaggagctggaagcctggtccttccttctggtcctcggttccccaggttaggtaataattcacaatgcttgactcggactccgggctccctctgcacggtcataggttaactgctgcggcgcttcatctagaggaggaaggagaggaaggatcatgggctggaatcttagacaggagctcagagggaggagacagggccagggagggccaggcttgccttggctgaggtcctctgcagtctctggatgatgcgttctacccagggctggtctgggggtgcacagagctggcggcccctcagtgtggtgaacctggggtgagaggccggagagaatggagccccagaatccagcatgcctggggaccatgtctgggaacctgtttcagggatttccttgaaggggttgggcttggcatggagaaggggaataagaaggtgggagtctcaacaggggctaaaacgggagatgaggctagacaccctccccacaactcacactacagcaggcaccctgcagccatccttgatgagaaggtagtggaagttcctcacgatgtacccagggatgggtttctgggtcacagacaggcagcagtcttcagcatcattggtgccactcagagttggggctgggatggggaaagaaggtgacaggacacagggacccttgagggtggcatggccatggccctagctcggattgaggacacctgtgtgtgtgtgtgtgtgtgtgtgtgtgtgtgtgtgtgtgtgtgtctggtggggtcggggaggagttagacctggtattcagccattatgcaccaatatggctctggctctactggttgctaaatatattgtcatacttctaaactgttttgtaaataaccactgccctgagccccacaaatgacttcctgctgccctgatcaccccaacctctctcccaggacaatccagcaagtaaagagttaatgcaggtcacagtgtgggaggggcgtggggtagggtaggctggtgttaggagccttattaattgctaaaatttttgaatatcagccttggcttagtgtctgccattctccctaccttaagcaaatctccttctgcctgggaaacggaggcagcaggaaatagagcttgcagagacagtcacagccataggccccaggatgtgctaaaagacacacccgcattgggattcaggggcacagggacacccacacttacaggcacacatgcagggacctgccaggctcaccgaaatatacagacctaagcatttgcctgaactcaccatgtcccttacgtccagtgccaagcaatctgagatctagacattacccactgccagccccccactgcctctgaccctgactctcccttcagccttacctggggaagtccagagaaccagcaggctgagggccagtagcagggccatggagggtgaacagaggcaggccaacggtgaatgtgtgagcgccagctgtctgggtgtgtgcaggatctgtgtgaggctgcagggcgactgggatgcaggggtgaaatgcaaggtgtgagtgatgtgaggctgggaatgtgagccctgcagctgactcctatttatggccagagcttcactttctctgcctgaaattccccttcatgtcccattctgtgattcccctgttgcccccctctttctggcagaatcgcaccctgccccccttcttccccctgcggttgccctttccttctgctttccttggctcctgctctgagaacttaagtctgcagtctggcccagtaaagggggctgtgcactgtttctccagagagagggattgccctgtcatcccattgatggcatttgcatcatcaaccatgaagctggggttcagaagtgatggtcaaaggtggggcccacagtgaggaactgtgctcccttccttaggtttatcccttgtcctcactggtgcttctttcttgggctggtggtgaagaaggctccctggcaccctcaggacaaccatgagatcctggggtggcctccaaggtcatcactgtgcctgcccactatgtgggaaccagtccttcccttggggcaagcagagctgaaaggccaggtaccttgggaggaggcccaggacccccatcccacatctcaggcctctggggctcagcaaaccctccccttcctctatttactgttttcctatgtccaacacctgggtcaaaggaacagctggagggagactggcttggaatagcccccttcattttcccccttttctcagtcctgggaaccaagaggggatttctaaggagaggggctggccagctcatattcagacaaatcttaaaatttcaaggaatcggccgatgggggaggggacaagtgacttcccatccttatgagaaaggtcagaagagaaggccttgaaagagaaactaaatgtgaaacgcccagtcacccgtcgtcacccaaaccctagaccctcttttggatggagagagggagggggaacatttccctcttaaatttctgacttagcttctttccattcattaatcataataatagtaatggtatttttgattgtttactatgtgctaggctctatgtcaaggactttaccactattaccttgcttaactttcccaaaacaataccattgatgtagtttttcttattttcacattattattcttattttacacataaggaacatgaggctcagagcacaaagccacacagctagtaagtactggagcatgatttggacccaggtgtgctctagggtttgcagtctttacctccactccacaccgcctgtctgccacttggtcatggcacagcacgggtagtcacggtgcagaggagggagactctgcagacagagcgcctagcttgggattcagattccaccacttactaactgcgacaaggtgaaaattctccagtttctgtgtcttagtgtccttatttgtaaaatgggaatggtagaagatctacttcttaggattaagtgaggaaccctgagtaaagcccttagcttagaggctgacgcacaataagctctgttagccattgttcttcttttgtcctttttttttttttttttttgagacagagtctcactctgtcacccaggctggagtacaatggcacgatcttggctcagagcaacctccacctcctgggctcaagggattctcctgcctcagcctcctgagtagctgggattacaggcacccaccatcatgcccggctaaatttggtatttttagtagaggtgaggtttcaccttgttggctaggctggtttcgaactcctggtttcgaactcctgacttcaaatgatctgcttgcctccgcttcccaaagtgttgggattacaggcgtgagccaccgtgcctggccttctatccttttattcaggtatctgttcattaattcatccatccacccctctttccattgatctatccattcttctgtccatgatggttctggttattctgtttgccccagcctatccattctccactcttcacggccctgctctgctccctggaaggctgacctctgcagatagcat

SEQ ID NO: 588237 - DNA, 4001 bp, Homo sapiens
gaggtagaggagagccatctgaggccttccaggagaggagactgattcacacctgaatcctggggttctgaaaacctgccccaggagacttattccttgacttcaaagggttaaatgggctaaagtagtctggatcccagccaggaaagaaaggaggaaaaaaaaagggaggaggtttttccatctggaaggaggctgagtgagtccaggggcccagataggaatagaaggagagcacaacagccccattaaacaaagaggagaggtcaaggcccgagcttcactgaatagggctgaagcaagtcccctcgggtctttgcctcccaggggctctctcagggctggaactgtgctagggcaggtttcaatataacttgtgtttgtctgtgttatagatgggcccaagccacagcttccctcctagggacccttccaaagaaccacttggagggtctcattgaatagttcccagggaaaagagaggaagcctctgggatatctggggaaaggtctgaaggtcatggaaaagatccgaaggtcacccctggagttagtgcaggacagaatcagggtctcagaggtctgcagagctgttgggggtgtgtgctccatgtccaccacctctccattggcaggatgcctcagaagactgggtcctaccctgtccttcagcctccctttaactgctcaggggtgcaggcacctgagaggcaaggaaactcttggggtagatgagaacatagcatttttcagcctgagctttcggctcagagtgtgtgaccccaccctgtaggaaccttggcatctcggtggacataaacacatgggaacaggtacttgggtgggaagacagaacagctttttattcagttaggtataaatcatatttacaaggaagaggtggggtgtactggggagccgtatcaggtccagggtcctgatgattctccttcaaggggacagtcctgctgcctcctctcatgctccctgggagactctccctcctcggtctctctggacctggcctgctgtgggcagctcagccatgcagggtagagctgggaatgcagatggggtggttaaagcaggagaaagagtgtggcaaggccagcatggggtggctgctccagggcccctgagcatagcctccttcttgcatcttgggttcaggcttcaagcgctggtgaggctggtggggtctccagggctccaggctgctcactgggctatggccctttaggggtctgtgaccgctcagtcctgtgagggcagaagaggggtgtgaggggctgactgaggctcccctttacccacatccctcagattcctcacctcttgcagcctttggagccctttcctttcttgccagtcttggaggcccccctgtccttcctgcagccctgggctggtttctgtggggatggtgtcttgtccagatgctgcatcagctgctgcacccagagctcctttgggtctgcacatagctctgcctgagagcgcttgcggggcaagaacctgcgggtgggggctagtaagccttcttagtcttgcccaccatgccctccccaccccgtcaccagccagtacccacccctttgtgtccactcacaggatagctgggatggagcagcctaagcttggttcctgcttccggtagctgcggacaaccttggcgggaatcttcctttggctgtacttgaggcaacagtcctgagcccctccatcactgcctgcagggtgggattcacagggagccaggggctgctggcaagctcctatccaggcctcttgatccccttagccccatgcaaggcccctccctgccttggtaccttgggtcctggggatgccaaaggccagaaccaggataaggaggctcagagccagtgactgagccatgtctgtggtagagggtgagtaagaggccagagctgagggtgaggtgggcagctgcaagttgggggtctgtgcgtgggctgggattggcctgctatttatgtagctagacactttcacttcccttaacttatccccactccttttccttcctgaaagctggatttgctggcacccagccccacttatctcaaactaagtggacagtcctcagctgccaaattttatgtcctcattagttgaatatgtctgggcctgagccttccttctattcccagctactgctttcatgcaggcctcactgcctctcccctggaacaccatgactgtctcctcactacgctccaggatccatacccttcccctccttccagcaaatctgattattaaattgtaagagttcttttttttttttttttttttgagacagggtctaactctgtcacccaggctggagtgcagtggttgatcttggctcactgaaatctccgcctcctgggctcgagtgatcctcctacctcaacctccccaggagctgggactacaggcaagcaccactgcgcctggctgatttttctattttttttttgtagagacgaggtttcacgatgtctagcccaggctagtcttgagctcctgggctcaaatgatctgcctgcctcagcctcttgaggagctgggaccacaggcacatgccactacgtccggctactgttttcatttttcatttttattttttctagagatgaggtcttgctatgttgcccagtctggtcttgaactcctgggctcaagcgatcctcctgccttggccacccaaagtgctggaattataggtatgagcgactgcacctggtctgtagcataaccattttgattcccctttgctttccttttctatatattttgtagttattttcctaatggataccttggtgattataattaacattctaaactgataacaacctagtttgaataataccaacttagtttcaatggtatataaacattttgctcgtatacattttagtcccttctttatattgttattgtcacagattacatctttatacattgtgttcccattgacatagatttataattattgtttaatgcattttccttttaaattatatagaaaaaagtggggctacaaactaaaaatacaatactagcttttatctttttttttttttttgacacagggtctcgctttgtcacccaggctggagtgcggtggcacaatctcagctcacagcagcctcgacctcctgggctcaagtgatccttccacctcagtctcctgagtagtggggccaccatgcctggctaatttttgtattttttgtagacacgaggtctcactatgttgcccaggctagtctcgaacgcctgacctcaagcaattcacccgccttggcctcccaaagtaatgggattacaagtgtgaaccagcatacctggcaatgttgttacttttttttttttttttttgagacagagtctcactctttcgcccaggctggagtgcagtggcgtgatcttggctcactgcaacctccaccctccgggttcaagccattctcctgcctcagcctcccgagtaactgggattatgggcacctgtcaccacatccagctaatttttctattttttgtagagatggggtttcaccatgttggcctggttggtctcaaactcctgacctcaaatgatccgctcaccttggcctcccaaagtgctgggattacagacatgagccactgcgcccagcctgctatgttgttatgtttatcagagatctttgtttctttgtgtggctgtgagttattattttttgtccttttgtttcattctgaaggtcttcctttagcatttgtttgtttgtttgtttgttttttctttctcccgttagcttttcttgtgggcaggtctactattaatgaacttcctaagttttgtttatctggaaatgtcttatttctccttaattcttgcagcatagttttgctggatatatagaattcttgtttgacttttttttttcttcagtctttaaatatatcccccattgtcttttggcctcccatggtttctgaaa

SEQ ID NO: 588238 - DNA, 4001 bp, Homo sapiens
gctgaacctgtctgattctggaactacctccccatacctccatcccccatgccccacttgattttaactgattcctctcctgaccctttactaataaaccctttggcggagactgagataacccacattgttggagagacagctgcctttctatgccccaggctgaggctgagacggggtgggaaggatggatccccaaagcctgggttcttggcctcagtgattccagtggacaggcgtccaggtgagtaggacatccagaagatttggacttggagatgtttgcccctattttgagtgtccagattaagagctggctgccctagtcattttaaaacatgctgggaatccaagttgggtctcctcattttaatgatgtctaggctgagggctgggcctttcattcttgagtccctgggctcagaagtgggtctctttccctcctctcagggtactgaggaaggaccccaggtggacttcccttcagggtattagtattagtactaatactcttccagggtattagactcagagctggatattcatccttttttttcaaggtgtcttggatcagtgctaggtcccctccttcattcttaatgtgcctgggcccagagctaggtccactcccgtatcttcagtgtgttgaagaggctccctcagagctgggctcctctactcatcttcagagtgttaagcttagaactgagtcacctccctcattctcagggtgtctgggccaagatccggtcttactgtctctcctgatttgcctcctgcttcttctaggagctccaaacctgtagaggacccaggagggcttcggcagattccacctataattctgtcttgctggtgtggatagaaaccaggcaggacagtagatccctatggttggatctcagctggaagttctgtttggagcccatttctgtgagaccctgtatttcaaatttgcagctgaaaggtgcttgtacctctgatttcaccccagagttggagttctgctcaaggaacgtgtgtaatgtgtacatctgtgtccatgtgtgaccatgtgtctgtgaggcagggaacatgtattctctgcatgcatgtatgtaggtgcctggggagtgtgtgtgggtccttggctcttggcctttccccttgcaggggttgtgcaggtgtgaataaagagaataaggaagttcttggagattatactcagaaattattatccaatgctgctttattatttggctattgggggcttcagcccattttccttagcatcccaaaattcagcttgggcagagtcccatggagctttctctcttggtgctcaaaccactgtgacaggctggggttctgggggtggatgcagatgctgcgttgagccaggtgaagcctgggtagagaaaggtccaaagctatgaccatagcttggggatgagattagggtcatccccaatgaccctaattaggggttaggagcaaggaccagatgaaaacctgagttggcaacagaattagcagttagggctggggttgggatcagcattaggggttgggactgaggtcagagtcaggggtatcaggggtgggagctcacacgaaagcctggaggtgacagtccccgtcagcctcctgcagttccacctggatgaccttcctcagtagcttgtctgagagtggctttcggtagagctgagtacagcaggcagtgctgggtggcagtaggaatgctaggggcaacagggccatgtgttcagagggatcctgaccaagaacctctctgccagacagctggaggttaggttggatttcctgggtcttttcaacttcatcccattcacccagacccccagctttctatacccccaagtactcacctgctgtagggtctgggctcaggagcaatgacagcagcaggaggctgcagaaggttgggggccccttcatgttgctcagcctagactcttccttctctctctctcctcctcccctaccttttatctgggtgccttttacctggggcactaggtgagtcagaggcagttggagatgtactgtgtaacctgtgacactcctgggccctaattctcggcctgttgccacagactccttcctcatctaggatagccatttcccatgtgctcctaagctctgggcagtgaagctgggggaaggattagtgtgtgatgtagggactgatggaacagtgagtaagggcagtcaagcatccacagcagcatctaatgatagacattcacactcaaatacgcatagccacacattcaaagtcactcctcaatcacttggtcaacctcacaaagtcatactcatgatcagacaaccgtagacaaaattatatagccccggttatactcaaagtccctctcccacccaattgtgttttcacagtcatccaatcacaagcaaattcacactagcacacacagattctgacaggggagttgtgggtggggtgggagcagagggcaggcaagcaccaacttgccttcaccttctcctccccacttcctggcttggcctgcctgtcttatcagaagaaatggatgggaatgggtccctagagcaggcccttctggctgaggagggttcttggctgaggccagccccattcagagaagctgggggaaggccctttatggtaatattaagggtgttttggagatgctgaggtggggcagctttccccaggatgatgagacagggaggaaaggtggggtagataaggagggaagataaaagctctttggtgctaggttactgttgtcaaaacaggtaaaaggcccagtgaatcttaccttcctgtttttgtctagtcctgttccaggaatgccaacctcttgccagcaggggcctagggtctccagatccagtccctgacttgttgaagacattggactcaagcactcaattacatctttgttttactcaaattccagcctccttcctgggcctggaggaacatcccctctccctacccgggttcagtcacaccctcatgtccaactgctataccccctgcatcccaccctccagctatagccgcttctctcctaatcccatacccagctgtcactccgttctttaccccctccctgcaatgcaaagctcctattcatctttatccagtcctttccaggaagctgggagctgcctagggtgggggtatgctgccaagttcagtgcccctggctcctttaagaatttcccactcctggtccagggatctcaatctgcaagtcctgctctatatttgaaacataaaccaagtcataacacagtaatccagcccttatcttgttgcagtcgtctgctgtagggtcagccactctctatggagtaggctttctcttgggatagggcttaggcctttctcttgtgtcccaaggcttgttgggtgtagccactgaggaaatcccaaggaaatctcccaggttcctcgggcttgtcatagaccttcttcatcacttggctgtgcgctacatactttctggtcttccctgggcttgtcggtccagaagtcttcggaaggcagaaaacaaatgcttttgggtgtgcacccatctctcccctttaagaccaagtcttctccccagccacaatctgctgtagctttggccccagccagaaactgggccatctctttctttaacttaatcttgtggtgccctttctggtgctgggtccagtccctaactgaaggcaggcccacatagcagtccctgattctcaccacttgaggagttagtgggtcccaggctgattgggtgacagaagggggcggcaaagagcagtggcccttggactctcctagggagggagcaagaacttctaggtaggctgatgccaaggatctctaaacttgggatcagactggaggagccaaaagttggggtatgaactgtaggaaaggtcgccaacccaagtcgctcctctgtggcaggcagcttctaggaatctccccctcttaccatttacagcctgcatcc

SEQ ID NO: 588239 - DNA, 4001 bp, Homo sapiens
ccatatccgaatggagacatttaaagagcaatgaaatgtaaactggggaagaagtgatggctcattcaggttggggaagtgggtttgtccctgggggaagcccagtataacactatggaactaatactacttctctatcttccaagggtaggatgggtaggaggatgagatagagaaaaagttaagcagccaggagcagtggctcatgcctgtaatcccagcactttgggaggccgaggcaggcggatcacctgaggtcaggagttcgagatcagcctggccaatatggtgaaaccccatttctactaaaaatacaaaaattagctgggcgtggtggcaggtgcctgtagtcccagctactcgggaggctgaggcaggagaatcacttgaacccgggaggcagtgagctgagattgcaccactgcactccagcatgggcaacagagtgagactctgtctcaaaaaaaaaaaaaaaaagacaaaaaaaaccggttaaacttcctttctcaaaagtaggagcaagaggcctgcatggtggctcccgccagtaatcccaggacttctggagcctgaggagggaggatcgcctgaggctaggagttcgagaacagcctgggcaacataacaagagccccatctctacaaaaacaaaaaaaaaattcttaagtaggatcaaagattaagacagttgatttattaaacctctactaagtgaccaaactttattaaactccatgaaaccccatgcccaacctccttctcagtcacactgagacactcttgtacattttccacatggggtttcaattccccacagtatttctgtgacttccttgaagaccacactctaactgctgtcatgtggcctctgcctacctacttttactgagaaaggctaagtttttcttcagagtatcatagttctccttaaatactgttgacgactgtcattgtcaactgatacatcctttctggaaagcattttcagttttcttcaaaaggcctttaaaatattcaggctctttgactaagtagttacacttctaagtttacttgaaggaaacaatcagcaatattccagagatatatatgcaatgagttcagtgaatggctaagacagaaccactgtaaataacctttatacccaacagtgaggaattaatttcatttagttacccaatctaatcgaatgcagcaatgaaaacattttttagaaggttatttaattcatagaaaagcatccacagtaaatttttttcaagtattaaaaaaagaggtagaacaatggtacttttactccttgtgttataagacaaacccagactgaactttgacataggccaaggtcaatgtgtctaagaaatgttttattatactatttttattcttaggctcctccattcctcttttaggactcctttgggttctcagaatggacagagcaaataaattccgttcagggatcctggacctgcttagcgcaggaagagacttacttagatgctgcagctgggataacttacacaagtcatgttactagcaagcagctggcggtggacttggacccgtgtccagacctccagcctagcatcagagctatattctgaacacacagtcgcataagaatgactacctatcctatactacctatcttatttatttttagaggtataaattatttttagagcaaaactgaatcgcgcctggaggaaggccagatgcattgcctgttcttattaaccccaacaggtaattggctctactgccccctagaccatcgcgttccctttcccttctcctctctccatcccaaagaaagggtgtagagaccctccgtcctaaagtgcccagcgagctagccagagatactgggccgtgggcacccgcggaggaacaacgctccctacctgcaggcggacagaagcgcggctggtgcggagcctcgggaagctgcgcagaactggggccgcgcgggacgcgccagctgctcagcgttgcgccaggcccggaggcggggtcccgcccacctctgcccaaggcagcaaatccagtttgccgggcgttggactttcctgaccttcggtgaaatcggcggaagctttcagtttaggtatctagtgttggtgtcctaggaataaagctgtgtatagaaatgaaacagaaagtgaaacatgtcagtccagttttcttgtaaatgagattttcaccgggaagagtttcgaagattaaagcaaatccacatttagtatgttattaataaaaaaagaaatttacaacaagccaacatctgaacgcaccttgattttaccttcagaggggtaagagcttaaggttaccccttaacctttatcagaaaggcgtccccctttctgataaaagcctcttcaaggtgactgaacatcttgacataacttgatataactctacaacatataaaaagtcagcagcagacccatatggctttggtttttattctagaaagtaggtgtgtgtgtgtgtgtatgggtgtataataggaaatatatttttaaatcgtggattctgtgacttcctcaaagttcctcgacataatgaaacttcatttgctttgtcattaaaagaacttcccatcccgagctacatcttttaagaatgctcagggtccctgatattctgccaccctaaggattaaggctgcggaagcctattctaggtgagggttaagaaagcccttttgaaagctttgggttagtgaatgggcccaagatgacagacgatggtgtcataatttacttaagtattatcccgcgctgaacttctaggtgctctcttttctcgaactccttgacctcaagtgatccgccaaagtgctgatattacaggcttgagccaccgtgcctgtgtgctcccttttcttttttttctctttttctaaattgagaaattggactcttcgttgtttgcctttccttcttattcatttcaactgcagttcaaaatactgcataatgaatgaatattgagatagcccttgcattggttatgacatttgcttccaaaataagaattttcacattctgattgtatcacagatttttatttttatctgggaaattattgaggctgacactgccttgatttggcaggagcatggagttctctttggccccaataaaattgcaatagggtttgggcccagctcagatgttccttctttcaaatcacttttgaggtcacatagtagaatagagcaattttggtgactgtaagtttgggtgacttcccaaagttcccgaagttgggtgacttcccaactttggtgactgtgacctctaggaaaatatagacattatgtggcaatacagtttacaggtactgcatatatatagtctgtgtatgacacacacatgtacaacaagtttcatgaaaaaatacttagatctactatctgcaatgccctctgatattttcatttaatgttttatttttctaaaaatggtcaagacccagggcataaactttatgatctgctagttcatcatgactcttgaggtctgcaaaaaacaaaacaaaaaaaaacaactggcttcagagccatctaccactaactagctgagttaacttgggcaaataatttaccaagtagccaggattaaatcatatcctcctagatggcctggatgatctatgaataattttttaaactggggatgggtattttgtttttgttttatgaaagcagtgttcagggtctacctaaatgatcaatgaggcaaacggaatttgcctttctctaaagttgctgatgggaattgagggtatttgctcagcttgctgctcagtgatttgcgtattagtaatgtgaggattcgtgtttttgttcatctttcccacctgtttctacccttcagccattcattttcccatacaattgatcaactacccggagattgaaaaacaggctgtgtttagaaaaagagaaattttattacctcagaaaaatatgtaaagcaaaacagatg

SEQ ID NO: 588240 - DNA, 4001 bp, Homo sapiens
tggattaggtgaggacaattcaggaagacaacagccctggctggaaaccaaacccaaagctaaggaggtggtggtagtgactatgatccctgctgaggaagatcagctttggggcgagagtcgggacgaaagtcgttcggtgtaagtgggaagtagggacagccttactcacagcgcactcccaggcagatggcggtcactcctaacagcaggcaggtgaggagcaggccgagcaggaggtatcgcaggcaggttgtgcggccttagggggacagtgggatggatgagggcagtcagcccccgtaaagaatgtagagaggaagggacaggtccgtgggggagacccctggggaaggcatccctaagaggagggcggtgcagagctgagggggcaagcatggtggtttctgtcgggtagcggggtgtttcgcaggtaggggagagggtgttccagaatcagtgctggtggggactcgggggcgttacctgggagaaggggaaggaaatatcagacggagagaggggaaggggggcaggtaggtgaattgggaccatccgcaggggggcggtgcacgtcggattcaggcgcaccggatgaaggtgaatgtggcacggcagcccgggcgtcggaaggactgcgcccgggtttatcccggaaggagctgcaccccgcggggcccagcgccatccgcagccgggacaggcgcgagcacttggccccgcggctgccccgcacaggcacactcacaggggagaatccgcccgacagctggtgacgtcacggctctccaggacgcagttggctgctccgacttgaccgctgtcgaggggagcatccagtgtgagaccggaagccccgagtgttgccccttctcctcctgcgcacccgcttcgccctcgccactgggaaactccagtctgccctacgttgcctgctagagctgctctgggacacagtgtcactctcctgagttcctcctctgcccgggactctctcggcttcctcctgggtctcactgtatcttttcccgggaccccctcatctctcctagttctccctttatcgtttcctcagaggccccttatctgtcggctccaaaccctctccccctttgctctcatccatctcccatcacctcttttccctcccatggctccccgtttcccattagaactcatcccccacagggctgccctatccctccgcagcccttatctccccgaaaggggtctccaccttgcgggaggaatctttcttcctcccctggctcccatttatcctgttcctattcttctgtttcctaagaaccgccctcctcctttccccagggtattgtgctctcaagaatactgagggccatggcatgggggcgcacgcctgcaatcccaacactttgggaggccagggcaggaggatcacttgagcccaggaggtcgaggctgcagtgagccatgatcacaccactgcactccagcctgagtgacagaacaagaccctgtctcaagaacaacaacaaaaacattgtggactccccagctcaagacacagccccccaacaaacacacatcccccaggctctccagacctgctttgtcccctagtacagaagaagccaagcttgagggcacccctaggactgcgggcacttgaacattctcgtaggtgatttccccatcatcatcagcccctgggtctagagagaagagaaaagggaccaaggtgggatttgggaatgggatctgtggggcgggaagtggggatgcaggatcaaggggaggcctcatcccccttaccctgtcctaaccggctggagatgctcttcttcaggggagccttcacaaacctcagatctgcataggtgatggcctcagccatggtcctgagcagctctgcccccactcgtcttccctgtcatccactgtcctcccttgcccctctcgtctctgtccgtttacaactaggctctgtgttccctctgtgactgcacggcttagcaattggccctgtgacttccagtcacaaaagaggaaggtgttagcaagtctcaaacagatgggctcaatgaagcagaaggcatccctgggccagggccagaggggccacggaggggacgctgaggtccagaacacaggggtaggggatgggcctgtccccatgtcctccctgtgcttcctctccatgcatcttaaacccatatgggccatgctgggccccaaactcggtccttctggttatctgccctgatctgccccaccctcctcctggctgccttgtccactggggcttatgatgtgtagctggagctgcactgacccagacgatctccccagctccagggtgaggctccgttctccccatgagactgggggttcctggtttgcatccctcgcttctcatcatcctgggggttccagtaactgggggttcaggaacaggcctgggccagaggtgaaggtaaggaagagccatggctgcagcacctctggaaaggcaagtggcagcactgccccccatgcaccctcatggggagccagggagcaggtgagcaagggagttgcagagggcttaagaaggctgcagcttcctaggtgaagtcaaggcagaggagcagaacagagccagaggccgagcgcagattccggaccagcggaggtcttgacattttcttggtttggttttggttcgtctcttactttcctagcaaagttctttctttaaaaagtcccaaagctgtcccttcccacccagccccaaggaaaaagggggcatttgtggcggaggacccagggaccgcgaggccctcataggtggtgggggcctggctgatggaggagagagggaaccagttgggggaaagggggctgctgagcaggggtgcccaaaggtgctccctaatgttcttttaccgggatgtgacccctactaggaaccccaaaatggcctacatccgggataggaaggagctagaacaagatgtagtgtgggggtgggaagaacccgcccctagcaaagtgacatccgccccgcagaatccccctcctgcagctgtggggaggaaaaaggaagggggaaaaggtcctcaccacatgccaacagctcggatgattggtggtgtgtggcaggacactgccagggaccctagagctctgccaatagctccgcccagccagccctagaggaagtggccactgaggcaaagctgtgacctcaaaaatgtacttgtagagaggcacgtgtgcatgtgtgtgcatggatatgcatgttcccaggactttgcagtctgttagggcatctgtgaggtgagcggctatgtcagagcctgcctggaggaggaagccttctgtgggctgaaggctgcctgtgatcactgttattttccatggcagagaatgacgggtcattttcagaaaagtcgtcaaaggtcatcacaagagatcctacaagtatttcctttttgaagctcactgtttcctaaggtgcctctgcagctgttaactgtccttgcttgattaaagtttccaacaacctagaccttcccccagatacagagagtggtatgtggtggtgactccctggggacctcaggggccctgagagtgagtgggagggtatagagcagctggtggcaggggtgggtggggtgggaagagtcaaatacttgaacctgtggtgtacagggggtgggtgtgggcagtgtgtgagtaaatcaattgcaggaacatttgcaggagttccacaaactgtagaatgtcccagttttcagatccaatacacaggtgaacatgatgtagatgccaggtaaaatgccaaaaccaagcttctagtctgcactcaaaaaggtgtctgtggccaacatagtgaaaccccgtctctactacaaaatacaaaaaaattagcctggtgtggtggctcgaacctgtagtcccagctactcaggaggctgaggcaggagaatcgcttgaacccaggaggtggaggttgcagtgagccaagatcacac

SEQ ID NO: 588241 - DNA, 4001 bp, Homo sapiens
ctacaagatcaaattaagataagcaagcatataccaaattgttatgggccaatacaacttaaaggtactgttttactggtggaagactattctggtaaataatgcctacttaaaaatgccacaagtgctataatgcctacatgtaacctcaatgaacatgaacataccttctaaattaaaaaagctgtttttccacacatatttccaagggcaaaaccacaatatcttacttagtacacatttatatctcattgtagtgtaaatattagactagcaaatctaaatgtttaaatttagggaggtttttttttttttgctctaaaggtttattttattactacaggtgaaaaacaagcatcctgtaattagcaatcaatagatttataattttcccaggccatcccatttataaccatacctttagattcttcaaaaacaaaaagttaaaatcttttaaagagcaatacttacttctcatattcaagttcattatctatgctgaaataatgtacatttgatgcactctttggtctgctgtagagaatggcaaaacaaaggcgatctgaaatggaaaaattgcaatgttccttcctggaggttacaaaaaacgtttcatatatcatgacacaactcttttcagatgaagtcaatttttcatttttttcatgcacgtttcagatggtaggagtggtaatgggtaattacaaaatattctggctatttgggtgggaataatcaatgagcacatttttaaaagagaaactgcctttaaccgtaagtttcaaaagtggtgatttttcatgtagtgatatgacttctaaacaaacctatttttgtaaaagtttagctcccctggatcaagacatttcagcaaattgcagcatgcatgtgatggctagcatcaaccttgtaagtttctagatgaatttcactacgtttttcaagacatcctaaaaagtcatttcagtaagaaactatttttttcttaaagggaaagaatgctttcaaaattgcttcaaaattaccgcttacagctatagaacaaaccatatgtttctccaactgttcttagggatcactactttctaacttggaatcactacttcggtatttttacaattagacaaattaccattaaaacagaagcaatgaggtttctgcatgatgggtctgagatgaacttgtgttgcataaatgcagttaggctgctgtgaggttagcaagaatggtaatgagtagtaaggctcaggaggctccacccgcattccttgcctaaaaatcctcgggtgaaataaagtcatccacaatatctaatagtaatactagtggtgctaagaaaatacttacactcacaacgtggcaaaatcaagcacagcctttaaaatatatatactttcagcagagccagctggcaccctttccccaaatggtaaactattttttttttttttttgatctgcaattcaactcatgcaattactgcgtttatttccttgtaaactcctcagctaaaacttcttgcaaccacaaacactcaaatgggtgacagggcttaatcctttccaaccacaaggacctttgatccctgtgacagagcccaaggatctcgctcccgcgggcggggaggtgcagctcacctactaggctcaggtgcaggcacgcaagggtcacagccgcccatgagcgctgtagcccagagcctggggacaagtgccgaggccacccacacgcaggagacaagggcggccggggcccagactaggggcacctccaagccagcactgcccgccctgtcccagcgcgggtgccggagcccccaggggaagcccccgccctcccggctcacctttgatcacctcggctaccaaagctgcccccgcgccctcccggctcatgactccaaagcatctggaaggcggggcagaggcaaggactgccagccgccgagaggggaggcgccgcgaccacacccccgaagtttaaaaaacaaagtttaaagggccgcgcggggcagcgggcgcagcgacacccctcggcggcccaacggcctgacacgacagcgcaaccccggaagtccccaagtcctggaaaaagccccgcgcgcgacgaggccgtggggacggacagcaccccgccccacctcccgctttctttccccccgcctggccgcccgccttccttccccagctgggaacgcggggcggcctgtgccaaccagggctcctccagtgcccaaacgctccgcagaggggacatgcgtcagaggccagcgggcctgcagagggaagagtctgggaaagctccttagcgattaaaggacttcgagcaaaagggctctgccccaggccagggacagacccgagggtgatggcagccggggcaggggcctcctggcgcctcccccgccgcactcctgctgccaggaggtgctgcagccgcgccaggcccgggcccctgcagtgcgccctcccggagcagggcccagccccttagctctgccaagacccgccaagtgcccccgcagggccgggtcttatgggaaacgggcatcttcaaaatcgtgcaagatttcctgagatcagctgcctcagagaaaacgcttttaattgtgcaagatttaaaggcaaccctctggtcatgcattcctttaaagggacggtttgggatggtttaaaaacaaaaatgttgacaccctttttaaacaaccatttaaaattattgtagagatagagagtagaaggatggttatcggaggctgggaaaggtagtgtgggggtaatgggcacaaaaaaatagtacaaataaataagacttattatttcacagcacaatagggtgtgggtgactacagtccacaatagcttaattgtacatttaaaaataactaaaagagtacaaccggagtgtctgtaacataaaggataaatgcttaaggggatggataccccattctccatgatgtgattattgtgcattgcctgcctgtatcaaaacatctcacgtaccccataaatatatatacctacttgtacccataaaaacattaaataaattaaaatatattctaaacctatgtttgtattttaatctcaagtgaaaaaaattgaaatcccagcataagcatgatctcagttgttatagataagaaggtgctgggattggggttcattttcattccctcctgtattttcccaagttttctatagaaaagtgttactttatacatacttttgcctcaaaagtaaacctgcatacctcctaatcttattctacaattccagatggatcaaagactttttaaaatacattttttaaaccatgaattcttttttatactctccaactggggaagaccttgctaaatgatacaaaatctaaaagccataaacacatttttaagtagttttcatggcaaaagatacataaacgaaatcaagagataaactggaaaaatatgttaaattcattgagaagatacctaacctcaatttgttatcacaaaagtaacagaaatgcaaagttccactatgaggtactattttttcctcagactggcaaaactcaagagagttggataaggtgctgcagtgtgtcgggaggttgagagcactcacatccgtcacctgtgggtgggaatataaactgggccacctccatggagccaacaaatgggaagtttgggagaaatgtttaagactgaaaactgaaaactagacagacgtggcggctcatgcctgtaatcacagcattttgggaggccgaggaggatggatcatctgaggtcaggagttcgagactagcctggccaacatggtgaaaccctgactctactaaaaatacaaaaagttagccagtcgtggtggtgcatgcctgtaatcccagctacttgggaggctgagacaggagaatcgtttgaacccgggaggtggaggttgcagtgagccaagatcacgcctttgcactccagcctgggcaacaagtatgaaattccatctcaaaag

SEQ ID NO: 588242 - DNA, 4001 bp, Homo sapiens
cagatcctttcaagaggtataaacaataacgggcagaaactatgtataggcccacccgttcccagccccatccgtcctcggcgaggccctctcctgggaagggcacaacgttagcgggacttggcttctcagtctcagcaggcttcacctcccgcacaccccccgcagctaccggccggggactggtactcagggcaaccccttcctatgcccgctctggttcccaagggccatccaccaaagccgagaaacccgctctgctctcagcttcatttcaaaacgaacttagtttccagattgtccatgaacctagaatattatttctcctaaacgtctgtgtttgtctaaacacttccacttaatgttctcgccactccagcttacctggtttatcaaaggctaggggctggaaacagtttttaataacgccacgcaccgaggttgacacattccccgccactgaaaacagactgccaattccctcaaaatcgtggacagctctgctgtttacacagcgttgccacatacatcatcacatttaatgccttcacacgcgtcactgtcaatcccagcaaacctaacagctgccaaattggatttatgagtctccaagaacagtcgaatcagcactaacagaacagctatcgaagggctgcttggctacctgctctggctggctgggatttctcaaaagtgacaacccggacattcgtcttgccggctggctcgaatgccaccaacgtgacaccttccttctcgaggccccggcggggagcggaccccgggaggcggaggcgttcggggggcgcgctagggggcagggcgcgggaggcccaggagaggggctcgggcttacgcgccggacgggcaacgcggcgcccagggtcccaaggctacggagcagcgggggtttggccaacgccaaaaaggggcagctcccgtgccaggcgcgttcagcgcgctcggggaatcctcaggggctgattcagaggttgtgactcgcgcgagggccaaccgggctcgcaatccctgaaggcggaatccacaggaactcagaagcagcccgcggggaggagctgcaggttcgaggcgccgggctgacgcccgcaacttagaaaggtgaccctcggtccatcttgctggtggaggagggtgcacaagctaaagttaaagctcgcagcccacgcagctagaaactcggggcggggggcgctcctcaggagccaggctcctaaagggggtgtggcggccggggcgtttaagggggtgggggcgaaggcatttcggcccggccccggaggccccgggcagcccggtgggaggtgggccagggccccgcgccgggtgcggccgtccggggccctccgcgcgcccactggccggctcaccggtgatgtccaggtacacgtcgtcctgggggtcccggcggcgcgggtcttgctgcgtggagctgcggatcttcttcacacccggcgaggtcgacgagcagcgccgcgagcaggggggcgcggcggcccagctcgaccgccgctcgcttttccgcttcatggaggcggccgcggcccgtcagggggccacgaccatggccccgcgcgcccgcgcgcccgccgaggctcccgccagccccgcgcgggcgctcggggcggcgggcgcagagcggcgctgcggggacggcgggcgccggcagagcccggcgggaggcggtcgcgcaggagccggaggaggagcccggcccacagcgcctgccccgctgcctcccgcggccgccgcaggaccggcgccgcagccctcgctacagcgcctcctgccgcggccggcgcccccagcccgcccccaggtgcccgcagccggctggcgcggccgaggcgacggggctgcagctggcggccggagctgcccggggtaaccgtgcgtgcccaccgcggccgcggccgctgctgcgtaggcgccggggcacagcaggacgcggctcgtggggaccccaggagggctgttccgtggcgcttcattcacaaaaaagggcccacaaccctcctcggggcccgcagactgaggcctttcattggccaatgcggcgtgacgtcacggagacggggcctttctacaggcaggtactcggtgacgccataaagaaaactctgagggcttccgccaatcagagataaagtgtgctagcgaccttcgccagccccccaacttttgtttcttctgtgtcctccaggtgccagcaccccagatcccaactttctttagtgagtcaccaaacatttacacagccccaccctagtaacttaactccaggtctttggcatatatatatcttaaagtatttcttgaatttccttgtaattcgcgccaagagaaagggacttttgccatggctgccagcttggaagaggatggcctgattacattacctgcagctatatagatttaaagtagagttgatttcagaacttaagtaaaactatttaaacaactacgctctatttatcgacctatgcccagcattcaaacaggccaagcaagggcttcttaaggacccgatgaaacttccgtggaaccacaatataccgtggttgtttgcacctcagagtttctcatctcggaatccagcgcccacattaattcagtaagtttatacactcattgctgtgtatactgaggtgtcgacaggtccgattatatcatgaagtattgaagcaaggggcaagttttgtccttaaacttctttatctggcacactgtagggtcatatcctcttctttttctactggattaaaataatgccctatcttcctggaacttaaccaaaaactgtcattttggagggcctttaaacaaacgtccatggtagcatctaaaagggtgagaagattggagggcagtgttaagatttcacggccccaaattttacaacatctgcaagctgtccctatttttcaccagcacttgaacgttttatcctgcagttccgcagttaactgccagcctggggaaaagaaagatgaatttgagtcagtccccttggaagcctctcagaaatgcaaattttcatagagcacctcaggaaggggctctttgacttctattgttgtgggcttttaccttaagcacggctaaataaggaagtaggggggctgtgtctgaagctagagatcagcaactctgtaagcactttttcttaaggttggttctcctgttcactcttcctctgtttcccctaaggaaatcagtgaaggccttaaatttaaaatgatctacatgtctgtctgtaggggcagcaaagaagctagagacgtgggaggctgtgcggcgctgcgcaagtaagttttagagagcagaaacggtagggtcacagtcctttgttttgacctggaggaggaggaggagacctttcagaccggcctaggggctcagcattggaaagccacccagtttcccagactaccagggattttaaatgagtgggtcttgttttgaatagatattacaggagagtggtccgtgtggctccctggaagtacagagaaactacctccatgacattatgatcttttgagagtaatttgtttaaatgtcaggaggcagaggttgcagtgagccgagatcgtgccattgcactccagcctgggtgacagagctagactccgtctcagaaaaaaaaaaaaaaaagtgtcataaatacagataattataccatttaaatattttcatactttgcaagtatataattttatgctttgtatagtaggaacagacaaagtataggactacactttgtaattacgcgaaagtatcttcccttcttgtgaataggaagtctgtgtgctgagtatacacattaaagttttaaaccctatttatattttgtttttaggtcatgtttagatagaggcagaaaagtgctgtttcctagctgatacttgttttgtgtgtgtggcactgctcttgaactgtttgactcctccccctctttgataagttgactcctgggctct

SEQ ID NO: 588243 - DNA, 4001 bp, Homo sapiens
tcttagttgacttctgaaggtcaggcagagagaagaatgcacaaggaggctcaagtacagctttggtaacgtagcaagaccctgtctctacaaaaaagtaaaaaaaatagctgggctggtagtgtgtacctgtagtcctagctactcaggaggctgaggtggaaggatcacttgagcccaggagtttcaggttgccaccgtgagccatgacctcaccatgagaccccaactcaaaaaaaaaaaaaaaaaaaaaaaaaggctcaagagagcattccacagcctgaaatcccaaggtaatactatgttaacaaaaaccattttgttttgttttgtttttgagaaaacacaaccccccaactgagtttaatatctgttgatggcatcatttgtatattctccacagcatcccctagagtgtatctataaaaacagtcagtaaatgtttgttgactagaaggtgagatcattcttgagcaccgtgctgtttttccattcccattctttacattcttattttaacacaaaaaccctgtgaagttgacaaaatgattcctatttcacacataaagaagtcatcgaagcaagctgttcagtttggttaataattttagcctcctataaaaattataaaggtcaacatgataagcattaagtgaaaatgatggaagtgaaaactccttgaaagtatgtacagatacaaattattacacgtatctaggatgaaactaaggactgtgaagtatacaaaggaagaaatagttccttctcccatgaagcttaggatactacaggtgatattatcaacacaaaacactggcacattacatttcaaattcctttgtactaaatcaggcattatcttctaccagattccaatgcagacaaatggtagagaaagccaaagttccaaagagggaaagagagggatagggatacctaaaagggggaaaaaaaaatctatacattttaccttttctgcaaactgcaaaaaactggccactagggagcagtatagattaacagttaaaagtgctggctgtagaggttaaagggcacaggttttaatcccactacaccaccgatcctgaacaattcgtttcatttctcactagaccttagttccctcatctgtatcctactctgctgttgtaggaagtcaataacgtaatacagagtaagctcttggaatattatttggcatttaataaatgttcaataaataacatctattattgctgtaattgttctagggggttgcatgaggatctggccagctagggaaacgtcaatattttgaggatctcccaccgcccatgtggggataaaaaccttatcctgttcgtctctaatgccccagcatccagcagggcagagagacgtacagagttacctgacaccttcctatccatcatcttactctcaatctgatacaaagaccaggctgaagacaaatcaacaaaatcaggccgaagctcctccgccgggtctttatttgactttggcactagcgggctcttctagcttaatctcccgccgcagcccaaatccaccgccgagccatcaagctcagagggggagcctgggaagacttccggaccatggaggagaacagtcctcgtcccctagctccaggcctgtacctcggagcccaggcaagggtttctatggtaacatggtcctcggctccaagaagacgtaaacgcccccgtacgcccggggggcacagcggaccccggaagcccttgactcgctccagagttcagccccgagccgcgcgagtcgactcacctacctcttttcaagccggcctagccccttcccggaacctcggctcccccccaacgaaactactgctaagccaactggactacacttcccagactgcttggagcctctctctccgcagaacctcgtcttccgcgagcttttcctggaggttctaggagggatgcccctcaatgccacgacgccatttcctactacgacttccatcatgctccgcgccgctccgggggcggtgacccctcttggcccacgtcttgtcagtgacgcacttcctgtcagtgacgcacttcccctctgctgggcgcgcggtggacggtctgaaagggagtgttcgggtttcgctggggcctcgcggctccagagcccagcatggcttcctcgcgagcctcttccacggtacagagcccgggatcccagctcactctggcagggagcgctaagggggaaggggatctctgcgggaaggggccgttaaggagcgggagaaggcggtggagggctgaggaggaaggctgcgggactcagcggtgtcctacacagcggaccaccgttttcctgatccctaagcgctttcgtggactgtagcttatttgcacctctcccactacagccccaaagggcaagcatctcttccgactcatccagtaacggtgctctgaaatagggaagtgtcttggccaaggtttatgcctttggcagatctcagaattttaatgagacctactaactcctactacctcacgtctaggaacgtttgaaatgtatacacttgtaatgttgtaacttgttatcctttagcaccgcgttggttatttcatctatccttagtatttccccagtgataagcagtaatccgggaagcataaaacacgagattgaacacttccaacggaatgaagtaaacagatttcagagcaaacctttcataggaaaatacccgagagaacctcactagttttattaatcccatcaaccaaagtgagggactgaaacaccctcaccctaccttcacctcctcaaatcaatgaagagcgtcttaagtagtgtccaatttgtcctttcaattacagaggaaacaggactgtgaaactcagggtgagcttcatcctctggtgaagtccggtaaattgccaagattaaaccttagtttaatgcagatctttgatttagcaggcaaccaaaactaaagcacccgacgacttagttgctccggtcgtgaagaaaccacacatctattatggaagtttggaagagaaggagagggagcgtctggccaaaggagagtctgggattttggggaaagacggacttaaagcagggatcgaagctggaaatattaatataacctctggtaagatgcaaattgtgagcccatctttacctctttgtgtaatgaatacctttctaaacttaaataccacagttttataatgtcaaaaaattacaatttttttttttttaaacagagtctcgctctgtcgccaggctggagtgcagtggtgcgatcttggctcactgcaacctccgcctcccgggttcaagcagttctcctgcttcagcctcccgagtagctgggattacaggcgcacaccaccacgcccggctaatttttgtatatttagtagatatggggtttcaccatgttggtctggctggtctcaaactcctgaccttgtgatccgcccgcctcgtcctcctaaagtgctgggattacaggtgtgagccactgtgcccggcagaatttcaattcttaaacttgcagctataaggctgtattttgcctacccccttattatcatgcagagagcctttttcttacaatctgttatatagtttttcttctatgagtgagcagtcttatcaaaaattcagtgtacatttggattcagattgattccatttgtcttctggagatctaacatagttctggcattggtttgcagctagagtggttcatgatattctcccttttgaagttttgtaattattttttacccaaagtgaaatctttttgtgtgtgtgtgtgtgtgtgacagggtctcactctcttgcccaggctggaatgcagtggcgtaaccttggctcactgcaacctctgccttttgtgttcaagggattctcctgcctcagcctcccgattagctgagattacaggtgcccgccaccacacccagctaatttttgtatttttagtagagactgggtttcaccatgtt

SEQ ID NO: 588244 - DNA, 4001 bp, Homo sapiens
cctccaacaattctcctgcctcagcctcccgagtagctgggatcacaggcatgcgccaccacaccaggctgattttgtatttttggtagagacagggtttctccatgttggtcaggctggtctcgaactctggtgggcagtgcagtaggtgggaaaatatactggactaggagtcataagtgggttctagttttaacctggccactaactagttacatggcctcagggaaaacacttttaatgagagagataagcttactcacttctaaaatctcttccagctaaacaaatttagaagtgcacaagtaagaaattaacatacagatatttctctagattacttctgtaattcaaccacaatgcactgaaattcttgacacccttttttctcttcatatgccttcaaaattgacaatggcatctgctgttcattcttctttcctccctagcacatcatgtgcttataatacattttgtatataaagatgacactagtgatccaaaattagtgggtgactaatgatggacccatcaactctcattctgtcctcctaaaaaatgtcttgtagttccccagtgacttagctggccaaagtacagacagtggttatgaaacagcatttttctctgtgtgaagccaactaaccctgttagctggacataagattgataatgtcacgcttactggtaagcaatttaactcattctcattaacatctagcaaaataagttgagaggaaaactactattaaatctgttacactcttgggaaccccattttgcaagaaggcggcagacacttatgatccattgaatatattagtgtttagtctgtgattctgaaatatacttccaaaacacacacggattcggagaaaaaaacaggacaaggtgatgcgagtatgtaagtatcccctaagataggtccctgaaaaatccttaatagtatatcacatttggatacgtttcagtcgcaggaaggcaggaatgctggattgaaaacacaataccaggaacctaagagaagtctgaaggaaaacacaagtatatgcgtatatattttcactggagaatgacgtgaagcaaaactaaaaaacaaaacagtaaggcaaagatggtcacgcgaatgggagaggtgtacgccagcgtcaaaagcgagatttaaagaatttactcagttgtcaacatcggtgaaaatcgcatgtgaaatctttgtcaggactcagtgtgatgctgaactacaatcattcactgttcctagcaactgtgcacaagtatgctagagcctttaacagaataaagtgcttggggaaaacctctcacaagaggacaaagggtcaatgttacagcatgagccgccccaaatctgagtgctgtcaggaaggggagatggaggaaggtattccaagagtgaacaggaatcagccaaggcgaaagaaaacatgtgcgtggaggtggaggttggtaatatatggccaccccgtctgccctccgaagatgccataaaaggggtgggatggcatcaggcgtcaggtcccaggtccccggcccctggcagtgaggtgggcgtagaaaaaggcgtagaagagggtctgggagacgcggcattccaggggtttggcgacagcaccactccatccctccgcagaacgcaggccccttctcacctgggcgccgccgcctggcagctgcgggcagcggggagaactggggaacacgtcgaagtcactctcttcctcagcctcaccctcggcccgagggaggctccagggtcccggaggcggccacggttgttccatgtccggctgctccgggtcctacaaccgcccttggccctacaactgccactgccaacagacttggcgtgaatggaacctgctgcgccgagccagaagcccagccgggggtccgggccgttacccagaatccctctactggccgcgacgccgctgcacacccggcgacagcctgggcctcgccaccggcggacggcggaagaaatagtcggcgcggtgcgtcacttccggttggggcggggctgtggaggcgcgtcccgggccctttgcgtgtagtgggtggatctgcaattgtattcctgtttcaagccccgttttcttgcagctcttcggcactgcaaacctaaccgctaatggcgctgtgggtggagaaacgtttgttaggtagcgttatatattgttatctggtgttccctataccgaaaacggcgggtcctggccgccgggaggtactcagaccaggtgtgcactttacatgttgcttaaaaattgcaactcattcctttacattgacatttaaaccagtgattctaaggcagagttggggcggagggaggagaattttgaacaagcggagccaattttcgtctcatttctaattacaggcaacaacagaattctgcgaaacttggttggttggaggagcacaccaaaaataaagtaccggagccggcacggcttcaaaaaaattaggatcagtaccgctagtagcgaacgcataagaagggcttcctgtatgcctgcgtatcttgtttaagcctaaagatatgtactctctttatcctctttttttgagacgaggaagtagacccagcatgcccgagatcacacattttacaaggaagaagtaggatccagacccagggagtttaacttcaaaacttgaacgtttaacaatcaggtcttgctgccctactcataaagagacccaaataaaaacaacatgacgccatttttttccatgtgtttagactggcaaacttgtgaagtcgcttaataccaaatgtgtaccaagatgtaaggaaatgatgtgagaatgtcattagtataaccttttaggaggagtaatttgacaatatgagaggcttgagcggattgattcagcaatttcaccactaagaaagtatgcaacaattatttttgcaccaatatccaaagatttactacaaagatttctggcagcaatttttgtgtgtgtgtggcaagaaaaaaaaaagcattctaattgtccatcgatagaggaacttaaagtatggaatattaatacaatggcatattaccctttttaaaaaaagtaaattgtatctgaatatgctgatatataaatacctccaaaaggtattgagttttaaacaaagcaacttgcagaattaaacatatgcgtacgtatacagagagagaagagagagggatggtatttgtttgcgtccgtgtgtgtgtgtgtgtgtgtgtgtgtgtgtgtgtgtgtttgcgcagaacattcctggaggatatgcaagaaactgttaatgattacctctggtgggtgagcctaggaaggaaagcttctgaggatctttactttccacatttagcttccctgtactgtgctgtttgaatatttttccaatgaatgtatactataattatagtattataacagtacaagattataacagtacaagattactataaaattaattacaaataaaagctgagaatcacttttgcacctaaaccttttgaatttaggggtgaaagtcacaggagagactggaaagggaggaagaaaagaaaaacatttttctctttgcttccatgaagccacaaagtgctttgaatagtgcctggcataaagtaagccctatataaacgctaatgctgttagtttttctcctacctctttcactacttctcctcagtcttcttcccttctagctgacctctaactttagagttcctcatattttggccagtgaggagaatcctgtttattcctgtggctttaaataacatctgtgtatctataattctcaaattgaaatccaagtcctgaccttacccctgtgctccagactcatgtctacccgctgatttgtcatctcattttaatggttcatacacatcttaaatttaacacatccaaacccttgatctcaccgccttccccaaacttctttgggtcttctccgtgtcaatcaatggcatcaccatccagtccaaaac

SEQ ID NO: 588245 - DNA, 4001 bp, Homo sapiens
accagcttccttatggatctctccacctatcccacacatggctgtctggaagcccttttatcttcctcaaaaaatcaaaatggcctgattgctgttttcggatttttcaggtagtacacaaccatttaacagatcaaaacacatgcacacattcaggtaagacataaaatccaacagaaaaagaacaaaagaaaaatcctacagtcaatcttagagtgtattctaccagactttacaacagatatggcacacacaaatacacattcacatatataatatttccaaacaaaacccagatgacacaaaattttataacatgcttttgtcatccaatatatcatgcatatctccagatcacagagacccaaccctgttaactctccagggagtcaaatacattccctatttcgacatgggtgagagagagcaccaaaagagtaatgacactaggggtgaaagatgcccctcttcgtgttccagcagcccctcccggtaccctatcacagcacgaaccacactaggtgggccctgttgcctctgtctcttgttagcacacttaagtcctcaggagctgggctggagctggtttctctgtgtcaccagtgcccaacacagggtagagcctatgggaggtcccaagggaagaatggactctcaatcaaacctgggccaaaccctctactgactaacggagggcccaagagctggtgacataacctcctcctctcacctgagaaacagagatctggaaacctgccttgtacagtagtaaagaggtctcaaaatgacaatgtatataatgcctgcagaacacatcgggagctcaataggtgctagttacattataaatcactacatgttttgagaaaaaaagtcggtgaatgaatgaatacattaagaaataagtaggcaaatgagagtgaatgtgtgagaaatgaaagaaataggtaaataaaggtgaacaagtggacaaaaaagggcaaaagggggtaaggaggcagatgaatgagcagtgtgtgtgagtgacagcgggaggaaatccctgaaagctggtgaaggcgtagctgggaaaatgaaggcacaaagaagtgggaacgagcgactgagggtgagaataccatgccccccctcccctactcacatactgattgtcctccatctcctgcagagccttaatctcccgcagggcctggttagggaagccgtcctccaaccgccttagggccaccttcttgagggcaactatctcgccagtctgcaggatagaaggcagacactgccagcccaccctcggctgggaaagagagatgaaggtgggtgaggggaaggtggttgagagagagacacgcgcccccggctcggccagaggccctcctcgggggtctaggactagcctgggacccagccgctggggtaggggaccaagccagctgtgcggagggaagcgcaacggcccaaagtaggtttagaatatgagtaggttttaaaaactgtactggatgtaaaaagggaaccgaaacagtttagagcgttagccggagggtggcgggggcacacccccgccaggctgccggccgcggtccagcctcacctccacgtgcttggccttgaagacgatgccgtgggcgccctccccgatgcggcccaggatgcagtactggtccatcccgctgcagtcgtgggcctgtgcccctgtgcccctgaacttccaaactccacttctcctccaccccacgctgatctgagctcgcacgctgttgcctagcaacagcgcggcagctgaccactggggcggttcctgtaggcgacgtcaccaggagaacggaagctgcgtcgagtcaggggtgacagctccgggccccactgcgccttttcctagccctccgctgtcacgcagcagcaagcttaatcccgcataaaaaacgcatgcgccgagagcgtgcccgcagcagggcccacggaacgatgacagcaggcacctcctatctgcccccgcccccggcgtcacgtgactagctgcgctggtgcacgcagccgggaggggcgggctccttcccctggcaagccggaagctccgcacctgtaagtagaggttcaggcttcgaccacgcgcaggtgctgttttctagctccgaaagccaggcactattgatgcagacagacaggtcccgggctgcgttgtggaaagagggtctgtgggtcctcttgtcttaaaatgtcagttggctacgtgtacccacagatttttaaaagggcatactctgagggccgggcacggtggctcacgcctgtaatcccagcgctttgggaggctgaggcgggcggatcatcaggtcaggagttcgagaccagcctgaccaacatggtgaaaccccgtctctattgaaaatacaaaaaaaattagccgggcgtggtggcgtgctcctgtaatcccagctactcaggaggctgaggcagaagaatcgcttgaacccgggaggcagaggttacagtgagccgagattgcgccaccgtactccagcctgggtgacagagcgagactctgtctcaaaaactaaaactaaaaataaaataaaagggcatactctgacccagacaggacagagtaggccttaaacttctgaaaggatgctcaacttcacatacaataaacaaatgcaaactaaagttacagtttttcacatattggatggctaaagatctcaggtctaatagttcattgaccaagctacgggaaaacaagcactttcatacattgctggtggcagtataatttgacgatgttgatcaaatcacaaatgcacagaccctcagactcagcaaagccacttctagcaatttccccaatagacaccttttacacatgtgaaatgacatgtacaaagttattccattgcaacgttgtttcaacggcaaactattggaaacaacacagatgtccatcattgtggtgcctccttcaaatgaggtattaaatctttttatgtacagcaatgggaagatttctaaaataggttgttaaatgaaaaaggcaagatgcaggacagaatgcatagagtaccactggctgtgtaaacaaaaggagaaaagaatataaataatgcttgtacatccattacaagatatctggaaagatacacaagatttcctgagtgtggttacctggtggaagagggactgggaggacagggggacagaataggaggcagacttttcactgggtctctttacattatttgagttttgaatataatttattaattttccaaaaaagcaaatattttctagcttagaaatttcacttctgggttaataattgcagaagaatgacttgatgtccatacaaagtattcctcctgtttgatgatagcagagatctgaaaacaacccaaatacccagatggaaaaatggctaagttaagttaagggagtgccatagaatggaatagtttttagcattaaaactggcgaagataggctgggcatggtggctcaggcctgtaatcccagcactttgggaggccgagtcctacggatcacttgagatcaggagtttgagaccagcctggccaacatggcgaaactccctgcctgtacgaaaaatacaaaaattagccgggcatggtggcactcggcctgtagtcccagctactcaggaggccgacgcgggagaatcgtttgaatggaggaggcggaggttgcagtgagccgagattgtgccaaggcactccaccctgggcgacagagcaaaacttggtctcaaaaaaaacaaacaaaaaaaaaaagatacagtagggaaaggatggtcttcacaaatagtgctgggtcatttgagaagtcataaggggaaaataatgtatattgaccccagtctcacaccattcacaaaattgattccagatggactgcaatctaaatataaaaggtaaataatgaagcttttagaagaaaattatatcttaatggctttggattaattcaagatccttaggttacagaat

SEQ ID NO: 588246 - DNA, 4001 bp, Homo sapiens
gcaggagaattgcttgaacccgggaggcggaggttgaagtgagccgagatcgcgccactgcactccagcctggtcacaaagcaagactccgtctcaaaaaaataaataaataaaaaatagttttcaaattgtagtataaaaaactattagaggtgcaaaggacaatacaagagagaagccatactcccaatatattggggcagtggatgtaaaatagatagaaaagggcatgatgaaatatcacaggacccaattagacaggaactgcaaagcatcttagtctgtgcctcatacatgaaggttctcaataaacagaaaaaccatttgtccaggtttacccaagataggccctctttatgtctgctgcccgggcataaatattaattattttcactttccttttttttttttttaaagatagagtctcactttgtcacccaggctacagtgcagtggcatgaacacagctcactgcagcatcaaccttccgggctcatgcaatcctcctgcctcagcctcccgagcggctgggactacaagtgcatgccaccacgcctggctaatctttgtagtttttgtagagataggatttcaccatgttgcccaggctgatctcacactcctgagctcaagaaatcggcccacctcggcctccccaagggctaggattacacaggtgagccaccgcacctggctcttttcactcttaagtgtcccagttagcacaataaataacatggtcaccctttcaattaggatctgttgactaaaagcagcagcttgtccatagtagagctggataaacagtgcaggttctccgtcagggctctcctcctcttccctctactcactctccaaccaggagtctaggacaaccacaggggccagccgtggagcagagttgcgctctgttaggccttcctaccagaccccagctccaccagcaatggggactcccacagtctcttggggcaggtccatgggaggccactcttggccattattccctgattcatatcacctttgatgacagtagtaataatgacactaatggcaacacaagatcattttttaagcactgattatgtggcaggcactacacctgccaagcaaatggctcgacaggcatcacctcttttaatcctcaccccaactctgttgggtggatattactagcccattttacagatgggaaagccggtgaaatcactttaccaaggtcacacagctagtcagtttacagggctggatttgaatccagttttgtccaactctagccaaggttcttaatcattgcactccattgcctcctgggtggccactatgtgacccaaaaagcaaagtctgggcataccggctacactctctccataatgaaaacaaactctcaaaccagaaggaaccatcaggtgccctcaaggtccctgttctccaccaatccccactaacgggatactccaagtggccccaccctcgtcctactctttcagaaaactccttacctgttcttcacacgctctacaaagtacatggcgcaatgctactggcaattgtggtgcaggtcgcggctcccagccctccagagtgtcaggtggtgggccccccagagaccctctccgaaggaacccaccccacacactgcccctggccagacaccctcaagagcaaaccccaaggccgcgttagaacgaaatcccaccagctggaaccccggcccggttaccacgaccaccaatgccccggccgcacctgcagccgctgagcgtcccagggacggtgacgtcctcttccaacaccaagtccatcatggctacagaggtggcgacagcgttggtgtctgtggcggcggcgccactagtaccccccgcgatagcgacccgccgggctccccaggtccccgccccctccaccccagctcttgttcagactctggcggcgccgctggaattcaaaccacagacgccgccatctttcccggcgcttcttcctacggaaacgaggcggggtcacggaggcgcacgcagtgaagccgaccggctggcgccagaggacgggcagggaagcggggataggtgccatcttaactaagggcaaagcatccgtgcttaagccaagcaaaaataagagacaaaaaaaggccggctgccattttttgtgagggcacttagggagaggcgagggcgggtgccatctttgttgagggccaaagcgggccctagtccgttaatttacgcgggagatggaaatgaatacagccactcaggaatcctcaaagttcctaacctcgtgtttgcttttctagaataatgaccccaaaactttgggatttgaccttaagttgaaactcagataactgagtgctgccttgctttggaaaaatactacgtgcggaatctcaaggcaaacagtaatttgcagacttagtttgaagcaaataactcattcccatgagccagtggtcaacagcactcccactccagtctctcacctattggtcttttattaccattaggactcaaaggcacctgtggtcagaaaactgagggccagcaagaggaaaggactctcccaaagtaattaagtattgacaatgtctttcaactggagtgggggtctgcagctcctgccaactagatgagggctctctgcataaccctggctgcctttctttttttttttttttgaaatggtgcctctgtcgccaggctggagtgcagtggcccgatctcagctcactgcaaccttcaccttctgggtttaagcgattcttctgcctcggccttgcgccaccacacccgggtaatttttgtatgtttagtagagacggggtttcaccatgttggccaggatggtctcaatctcctgacctcgtgatctgcccaccccggccttccaaactgctgggattacaggcgtgagccacagcaccggccccttggctgcctttcttaaagcacatagcaatcaccaaacacttagataatcttggcagagcttaagcaatgaaattaaccttcccctcctcaactcagtgttgctccttcctctgcaggcccttgtgagagagcccgatgaaaataacttgaaatggttggtgagtggatagatagtgactttcccagtaatcttgaacaattcccctttcaccctgtttcctcattcttttttttttttttttaaatagagacagggtctcactatgttgcccaggctggtcttgaactcctggcctcaagcaatcctcccaccttggcctcccaaagtgctggggttataggcctgagccactgcaccaggccctcattcttcagttaagtaattaaccaattattgatacttttcaaaagaagccttccctagtcatttaatctaaatcaagccacttcttgtattcctagcaatgcaaattattcctttgtggcacttaccatattttgcaatttgtgtgtgtgtgtgtgtgtgtaaaatcattttttaaatgtctttccttgcactagactggaagctgcatggggcagggactatattctgaattgttcactgctatatcctcaacacctagcactatgtctgccactcagcagctatttgaaaatgtatgttaaatgaatgagtgattcaatcaatcagtctggaaataaggccaatacctatcctgcaaggtttttgtgagaataatcagagatacttttaggacctctgtcaatagtaattctgtgtatcccagattcatattcattctctctctttctctctctctctctgtctctctctcagctttagttaggcttccaaagcccgcgattatttgcctgtcccccttctttctctagatcttcaaccacacccacaattagcaatgataaaagcatgaaaaagagggaaagcttagcacacctggtgcactgcctcaggaacggggcagtccttgaagcccaggaaccaatactccttgccagtaagttcaacccatgagataggtgtgtccaaaagcagggaag

SEQ ID NO: 588247 - DNA, 4001 bp, Homo sapiens
gctcaacagcccagcaaggtcatgctcgcagaagtcgaacaccaggtatatactacccttgcagcggttatagggggaagctgaggcaggaatagaaagaagaaaaagtcaagaaaaccacacccaacacactttcccacaaccagcttctttcttcctgctccaacccacgggcacccatgccctccagagcatctgtctgttccttccttcaccggtcaaatattttctgagtgcctcttctgggccagggcaggccccgaggaagcaccagctacgatgaaagaggaccagaaaaagcagtcaccatgggtccatctgagttaagaagaggcagtttaggtgtgcctagttccaagtttacaaacaaaaccttaggctacaagtgtcatcttctcgtaagaaccaaataacttacctttggttcgacaaatctcaatcaagttgaccacattctcgtgttttagaagctgaaggatcttgatctcccgcaaggctgtaatggggaactgggtgagaaagaggggaaagtggtcaagagtgagcgcagtacagagcccagccctggggtctgtactgacagccaagttgggagacagagcaagatcatgggctctgaaaccagctgtctcagaagccttgtctataaaatggatattagtagcatgcacacttcaagatgatggtttgagacaacaaactgaaacagcaatactttgctattagccactaaacgctcggcggtttcagtcttcaaatttcagctctatggctgtttcgttggcaacaaacatgatgatttaaaaatgtccttgctaatgcacattacgcaaaagaaggtttatgggaagttgtactagagctaagatggggtggagaagggaccgctccttttaaatacattaaataattgagtatcagacacctttcaaaaagcatgcatatataatctttcttttacattaagcgaaatttaacactaaaaaaaggtgtttaaaggcttcctaacttcgtgaaataaagtgcacacgatgcatgcatcaactccccctcctggcctcacccataactgcctaagaatgaaacatttagttttagggtggaagccacattccctggaaatttctgaactactacaaaaaaattaaatctcaacctgagactcccagaagcagcagggtggaaaaccgacccggggtcccgggcagttagccggccggcccgcacgcccgatccgtactcaccccctccttctcgttttccatcagcaccttcttcagagccaccttctggccggtcttgcggtgcctggccttgaacacctccctgcaggcggaaagggagacccgagaactcatcaggccatttccgcagggcccgcccctcccccactacaggaggaggggcagcagcaaagagattcccgggcggggctgggctaggtacccagggcacgcggctaccccgccacccggcagcctgtctcgttcggagcctctgcttccttccctcagtcccttctcctcacttgggcgtcccttggagagatcccgctcccctcacgggcgcctctctgcagcccctccccgcccccaccacgggcctcaggctcctccccaccagccggctccgtcaggccggggcggggtgcggcgcggcctagagaccagcaggcaagcccggggacagacgacttctctaccaactcggggggggcccgggcatcccgacgtcggccctaggggtgcaggcccagggctcccggccccgaggggcccagccttacccgaaggtgccttggccgatcttggcgagcttctcgtatttggaaacttcatcacaaaaagggcactccaccgagtcgtactgctttgccatggccgcctccaacgcgccgccgccgcccccagtcgctgctgccgccgctcctgctccgggtcccgccgccgccgcactccaggcccctccgcggccgcgccacttccgcctccacggccacttccggcctcgcggcgccgaccccgcctcttccgcccgccgcccaccgccaggccccctgggacttgtagttcccgagaggccagggggagccggagctgcagaggcgcctccgccgccgccgccgctgcccccgcctccgccgccgccactactagcggcggccccgatcgggggcgcggggagccggggcgccggagctggggctcggggtggcgcgtcccgctgcatgggcccgggccgccgctgctgccgaagctgctgccgctctggcgcccgatccggggccagccgcagtgccctgctcctcctcctccgacggcgccgcctccgccgggctgcgcggggcggcgggcggggggtcagcccccgagccgcggcctgggagctccctggccggacccgggcccggggcggccgggcgagggggcgagacgggaagagccgactaggagacggcccgagagcccaggagggggcgcgttataaagggggaggtgcccggcctcgccctcccctcctcctccgcccgcccccgccctcctccctcccaccctccgcggccgcacctgccgccgccgccaccgcccgcccgctcgctgtccgccggccgccctcggcgcgtcaccgcccgcggcccctcctccgccttcggaggtggggccccgcgctcggcacctggctgcgggcgccctgccgcgtgcctcagtttacccccacatgtcggctgcagcggaaagccccttcctccccggctcggagtgcccccacagaggcgaaggcgggaggcgcggagggagcgtcctccggccctgggaggagagaacggcccccgcctccgcctcccccggtccccgccaccctccgttgacatggcaaccgacggccgccagggggcgcggcggcactagcggcgacgagcaagcaacgcccgggccttctatcgctggggtctggctctccgggaggcagggatgggacccgcaggactcccacctccgctgagtcgtgccagagctggtcgggccccgagtcagtaatcgcaaaaaacagctaccattttctcagcactcttgtgtactcaggaagtgctgggcgttcccgccgaatcctgaatcaacagccccatagtcaggatcactaacccattttgcagaagaagacgttgaggctcagaggtgaggtcatttgcccaaggtcacacggcgacaaagttgggacccgaacctgggtgtctgagtgaggggattctcttgactcacgctattcgctgttgggccaggaggatagcagtggggaggcctgctgtccttatgcaggcgcgagctcaccgttcaccccccccatctccctcccccatcgcgcccatcccttccctcgcatcttcctggctccagcggcccccagattccccctccagctctgcccaaggacagcctccagcaaagccgtcttttctgcctcctctgccccgcttcaatctgccccctcctctccagccctctgcgggtggatcctgagacctagccccccagtctggcctctctgtccccgaagaacctgaatgtgacattggaggctctttccagttcacaccccacccctcaagctgtggccatgcaaatctctctactgtctccccaagcctttctgcgttcagggcggtgctcccctgatcctacactcccccagactctcgttaccctctcttcctgcaagaagccattggagtgggcgcggtggctcacgcctgtaatcccagcactttgggagaccaaggcaggcggatcacaaggtcaggagttggagccagcctggccaatatgttgaaaccccgtctctactaaaaagacaaaaattagccaggcgtggtattgggcgcctgtagtcccagctacttgggaggctgaggcaggagaattgcttgaacccaggaggtggaggttgcagtgagccgaggtcttgccactgcactccagcctggtgacagagagagattccgt

SEQ ID NO: 588248 - DNA, 4001 bp, Homo sapiens
aactagccttaaaggtttttcttatatttcatagtatgaaaaatctaaaaagtaacccatatgtaaatatttaaatcatgatagaaatccaaagcaaaaagaaaatgaatcaattgaattaaaatgtgtaggatgcttaaacccatttgataatatatccatttgataatatactaatatgaatttagtactttaaaatgttatataaataaatgttcctatattaaacaccaatgtagttaggattctaagccaacatcatttccccttttctacatgttcttctcccgtctccattaaaaattgtcaaaactatccacttttctttttcctttttgtttttaaacaaataaggtctcttctaagatattgtaggactacaaagccaaactcccgggttcaagctgttggcaaaattttagagatgctaagttacccatgtattaattacttttaaatcctcccctaactccctcacaaaacaggagtagggagaggagaaacacctctgttcaaaaatgaggaattgaaaactcttatcacaaataaactatatcaagtaagctaaagatagtaaaagagcaaaaatgttagcagatattcccaaaatggtaactacatattacctctggaatgatcacatgaatgtggctcattatttcctaagttcctacagcaaacatatatttatttgccctactcagttaaaaataaacacaatatgtagttgcttctgaataatttttctctctctctttctctctttctttctttcgacaaagtctcactctgtcacccaggctggagtgaagtggctccatctcgctgttcactacaacctcagcctcccgggttcaagcgattctcctgcctcaacctcccgagtagctgggattacaggcgcctgccaccacccccggctactttttgtatttttagtagaggcgaggtttcacctgttggccaggctggtctcgaactcccgacctcaggtgattccccccgccttgatctcccaaagtgaagggattacaaggcgtgaggcaccgcgcccggccgcttctgaataatttcgatcaaaatttatattcgatatttattccaacatacaccacagatttccactgataatccctcctagtaagaaagataagctccatccaggtatctgtgaattggaggctaagtagtcccagcacatcttacatttctttaagactccctttttatcccaaacgttcgtaaattttgtatctgataaagagcatacttccatctaatacaaatatgttccccccttcagatcttctcagcattcgagagatctgtacgcgcgtggctcctcattcctcttccttggcttcccaagcccccagggcgtcgccaggaggaggtctgtgattacaaaccccttctgaaaactccccaggaagcctcccctttttccggagaatcgaagcgctacctgattccaattcccctgcaaacttcgtcctccagagtcgcccgccatcccctgctcccgctgcagaccctctacccacctggatcggcctccgaccgtaactattcggtgcgttgggcagcgcccccgcctccagcagcgcccgcacctcctctacccgaccccgggccgcggccgtggccagccagtcagccgaaggctccatgctgctccccgccgccggctccatgctgctccccgccgcccgctgcctgctctccccctctccgcagccgccgagcgcacgcggtccgccccaccctctggtgaccagccagcccctcctctttcttcctccggtgctggcggaagagccccctccgaccctgtccctcaaatcctctggagggaccgcggtatctttccaggcaaggggacgccgtgagcgagtgctcggaggaggtgctattaactccgagcacttagcgaatgtggcacccctgaagtcgccccaggttgggtctcccccgggggcaccagccggaagcagccctcgccagagccagcgttggcaaggaaggaggactgggctcctccccacctgccccccacaccgccctccggcctccctgctcccagccgcgctcccccgcctgccagcaaaggcgtgtttgagtgcgttcactctgttaaaaagaaatccgcccccgccccgtttccttcctccgcgatacaaccttcctaactgccaaattgaatcggggtgtttggtgtcatagggaaagtatggcttcttcttttaatcataagaaaaagcaaaactattctttcctagttgtgagagccccaccgagaatcgaaatcacctgtacgactagaaagtgtccccctaccccctcaacccttgattttcaggagcgcggggttcactaagtcagaaaccctagttcaaaggattccttttggagagtcggactgctctctccttcccctccccttcccctcctgcgtgtaaaacggctgtctggggcaagggtttctcagacgtgtacattgcctggtataagagcagactctgaaaagatgaggtttatttaatacggacgggggagaattctgcctgtaggcagataggaaaatggggagggagtcattggaaggacggactccattctcaaagtcataattcctagaccagaaaaagtgctcagtgttctagaagcagagttgcacagtgatccaaagaccagcttcaaatactgtcctgtctccttcacacttctcacatttctctttcctactgaaaataccttgcatttttcgtaattataaagggggaagggaatatgagtgccccctgctttataggggttgttgtgagtttaaatgatgtattaatacatataagccttaagaacagtgccacacatcctaagctaatacctgttagctcttgaattatccgctttgaggactggcttgcaatcttgttttgaggcatagaaagaaaatgctttggagcaggacgcggtggctcacacctgtaatcccagcactttgggaagccgaggcgggcagatcacctgaggtcaggagttcgaggccagcttggccaaaatggtgacaccccgtctctactaaaaatacaaaaattagctggccatggtggcgcacgtgtgtaattccagctactcaggaggctgaggcaggagaatcgcttgaacccgggaggcagaggttgcagtaagccgagatcgcgccaccaccctccagcctgggtgacagaatgagactccgactcaaaaaaaaaaaaaaaaatgctttggatagaattatcactattacataaaaggaaagtccggatgcggtggctcacgtctataatcccagcattctgggaggccgagacaggcggatcacctgaggccaggagttcgagacaagcctgaccaacatggcgaaaccctgtctctactaaaaaatacaaaattagcggggcttggtggcgcatgcctgtaatcccagctactcggaggctgatgtaggagaatcgcttgaacccaggagaaggcggaggttgcagtgagccgagatcgcgccattgcactccagcctgggagacaagagcgaaacttggtctcaagaaaaaaagaaagaaagaaagaaagaaagaccaagaagaacttactccctgaaaagattatgggcaccctccaccaccctcacttacaaagaaaagttaaacagcactaaagagtataacaagcgcaaggaggtaaaagttctaatttttcctgtgactactactttttaagcttatcaaaaacatgtactacgttttaaaaaatggattgctcagactttgctgatgccttaagcacatgcttaatctgcctactggataatccagctctgtttaaaagttatatttcaatccctggttgacttaaaccttgtagacccagtatatcttgtacttttagtgtctgcttgattttaaaacatgtagtttttaaaatgaagccaatgaaaacaatttgggatgtcaagtatgtta

SEQ ID NO: 588249 - DNA, 4001 bp, Homo sapiens
aaaatgatctatttcaatgaacctatcatttaaatatttttgcatttcatgcatatacattaacatactataaaatattttctctaacttaaaatcaccacaatgttatgttttataggcctaaactaaaaaatacataattatggcatttatatacattgacatgttctactttgttactacagattttcagaggcaacttaataatttaaacaaaatgattttatatagaataatattaactagagtaataaatatttttatatagacaataatattaagaactatattcatacagttaccggtcacagtggctaaacttttgctgatacggataaaccactgttaaaaaaaacaacaaccagggtcttgtcaatgtttcaaaatgaattaaaatcaaatccagcaacaggccctgaaatcctttataagctcctttgactaaattaaaaaaattaacttgcataatatgaaaagtaaaaaataaaatgtgcatttatcctatagattataaatttttgctaatagaaattgagacactaaattaaacactgatagttttaacaggtttatatttccatgtcaaagagacaattaacattgcagtaaaaaaataattacccctccgctggcctttgctttttgaagctatatattcctggcgaagcataccacaaggacggtcataaaagtgaagcctcattaaattacttttagacttattacacaagttttaattagcattgtacatattttaactgtacatatattctttcagttttcctggttataggaaattacactggctgtgtcaacatttgtcaatgtgaggacaaaactaccttggattctgtttttcaagaagtaggcctcatttttaaactgtgctaactgtcgtctgagatgactaaaatactatcagttgggatttctcaggaacagttctacagttctgtcgtttgctaaacatacgagcattgtcccgagcagtttcaatcactcaggccgccggacctctacctctaactcacaaagaaagcccatttccctgttggctgcaaaactcccccaagaagcaagtgcttgctcctcgcagcagtaactgatcctacgatccttgttagcatttcaggaagtcgctgcctgcgtgccccgtatctcacgggtcctccactctcctggaaggtgggagagggtgaccccgccgggaggctggggagaaaaaaggccgcctccagaaaacttagatggttagcaataattctccccaaggagaaagaaagtgtgcttgaaatacacctttcctactgtgtgtgtgtgtgtgtgtgtgtgtgtgtgtgtgtgtgtgtgtgtgtcttagtcattcccacccaggatattcgggactcactgacttctgaggtgggtttagaagctctgttcgcctcagtttcccacgattgaggggctgtgtgaagggaggtccaggttcaatggtactgcgagaaccacatgtctaagtcgttgtaacccgaatggggaagcctccaccggcggttatctcctcctcctcctagcctgggctagagacgaattatctgtttacgaaatcacaccaaacaaaacaagtgccgaatgcgccccggacttttcgagggcctttcctacctggtcttctaggaagcggctgctgccctagacgctggctcctcagtagcatcagcacgagggccacagcggcgggcgcccctggcgctgcccactcccccgtgagccgcgggatgtgaaccacgaaaaccctcactcgcggcgggccgcacgcgcgccgaatccggagggtcaccaagaacctgcgcaccatgttctcgccgcctccagggccgagctcggcagccgctgcgccgccctttggcaccagaggtgagcagcgccactcctgcccccttaactgcagactgggacccacgcaccgccccctgcccatctccgccccgcaggcgcgcacccgccttccctgagcgcgcccgccccccaccttcacccccacccccaccccacccccactcccacccggacctccaagatctcggaacggctctgagccctgcgcacgcgggaagggctgccggaggcgcccgtagggaggcgcgcgcgcgggcggctcagggcccgcgttcctctccctcccgcctaccgccactttcccgccctgtgtgcgcccccacccccaccaccatcttcccaccctcagcgcgggcgccccgcggtgacggcccaggggccggacgcctggaacgcaactccaggcagctcgccccctagctacatccgtcacctgacacggccctaccaggaacagccgcgctcccgcggattctggtgctgctcgcgtccccgctcccctattccccttattttattcctggctcccctcgtcgaaagtcttccattcttcaaactagattatttaaaaatgaaaaaggaagaaaggaaagcgaggtcatctcattgctctatccgccaatcaggaggctgaatgtcagttttgaactaaaagccgctccgctcctcttctagatttggaaaacaagcgaaattaaactaaaccgctgcacgcctctgacgcgacatctggacacggcgcggcgctggcgctgccggagctgtcgacccggcctggcgccggactaggtaggtggagtcgcacccgggggtcccagctgggtccgggcgcccattcccctcccagctgcccgcgtcgccgagggcgcctggctgggacaagcaccgagtcctttgtgtctagcccatttttattttcggttttaaccttcacgacagccgcggagcatctgagcgcttcttcctctttcctcttcccccgcgctcccctcccctgctggccgctcccctcctgtcgccgcgtcctcgcgtagaatggttgtcttggcgaccgttggccgctgccgcctccacgctctgccccgcgcccagacaccccgactccccttgatcccgccgcctgactcctcggcgtacgttctctctccggtctccccctccatgtcccctcctccccttttcttccacatcaccgatcctttctggactctctcccttcctcctttccagctgggagacaggaaaagcggtcctgtttgggaacagtaaaagcagggcaaggaaaggaaggagcggcagaaaggaggggtgagtcgaggacacaggggcagccggagaatgcggaggagccgggtcctgagcgcggtctaagcgaggctcggctctcgtccaggaactcggacgcgggctcgccggctctccgcgcgcgggaagtcgagcccaggacgccgccttcaggccggcgcgctgacccggtgccccgacccggagcctgcggtctgcctggatccgtcctaaacctcgcgggctggacccgcggcctgagtgggtgggtgtgtgccagaggattcgggactaggcccagctccgggaacctggaaatgtggcccgcttctcagtggcttcctgttcatgcgcttgggcctagtggcctagttgaagaagtggaaccacagcgtgagccgacagggccttacagatcagacgtcaagccccccagaccttacaggggaggaaagtgaggcctgcactggccgagccacccacttaaggcggtgcggtagcctagaggagcggcagacttctctttccccatcccccgccccatcacttgacgttgctgccggacctcggtacaaacccaagacaaaacggggccctttggaaaaagtgagatttagcgatcactcttacgtagccactctaaatatctatctagatatttacaaatgcacctccccggtaggtagatttcactcagaatttacccaacaccgtgctttgtgctggggccacatgccacctttctgtctagtatggctgctctttctccctcttcgcaaatatagctctttttccttcaggtctcttctgaagtaagtagcccttcctcagaaatg

SEQ ID NO: 588250 - DNA, 4001 bp, Homo sapiens
aatttattttaggataactgttatttgttatattagtttgaggatggtggtgttaaagaggagttacttatttttaggtacatttcatactaaacacaaattgcataatttgcctaaatcaaggaattatactaaattatattatggttattaaatcctgtcctgagaaagtgaaactgactcagttttcaaagagacaaagagaaagtataagcaaaccaaattgcagctacaaaaagaaagacaaaatgttgcagtatatttattgttttgtgtattcaatgaagtccttcgtcttggtcataaaactagccttaaaggtttttcttatatttcatagtatgaaaaatctaaaaagtaacccatatgtaaatatttaaatcatgatagaaatccaaagcaaaaagaaaatgaatcaattgaattaaaatgtgtaggatgcttaaacccatttgataatatatccatttgataatatactaatatgaatttagtactttaaaatgttatataaataaatgttcctatattaaacaccaatgtagttaggattctaagccaacatcatttccccttttctacatgttcttctcccgtctccattaaaaattgtcaaaactatccacttttctttttcctttttgtttttaaacaaataaggtctcttctaagatattgtaggactacaaagccaaactcccgggttcaagctgttggcaaaattttagagatgctaagttacccatgtattaattacttttaaatcctcccctaactccctcacaaaacaggagtagggagaggagaaacacctctgttcaaaaatgaggaattgaaaactcttatcacaaataaactatatcaagtaagctaaagatagtaaaagagcaaaaatgttagcagatattcccaaaatggtaactacatattacctctggaatgatcacatgaatgtggctcattatttcctaagttcctacagcaaacatatatttatttgccctactcagttaaaaataaacacaatatgtagttgcttctgaataatttttctctctctctttctctctttctttctttcgacaaagtctcactctgtcacccaggctggagtgaagtggctccatctcgctgttcactacaacctcagcctcccgggttcaagcgattctcctgcctcaacctcccgagtagctgggattacaggcgcctgccaccacccccggctactttttgtatttttagtagaggcgaggtttcacctgttggccaggctggtctcgaactcccgacctcaggtgattccccccgccttgatctcccaaagtgaagggattacaaggcgtgaggcaccgcgcccggccgcttctgaataatttcgatcaaaatttatattcgatatttattccaacatacaccacagatttccactgataatccctcctagtaagaaagataagctccatccaggtatctgtgaattggaggctaagtagtcccagcacatcttacatttctttaagactccctttttatcccaaacgttcgtaaattttgtatctgataaagagcatacttccatctaatacaaatatgttccccccttcagatcttctcagcattcgagagatctgtacgcgcgtggctcctcattcctcttccttggcttcccaagcccccagggcgtcgccaggaggaggtctgtgattacaaaccccttctgaaaactccccaggaagcctcccctttttccggagaatcgaagcgctacctgattccaattcccctgcaaacttcgtcctccagagtcgcccgccatcccctgctcccgctgcagaccctctacccacctggatcggcctccgaccgtaactattcggtgcgttgggcagcgcccccgcctccagcagcgcccgcacctcctctacccgaccccgggccgcggccgtggccagccagtcagccgaaggctccatgctgctccccgccgccggctccatgctgctccccgccgcccgctgcctgctctccccctctccgcagccgccgagcgcacgcggtccgccccaccctctggtgaccagccagcccctcctctttcttcctccggtgctggcggaagagccccctccgaccctgtccctcaaatcctctggagggaccgcggtatctttccaggcaaggggacgccgtgagcgagtgctcggaggaggtgctattaactccgagcacttagcgaatgtggcacccctgaagtcgccccaggttgggtctcccccgggggcaccagccggaagcagccctcgccagagccagcgttggcaaggaaggaggactgggctcctccccacctgccccccacaccgccctccggcctccctgctcccagccgcgctcccccgcctgccagcaaaggcgtgtttgagtgcgttcactctgttaaaaagaaatccgcccccgccccgtttccttcctccgcgatacaaccttcctaactgccaaattgaatcggggtgtttggtgtcatagggaaagtatggcttcttcttttaatcataagaaaaagcaaaactattctttcctagttgtgagagccccaccgagaatcgaaatcacctgtacgactagaaagtgtccccctaccccctcaacccttgattttcaggagcgcggggttcactaagtcagaaaccctagttcaaaggattccttttggagagtcggactgctctctccttcccctccccttcccctcctgcgtgtaaaacggctgtctggggcaagggtttctcagacgtgtacattgcctggtataagagcagactctgaaaagatgaggtttatttaatacggacgggggagaattctgcctgtaggcagataggaaaatggggagggagtcattggaaggacggactccattctcaaagtcataattcctagaccagaaaaagtgctcagtgttctagaagcagagttgcacagtgatccaaagaccagcttcaaatactgtcctgtctccttcacacttctcacatttctctttcctactgaaaataccttgcatttttcgtaattataaagggggaagggaatatgagtgccccctgctttataggggttgttgtgagtttaaatgatgtattaatacatataagccttaagaacagtgccacacatcctaagctaatacctgttagctcttgaattatccgctttgaggactggcttgcaatcttgttttgaggcatagaaagaaaatgctttggagcaggacgcggtggctcacacctgtaatcccagcactttgggaagccgaggcgggcagatcacctgaggtcaggagttcgaggccagcttggccaaaatggtgacaccccgtctctactaaaaatacaaaaattagctggccatggtggcgcacgtgtgtaattccagctactcaggaggctgaggcaggagaatcgcttgaacccgggaggcagaggttgcagtaagccgagatcgcgccaccaccctccagcctgggtgacagaatgagactccgactcaaaaaaaaaaaaaaaaatgctttggatagaattatcactattacataaaaggaaagtccggatgcggtggctcacgtctataatcccagcattctgggaggccgagacaggcggatcacctgaggccaggagttcgagacaagcctgaccaacatggcgaaaccctgtctctactaaaaaatacaaaattagcggggcttggtggcgcatgcctgtaatcccagctactcggaggctgatgtaggagaatcgcttgaacccaggagaaggcggaggttgcagtgagccgagatcgcgccattgcactccagcctgggagacaagagcgaaacttggtctcaagaaaaaaagaaagaaagaaagaaagaaagaccaagaagaacttactccctgaaaagattatgggcaccctccaccaccctcacttacaaagaaaagttaaacagcact

SEQ ID NO: 588251 - DNA, 4001 bp, Homo sapiens
gtgccactgcactccagcctgtccgacagagtgaggcctcatctcaaaaaaaataaaataaataaataaataaatagagcttggatgttagcagtcaatcaggatgatgcataacttagaaaaaatgatgttttgcaggagtaatcctgtagcagccatttgtgtacatgaacattatgaaaacatttgctgtcatatttaaagtcaattataagacaatttttggtaactaaatgtctaaaatcgagttatttgttatgggtttatgcactttaaaatataccatttaattgaaaggcagtatacttctcatgttttgttggcttgtttcattaatattagaaatgttcatttcatctcttaaaaaccgtgataagttatatctactagtgatgtaaggatattttacatagaaaaaaaggggaaaatagctgctgttagtatttcagaaaatggtgaattacatatataacttgtttttataattattaataaaattttaagtttttaagatgcactttacaatatttttgctcctttaaaaatccctcatttgttataccattattctaagaattcaaaagaaatgaacacttctttaaaatctatactattaacaagatcccttaatattagcttagttttagagggtgatagtgaggtgagtactgaatatgaccactagccaacggtaaagtacaaaagagttgtccgagattgtaaaagaaataaaaaatatcagtactaattaaagcaggattcgtacttaaacattgaataagtgtattttaacaatgaagataaagatgcattatttatgaagatcctttgccattcaaaaaggacctaacagttgctgcaggaatatttttgtaatctgggcactgagtatgataattaaagaatgagaaacctatagaactatatattttttctcttatgcatcactcataagacactgctaacataaaaggaactaagtactgtggttgaggaatcccgtctcattctcaattaacctctatgagaaaacaatacaacagatttcatatagtagcttagaagtttacattgattttttccatgtactatgattttgtagaattccttaaatccaatctagaatgcgtaacttatactttacttatctttatcgttgaaagcagacagacaagataatcttcttccctaaataagctttccttttctccttttctccccaattcagtctattccttgcatctctgatcatgagatggcagaacaaaaaccactaaaaaaagcttaaacagtgggtttttcaatgtctctctttaggatttttgctgggtaaaagcctgttttacgcgtggaatgcacacctccggccaacggagactcctgtacaaatctacatcggcgatctaggttccagccccgatccgccgaggccgcgccccgcgttcgcgcgccccctgccggcgaggccctggggccccagctacctggatcgcgcgcctcccgaaacggttgactccgttgggatccgcgccggcttccaggagctgtcgcaccttctccactagtccccgcgccgcggcgctggccagaccctcatcgctgccgcccccactgggcatgcccttgttctcctcgcgcattccgcagcccccagacgcgcagcggcccggataatccaccgttggccgtaaacttaacgacactcttcccttctttcccacgctgctccggcgcactctctccttcctaggagacctgggctcagcttcattaccctcccgtcgtccttctgcggcttggggccccgtgcagtggccgagcggccggtcgttagctccgggcttttcctggcgctcaagaaccagcgggcgcgcctggattgcttctgggaaaaagcgcctagcgcggacgcagccgagctcaaagccgctctggccgcagggtgcggacgcgtcgcggagtcctcactgccccgcctcgctctggcagagtggggagccagccggcaaagaattccgttttcagctgggccaaggggccggcgtctccccacccccttaggctccgccccctgtccgctgtgatcgccgggaggccaggcccgggccgacgcgtcacgagggcggggaagcctgcccaaagatgctaggacgcatgcgccagagactgggccagggagccgccaggaatgctggctgcactgctcgctggatgtccagtaaagccaaggctaatattttgggaatgttcaccactgccctcagctcctaatccccagtaggcggagcagaggatttctgttccttcagccagccagttggtttcactgtggagacgttggtggctcccttgtgaccgagagaaagtcattcaaaataactccgtgtttcttaagatgtctgaaagcgacagctctgcacctgtcatacaagttaaattcatccccaggcagtacttgggcttcacaagtttcataacttgtatcaaacttagcaattttctcttggatgtgtctttctgtttgaattagtcaaccataaaaatagagaaaaatcccgagaatcatgttttgcgtgtgctttttaattctttccatttttgcattatggatacaacccttaaaagagaaaaaaactagttcgagattgagagtggcaacctggcacacataagacaaaaaaaaattatactttaagaatctgagatcccagtttcatcatatttgtacagtaaatctttgtttgcactcttacctatttaaacccactttgtcaggtatcttatttttatttatcatgagtaataaaggaaatttatgcagtaataatgaaacatcataagagaggggtgtggtgctgggcttgtcattaaacaggctgaacctgtcattaaattctcttctgaagatttaaatgccaagtgctttttttccccttcctaatcttcctaggtgagtttgaatcaacatttattacttaaaatatttaaaacatttcagcggatgctacattggataggaagagaaccgcaagttatggatttgttgcctaaaaactttggtgaggaactgcataagtggacctctcctaaaagtgaacaatttttgtttacagaatcattttggttcggagtgctgaggaagacaaagtcttaacaggagggcaattgcttgtgtattgcaaaatgagagtcttcacatgttttttttaggataccttagctctgactcctcatcccccaaatccctgtagaattaaaaaaagctctttcttttaaaggcagtggaagtgccaccaccatggaagtgctggttagggctgaaaatctactgacagagcctcaacagagctgaaatccacctggacagggaagggaaccgggtagcattaataacaatttctttttctttcccatccaacccccatttcctagtcttcagtttcttaatttctctaccttttactcttatgctcttgttttgacctttgagtttctctgaaacttatcagaaaagttaggacaagatagtctgacccaattcttgagccattttcttaggtagtaaatatgtcagaaaaatgaaagctgtttggagttgataaggaaatggaagataatgtttttctttgagggggacataaagaatggtgatagggaaagaaccaatgactaagtaaaatgactgagaatcttgcacgaggcagatgtgtgagcttcgcgaagcaagttgactgaatgaaaaacaactttgggtagggaaaacgttgccgggggcattcgcgcttactagcaccacggacagcgctttgcttatactcaggcctgggtggtcctaaccagctccagacagaattctaaagcttcacacttgatcttccaaagccccttttctcccgtcaaatagaaaggacattatggaagctcaatgaatttctttgaaaaaccaacctgctcaacctggttttcaaatatgattggattttatctaatattctctgtat

SEQ ID NO: 588252 - DNA, 4001 bp, Homo sapiens
aatgctcagtgtacccgggatgtttcacaccaaccttcctcctttctgaggggtggggcctgcttttccctcctcccatctccctgcacagggcctagctggctgggcacaaagtcgatggccccatgcccaagtccccacagttcctgagccccctgctggtaaagaaccccctagggaccacacctcccacccccgccacgcttccctgtgccatgaaaatggcctctgtgcaccaagctgtccacccccacgaggggcctggaggttggtgctcatccaccctctgtccctgacggaactgaggctgggcagcttttgggcttgaagtcaccctgttgagaagcagctgtctgccccagtgccacctcctgtccatcttgggcagcagctccctcttcccgtggtgcatggtgggaccaggtcattgcttgctggctgtcacctgtgccaggttccaggtggggaagggcagggtggccctacacccccaggcccagccagggtcccagcagccctctgaagtctagggtgatgggccccctgtcacactggtgtgggagagtgcggcggttggaactggaggaaaggaaccagaagcaacacatgcaggcatcgtgggcatcccctgcgaggcatctgtgtctccttgtgccagtggcgtgatccctgtgcaattgagactggccagagggcctcagggtggggaaatggggaggggtcgtgatgacctgccgaaggcctctcagcaccccaagaagagctcgcccaagaagaaggtgacctctcctttgagtcaggagcccaggaccactgcccaaacctcccggtcccagggccagggagtgtggagagcaggcagcagaggtggagacaggagtccccagggcctgagacaccgcaggcggcagaacagcgtggttgggatctggggtcccctgtgtgactcctgctgggggcagggactgggccgggcaccgacaccggcttcctgtggggcttggggtttctgtggcttctccttcacaggcagagagggtagaatttatggatgcctcgagagagctcctgcctgccggctctctttctggagggacccggacccgggtgtggagtagctcggctttcagcttcctgcacaggaataggaggcagcagctgtgccatgctgggcaaactgcctgcctgcttctctccacccgtctgcctgctctccacactccctgcccctgggcccgtttccccttctgtaaaatgggaacaacagagaggtggaatcaccaggattagcaaatgtaaattcaagaggcccagttacatttgaatttcaggtaaacagtgaattgttttttagtatgtttcatttttttctttttctattttttgagacagagtctcgccctgtcacccaggctggagtgcagtagcgtgatctcagctcaccgcaatctccacctcccagcttcaagcggttctcctgcctcagcctcccgagtagctgggattacaggcacccaccaccacgcccgattaatatttgtatttttagtagagacggggtttcaccatgttggccaggctggtctccaactcctgacctcaagtgatccacccacctcggcctcccaaactggtgggattgcaggtgtgagccactgcgcccggcccatagaaatttgtttcaaatattgcatgggacatacttacacagcagttcttggcagtttatctgaaattcaaatggaattgggcatcctgtgttctacctggcacctgtccccatagaaatgagcgtgagtgcccgggatctgctgcggggctgtgctgggctctttctcagcctggcccgaagtttccagatctgattgagcgagagagcagcaggacctgcccctctgctgggctcttaccttcgcggcactcgccactgcccagcagcaggtgaggcccaacacaaccagttgcaggcgccccatggtgagcatcagcctctgggtggccctccccctgggcctcgggtatttatggagctggatccaaggtcacatgcttgttcatgagctctcaggcactccctcccctctaccccctcaggtgcagggagatccagttttccccaaacccacagtgcacctgtgcaggttaccacttacctgggagcagaggcaggtggcaaggtggcgggtggtaagggggatggtggggccgggcagggtgcacagtgccctgccttctggtttgttcacagggcttggtgtcactgtcagagaaaagggcatactttgtctccatgtctccatgccctgcttgtcccctaggtccccaaaggggcttcagaggggaccgagcacgtgacttctgggacagaaagggcagcatgctgcaggccctccactcatgtggctgaccttatctgtacgagcttttcctggggcccgtggagcgggtagtccaagctgggtgcgaatcccagagcagcacaaggcagtcccactcaagggtgtggaagtgtcaccatccagcctgatgtgtcctgggagggaggactagaggctcagggggtgtgggtgggggggtgcggaggcatctagcccaaccatgtaggtttccctgtggaaacaaagggcccagccgaggccctggggcatgcccaggcagagtgacagaaggggagggaaagaggccagtgggagggaagggagaaggtcgtgtgaggttgtggaggaggaggcgactcgtattttctgtgaacaggtattaatcctggagccaggaaaggctctgagaagtgaaagaacaccacgaacaaagtcttcagatggggcctttaagctcagccagtgtgaggtcaccctcaccgagacactcagtggcagctccagccaccgcacagccctctgcagtgatgggaacagggtgagggcagccagagccttcccacccaacagtcccccaggagacactggggcctgtgcttcccacaccaaccacactcccgttctgccacccctgcggccggtgccagggaccgagtggacctgcagagccacgtctgtccctctgtctgtcgaccacagccggtgccagcaattcaggaggcctagtgggcgagggaggctggggaaaggactggagggtgggaggaggagctcggccacaggaaataaggggcctgcaggtggctggggcgccccagggcaaaggcatttgcctcagacctttgctgcagtgtcatttacagtggctaaggaggaaaggggagggcagaggggaggcagcagggagaggaaggaggtgggggagggctggggcagggcagagggaaaggaaggccccagtttatatctatgtacatttttagagcagctttaggttcacagcaaaattagaggaagattacagagatttcccgtatgtcctcgccccactccagtctcccccgttatcaacatcccccaccagggggtacagctgttaacacctgatgaatccacattgacatgtcattatcacccggagtccacagaggttttttgtttgtttgtttttttgagacagggtctctgtcacccaggctagagtgcagtggcacaatcatagctcactgcagtcttgaactcctgggttcgagggatcctcctgctttagcctctgaagtagctgggattacaggcgtgcgccatcacacccagccgatttttgtatttttagtagagactgggtttcaccatgttggccaggctggtctcaaactcctgagctcaagtgatctgcccgcctcagcctcccaaagtgctgggattacaggcatgagccaccgtgcccagcctcatactttatttttttaaaattggcaaaaaaaaaaaaaaaaaacttatttcctggctctgtctcttccaaagccctagcagtaacgaaatcccaggagcaagccccacccctggtgaccagactggggtctctaaacaccatattcacaccgactgagtgcaccctgggga

SEQ ID NO: 588253 - DNA, 4001 bp, Homo sapiens
atagcccctcctataacctgttgaatatgtatacctagcccactcatacagcataaatccctgccccaacccctcctcctccaaagtgtgggcctttctgctttgcctgagactatgcttcctagcctgtcaggatggccactttgcagactgtaaccctttttaagaaatagtctctctaaatttgcagatctcatgatttttcagttgacactactatggggactaatgaaatcttgtggccagtaaagaaactatttttccctggttcttaaacttccaagtgtgcacacaaatcctctgttagggcagtgtatttttttaaaatgcagattctgattcagtaggtcaggatgtcgctctaacaaaccgccaggtaatgctaaagcgtcccatctgtggagcacacctcaaatagcaagggtctttaatacatttactctcatttgtggaggagcacacctttttcctctccctttaaccagtcacagcttcctctactttcatgaccgcacgcagacattttctgtagatctcctccttcccattttctaccaattcttctccagttagctcaggaaaaatcccattctttctgcacctatgtcaaattactcttgactcaaaaattgaagacagtttatgttttcgagaggcttctatgtttgagatgataatacataattacggttgcagagcttttctctccctctccttcaataaaccaaaagtgcccagactttggagtaaaatttttgggtcccaatccatctctgacaattcctttctctggaaccttggacaagctacctaacttctctgagcctcagtttcttcaactataaaacagggctaacagtagcacctacctcagaggaatgtcaaattctcctgcagtctatattaactacttttcttttatcaacttagttttttaccgaagttatttttcaaaggaatttttatgtcatcgtaaacacaaagtcattatcagttgagatggttagctgacctaccaaaacaaatgccatgaaaccaaacggagttattaaatcccaactagagatacttctgcatactggaggcggaattatctagctagggatatagtcaagacttcctccttgtcagtcatccacacagacgactgcgattaaacgagttaataccctgcaatgcgtttacagctgggcgccgtacgcgctgctcccaactctaggccatcgtcatgacaggatcaatgccagttcatgcccactttctagggctgggagtaggagaccgaggatgtctgtggagattcacccgcctggcccgggaaccctggccagcgggccctgggggacttggggtggtcacgtactggactcgggacttctcttcccagggcgccggtgggtcctcacacgctcgccgcagggccgcgatctcagcttgcaaggcgcgcacctctgccagctctgcgtccatggcgcgttgctgaccgcagccgggccggcagcgcagctgtcactccgacctgcgcgcttcacccgcgcttcaagcctcgcgcgcgctcccggcgcggaccatcccagagctcacgcggaggggaggcgggagagctccgcgtgaccccagcggccctgcacgtccaactccgctctcgcacgagagcctgagtcctccacttccccgcacacgtttccctggctgtctaagcagtggctatactttctctggagagcgcgttctttgctactccaagcccaagcgctccgctgctcaccctagccggcagccttggagccgcccggccgcgtgcctcactaaagaggcagggctgggatcacgtggaggggagcgcctctttatttttttcacctacttcctctcttacgccgacctagtccaggaattggtacacacagcgatagtgttcaatagaaactaggggattttggtttaggctcttttgcagtcgttgagggggaggtgacggaggcgtcagggaaggtgggaggacggaaaaggaaattaaaagctcttgggaactgaattgtggtaacggaaccttaggaggctgggttggaaatcgagtaggaaggaagagaggatgctccgttgggacacgtgaccagaagttaggggctgcagcggcgctggctttaggtgaacgacgtggtgaggagtgggtttcgggcatgagaagtcacagggccgtttcctagtctctcttcacttctttgggtcttctcagagaaagaaggctgccgtgggtaggctgggggcggagactatcgggaagaggtaggccgaagttctgcccagaatacacgccatgtggtggacgctggttgggagtctcttctggaaagagtctgtcagctcttggggaagggaagggcgagagctgagcgcctgccgggtgctaaacgaaatgagagatactatgatgggccctagtacctctggaaaagttttcctgagtcccctgtgatacagcaaccttcatagtatagtgttaagaattccaagttctgaaggtagacctgcattataatcctggattcactaattttcggtatggcattgaggaagtgacttaacctcttctgctctcctgaaaaatgggaaacatgcaaactactttgtacaatgcaggcacatagcaaaaacacaagtctgtattcgctatatcccttgatctttgtgtctgaaccccactttgcagcacttttattgtgacataatattgtgccatttgttttattcttttgtgactataaggagctcctagcctctctattcacttctttgggtcttctaggaggaagaaggctggggtgggtaggttgggggtggagacaattaggaagaggtaggctagctctttttatcttttagtgcgttacatcctgtttctgtcagactttgttaaagacagtaaatgaatgtatgagtgagtcaaggaaaaacatctaaaaacatgaatacataaaattaagagggatagagtgtaatattatggccatttggaggaaaaaaactctgtctgtacctgtgtctatatgggtatggggttgctgttccaaagtgcattcatgaaagatgtggatgtagggcttgggcaaaacctcgaagactaaaatttggaagtaatacaataggaagtgaaatacagatccaggagacggatttgatacagaaggttcagaggaagtagttgttttgttagattttagaagaactaagggaaagaactcttctctgtatacagaaaattacttttcccactgaaacacacccaagtatatgcccagccttcatgaaagtgaacagagaaacgaagcgcctttatgtgggtggccttagccaggacatttctgaggcagacctacaaaatcagttcagcagatttggagaagtttcggatgtggagatcatcacacggaaagatgaccaaggtaatttatggtccttcactgggcagttataggcagacataactcaggttaagtgctagaaaataaaacaaccccaagataaatgttagctctgaacaccaaaagttttaagtgatgttgtggaggtataatgtgtgatgtggaacttgaccagaatttgtttctgaaataagaaaaaattccaaattctaaaacatctgatttcagaaacatattaacttccagttttgagaactagaattttctaacatggattaagtgtcccgttaagtagactatcactagcatacaatcaaaatgtttccttatctgactactggacattttcttctttttttttttggaatattttgataattatgcttatttttatagccaataaaaaacaaggtttatctttgaaataataagttttcaagagctatttttttttttaatttagaaacaaccgtttttacattgctctctggataagaatttaaataaattgttttgtttgtttgtttgtttgttttttaggaaacccacagaaagtttttgcatatatcaacatca

SEQ ID NO: 588254 - DNA, 4001 bp, Homo sapiens
cttttcccttattcatttgtatcagtatccactcagtcacttgtttattccataggctgtaacctgtttaagatcactattggtcgtgatgctcaagcccccaggtctggccagtatgagctcctgtaaactgctcctggttcttctgacacagccccaccattctttgaggtcttcctactctctggcatcatcagctgttctaggctcattttgtacttccctgcccagctctagaatcaaaggagctgacagtatttacaaaccaggacctgggctcgttgctcctggagcttcattacttctagggcctgtcagtggaaagagctaggaaggacacactggtgtgtgcaggtgcatgagccacttgcagccacttccacccctgtctgtgcacacccatattcaaaacacgcaggcacgagctctcccagacacctcagtctagctcttttgacatctgtcagtcgctttgctgttggggagagactgtgtcccttcaccctcagtgtatccccttgtttgatcagccgatttacagtctcccaagagtgcctgctgtcccctcccagcccactcctctgtgggcacatggagcgtgacatggagctgacacaacgcagtcatttatctgacactgagactttcccgggcctaataccaggccaggcacctctgtccttttggtcacagcgtggcgtttaaatgagggctggtacccccacgggggaggcgagatggggttttcagattctcaagagctctaacatggaaaggactggatattcgagcactttgtatcatcacaatcatttgaagtaacaactaaccgccggcagcaccagaagctccctttggaaatttcctgattggcacacctagcagaagagagtccctcactgacacagcgtccgactgaaatgttaacagaaatccccaggctacaaggctggacaaaaggtgcctgacttttaaatcttttgattacatacaggatggaaagactgtatctccaagtctaattgtgtggatttttaaccagtttttctagactctatttgtgtttttgaagtaaatacgtccatgtagtgatacaagcagaaaggaatgcagtggctatgctgctgaattgcctcctgtaaaccatattagcctaactttcctggacgtggtcctgaggctcggacacgcaaacacagacctagcgacacacacgtctgcccctaagagtcgtctggttggtaaaaaacaagggagcacagcaacttgctggctcaggaggcatcagacccacttgtctgaccctgtgtggggacggaagtcagagatcagtcgccctcagtggatgaacatgggtgtccaggaaggacccctcaggggacctgcaccatccacaagaccatccacaaaaataactgggaacagctgaggagctctgttagaaggattgcttgtccacagggagttaaaaaatgtgtcctaaatgttgcttagtaaaacaaacaaccagaaaagcctctctattccaaacccatggtggggcataaacctgggagagctggaatgtcattgcagcactttgccacaggagcaaaaacacaacccccaccagaagggatggccgaccagggcatgacttgcgctgtctttctggtagtgactgatgccccagaaccctcgcaagggcttgtgccaaacattctccatgtgccccagccccagtggggtggcccagccctcagcacttacctcatctccagacctttgcagaacagaccagctgggagcctccatcctcccttgacccaacttttcttgtttgtacagacttgggaagaaccagggaaacccagagttgaaagagacccactctactggaaatatatcccaatggcatttttaaaacgaagagctggggaattttaataaacaaacagcaaatgcaagcatgaataatgggcctgtatggacaggaagagagccagggcaggagacagcaaatgacaggccagaagccagatcccacgcccttctgttcttgtatggaacctcaagctaaacatggttgaaaagaactccaaagatttcgtgacatgtgaaaattacattaaatgcaaacttcagacttcagtgtctgtaataaagtttgattggcacacagccaccctcacttaggtatatacagtctgtggctgcttttgtgctgaacttagtgactgagcagactacatggctgcaaagcttaaaacagttactccttggccctttgcagaagacacggaccaggaaagaccaggggaggtgggtcccactggtcccccagggaagcctgtggagctccaggcagtttggatgttcatgagacacagataaaccaaaagagaggctggaggaggccacagcctagggggaaagtaatctgaccatgtctcgtaaatggagaaacatctagtgggagctacaccatacttttaatagtgctttctcttgggaagtgactctgagaaacaggaggaaagcagattaaaaaaacaaccactgggccaggcgcagtggctcacgcctgtaatcccagcactctgggaggccgaggcaggtggaccacgtcaggtcaggagttcaagaccagcctggccaacatggtgaaaccccgtctgtactaaaaatacaaaaattagccaggcgtggtggtgggagcctgtagtcccagctattcaggaggttgaggtaggagaatcacttgaccctggaaggcagaggttgcagtgagccgagatcgcaccactgcattccagcctgggtgacagagggatactctgtctcaaacaaaaacaaaaacaaaaacaaacaaaacaaaacaaaaactactgaccacacaatccctcccgtatggcacagtgatagtctagccaggggctggtgtcggacggggaggtctgtcctgtgtgaccttagcccctaagcctaagatggacttttttctttttcttttcaccctttttgtttcctgggctcctttcagggcctggtttgggccatttctgtgcttctgaatagtaaaatggttttcaaacccctagggatgaaattccaacagaaatccctttattctcaaccatatttccacttcctttttttttttgacacagagtcttactctgggtgtggaattcactccatcccaggctggagtgcagtggtgcgatctcagttcactgcaacctccgcctctggggttccagtgattctcctgcctcagcctccctagtagctgggattacaggtgcataccacaatgcctggctaatttttagtagagatggggtttcactattttggccaggctgatctcgaactcctgagctcaagtgatgcacctgcctcggcctgccaaagtgctgggattacaggtgtgagccactgcgcctggcctccttgtagtttttgccatgtttcatcatagttcattttaattctgttaagctggaaaaattcctcaaaaaaaaaaaaaaccccttcagttatttgttttataactgaatatttaaatttcatttatctgtaatctttgtaatctttgcttctcatacaaatttctgtctcaggagacaggaaacagtgtgttccgagctggccatgtggacaggccagtgagatgccctgcctcctgaccttgttccaactggacccttgtgcacacagtgcagggtgagacccagtgctgcctctgcccatgtgatgtcacatcacaaccccagagaaaatgaagacaagttatttccccatgtaatttctccctcctgacacatcctctagtagattcccactactcccgatactctgtggagggttttctcactggaaatcactgtccctttgctagggtgattatagaaagctcagaggagcaaggactactgtgctggggttgtggggatgaggccaactcgccctcacatgcccaccttctcccctccttcactccttctcagagggaccca

SEQ ID NO: 588255 - DNA, 4001 bp, Homo sapiens
tcagctcactgcgacctccaccttctgggttcaagcaactctcgtgcctcagcctcccaagtagctgggattacaggtgcccgccaccacgcccggctaattttttttttttttttttttgtatttttagtacagatggggtttcaccatgttggtgagcctggtctcgaactcctgacctcaggtgatccacacccccccgccttggcctcccaaagtgctgggattacaggcataagccacggtgcccggccccagcccttcttttctataccttagtttgggccattagattacaattcaccatccttccaattttaatttgtcttccatatggaggctagactgagctcctacggaaattccatctcatcatcctacagcggtttcccaaaaccttcaggataaacatccaactctatgacaggacaaacgaggaccctccctgtttggcccccacaaggtttccagcctcaactctctctgctctttctcaaacctaaattccagtcctgtaactcagcttgcatactctctcctatttccaaaacttttgcacaaactgttccttcctgttacctagctagcgtctataggaagctgcctccattatgtagaaaatgctaagtgctcaaaggaataacagcattttgtcatatatcatagttgacctaacatattttccgaataatcagagagtctggatccctaattataccactatacatttacaaatggcttgtatttgtaaagcactttacaaacttcttatatacaccttaaaaaatgaagacaggccgggcgcggtggctcatgcctgtaatcccagcactttggaaggccgaagcgggcggatcacctgaggtcaggagttcgagaccagcctggctaacatggtgaaaccccatctctactaaaaatacaaaaattagccgggcatggtggcgcgcgcctgtaatcccagctactcgggaggttgaggcaggagaatcacttgaacccgggaggcggaggttgcagtgagccgagatcttgccactgcattccagcctgggcgacagagtgaaacagtgtctcaaaaaaaaaaaaaaaaaaaaaaaaaaaaagacaaaggctgacatgtattaatttcctacctgcttagttctctatcaggcaaatcaaagtcattcaataaaataggtaacatctgtcaaatgtttaatgatgtcccaaactgtgctaagagctctgcaggcatcagcagcgcagggaatccttgcgaaggcgcacataacctgggtctcgttattaagcccatgttacggatgagcacactgaagccctagagaccttaagccactcacctagctcgtgagtgtccaggccgcacaccccttctattgcacacataccccgacaatggacaccactcacctaaaaacccacttcgccgcaccgactgaggggccctggaggcgggaactacaaacctgtgtcccccagccagggctggaagaagctcttgatggagaccaagggcaggtctttattgatcttgagggtgctcagcagaggcgcccagtccaccccgcggaggcggtcggcgttgaaatccagcacgccctcccggagacaggcgcgcacggcgggcagcggcaccgagttctgcagcgcgcacaggtactcgtagtgggagaagaagtccgccgcgctgtcgcggcgcagcttcacggagtcgatcatggcccgagggcggcctcgggggatgcccgccgcggagacgccgcccgcgcccacccaagaacgctgagtcgcaacccggccgctccggcacccacggccaggcgatagcggcagccccgcaccgggctcaggagcggtgattcggtcggaagacgcaaggccagagccccaagctaggccggcccctcaacgccccactcccgcgctgcctcccgccctgcggcccaagcagttggcgcccgcctcatagtcctctgaggcgccgggattcaagccggtgggcggtgccgtggaacggtgcgccaagacgtcaacgtgctcgctgtgcgtcggcacgcaggtcccgcctcctgaggacgggtgagttcgctgctacctgagatagtggtcgggagagtttgagggtttgcgaaagagtttactgatcgatccgaataaaagtgaaatgtgtggtcgggcgcggtggcccacgcctgtaatcccagcactgtgtgaggcgggggcgagcggatcacctggggtcaggagttcgagaccagcctggccaacatggcgaaaccccgtctcaattaaaaatacaaacattagccgggcatggtggcgggcgcctgtaatcccagctactcgcctgtaatcccagctgaggaaggaaaatcgctagaacccgggaggcggaggctgcagtgagccgagatcttgccattgcactccagcctgggcgacaagagcgaaactccgtctcaaaaaaagaaagaaaataaaaagtgaaatgtggatgtaacaacgcacttttaaaaaaagtctaaacatctgaggaatgtgtctgtgcttgcagtgtccagccagcacagagactgcactcaagggatgtgggaacggctgattgaacgtgaactgcggtcattaaatcttttatgtctgtgttaatatctacaaataagccttaatttctgtagtttctgcatatctcacacggttcctggcaaattgaagagtgtttcatgaattcaggactttattgtgtttgctgtgaatcagtttgttttgtactgacgatgatgttggctaactcccttgtaactagtacttatttgaaataatgtcctcgggattattttaagcaatgtttaagtatgaaatcatttcattctcctaacatctcaaggaatatactattatattctactttacaaaaggggaaactgaggaacggggaagttaagtggaagctaagtggaagaatccagataattgacctctccttctattggtatgcaattgctagagcaatgatagtcctccggtagagccttagacattgtgtttattgcattcctgttccacccactgcattccggatactccaacttacttccaacacacatatgcaggcgtctctaaaattccggagatatggtcaccaattatttttatgtgcgacatgctcaaatcttaatatagtaaacgcttgtatattcataaaccagcttaataaatgaaacattaccattcctgttgaagagctttgtgtaaccaccttcccaatcacgactactctctgactctgagataactgctcttctgaacttggtattcatcgttgcaatgtatgtctttatatttctgctacatatgtaagtaagcagtatataacattctatattttcttttcctactttacttatcgttacctttactaggtccatccgtgttgacatatagagatattcatttattttccctgttgttatatgggagttccatgtagaaacatacagtaatgtgtctgtttttctgttgatggtaatttaaattgtttccaactttacgatttctttgttgctctatccattttctttctagtctccagcatcaattaatgtagtgtccattacctttttaaagctccctcctccctgtttcccatgaagccacctgatttctttttctttacctctcgaatttcttcttctcagtctcattctttggcttctcttgcatatccactctaaatattgctgttcgtcaggtttctaccctcagctttcaccccttctgacattttacagtttctctgggtgttcttgtcttctgctcagccttaacttccccactctaggcagattacttctaacacagatagatctcttcatccattaaattgccccctagaaagccaagatttctcactgccctcagtgtcagatctatgtcacgtagcttgacatacaagctccttcataatttgactatctctgttgtctctctccttgcta

SEQ ID NO: 588256 - DNA, 4001 bp, Homo sapiens
acataagtaatgtgccttacttttttattcctcacagggctttgtgcatagtaggctcccaatacatatttgttacattgatcgtagaatagatcagaacattctaggtttaattctatcctattctgcaagacctgtagtacattcaagtctatgaagttgtatgcaagcagagttacaatgcatatgcctgcaaatcattgtatattacatcacctttacctctcataactccaagcacctagctttatatgcctttcaaaatatgtaagagtcaaacatcttagttttaatttaattagcaatagaattcaaaagaagaatttcaaaagaaatttgattgcctgattcttaggggtaattttctaattgcacatggccaacagagtagtcattattatttgataattgacttgccattgctacatatccttgccttttcaggcagaatacttaactgccttgaacagtcaattgccctattctattgcttgcttaattgggtagcattactcgactataaaattttactctaccctgcatgtttttggttcaatatcttcatgtttaaggacctaatgcaagttctcaattttaatttaacatttggaatgtagatattgccagaggaagtagacagtaggatgtccctttgtcttaatagcatggaattgatcataataactacaaatcagccaacacaacatgaatcaggagaaaggtacttctaaggggaggagatatgatctcacatcaagattgattttttaaaaagctcatatgagaaaataagtgaaagaaaatcacttttttgctatcataatactagaaatgatatgacaacttttgcctgagaacctcaacgtactttgaggttgtgggatagctttagcaagctattaaagaagtccctcataaacctataaagtaattaagtatggactatggggattaagaccatcgtaaatggatatgagagtatttgggaaggagtccaatgcaccccactttatcaacaaatggagttgacctgctcatccacatattaatagagtgcagaaagatagctacagaggagttctggtgattactctaaattctcagtttcctaactgagggtacagtctgacttatatctctgagtagatcacctccaatgcaaaaataaataaataaaacagagctctgtgtcttcagtgtgaatgaatgattactgatattgacagtatcatcatatcattcttgcagcatttccacaatgccaagaaaaaatggaaaggccagaaggaaacttaatctttgccaaatcctatgatgaatgcccaaggaccaaatctgtagttaagctagagtcaggctcctgacagccttttcccctactctccatccatcccagctgtccactaccacctgcaaactcttacctgctctccccccagaacacatacctggctgaagggcactgtcctgcaggtctcccaatgtacttcatggcttttgatgggcaagatgaccccctgagaagccggagtttttctgaacatgaagtggtgccagaatttcttggcttcttcccgaagaggagatttctccattttcattccatctatcggctggatgagggactgggtcccaggtgggaagggctcactatctgagtccctggatggatgcatttctctctcaggcttcttccagaacctgccaaatctggacagcatcttctctctctgcctctggccttcccctgcagggctggtggctacaaggtgtggcactgcgacaaacagatctggcttctcctcagcttcctcatggttgcctgtgggaagctctctttgattccttggcaggagtacgggggaaagagaactctgattctggcggccatcctggtgccgtgtggtctttcctagaggcaggagtaccagcagctgaaataagaggagatgcatgctgtcaggggcccaagcttcttttgtaaatgatgaggcccaaaggagaggctcattctctgcaggactgggaaaaaggaaatcgtatatatagatacctgcctggcgggatgggaaggcaggtggtcagtagccaggcagaataaacacatttattgtttgcttgaattatgtagtgctaatggcctcctgccgtcactttggttttgtgtattttaaaaggccccagtgaaagcctgggacccagggggtaattagctaagagtttagctatgtctggggcttaaagagcagtattagcaaagacaacacattctttgcctaaatttcccatggctgttttcagaagaaggactagagtcagctcacatttgctgtgcatctgccttgtgctggaatagaatagacaagacatgttgctgtaagagaagtttttggataaaaattaaaggcatacatttagaaaaagcccaggcctttaggaaggctattcacacacacacacacacacacacacacacacacacacacacacacacgaagaagtatatcaaagttgtaaggagaagaaaggaagagctagaaggatgttaatttttttgagcaagggacatattgtttcttacttacatgcaaattggggttattgatttttgcacagtaactgagtaaagggaatatgttttcctttccacacgtagaaactcacaattcccaagttaatcctctcacattaagaatcaattaatgggtgctaaatttcacaactggtcagtcatcagataaactcttccaattgttcacatgttcctcaacaggataccacgtaatagactgacagctcatcagtcttcaatgaggatagggaaatgtctccctccagccatcctattgatttttttttccctttgaacaaagagccagacatgagaacgtggattctaagaaccaggtttgataactttgtgtgtgacgctggctagtcagtttcttaccttattgaatccacatcatctccccttgttttacactaattgatggccaggctaaataaagattgacacaaataagagtcttcggggatcaaaggaaaaattgaaaaataactatcattcaaaactatcatgaatcagcctaggatacgaaaaagaaacacgtccagaaaactgaaaccccagaatagagtccgatcagcctaccacatgattcaaacagtatttccactgggaagcaatgcaatatctgcttttatttctccccttttaattcaatcactatattccttgctttcaataacacaaatagtcctggaacatgttcccccttttttgtcaatactgattaaactttctttccaagaagtgacccactggagtctgttttccaggcatttctgttcttcttgatagccatgcctgatttctatgaaataaagccttaagtaagtccctttacccatgataatgagctatttttaacatggaccatcactttaccagaatgccatgagtggagatatattgtacttgtaccaaatatctatggaacgtgtgctagtattaatgaaaggtgctgttgatatataataaataagcatgtgtatttgccattgtttttttttattttaggaaaagggttctgctctgttgcccagtctggagtgcagtggtgcaatcatagcactctgtaacctcaaactcctaggctcaagcaagcctcctgagtagctgggactacaggcacactaccacacctggctatttaaaattttgtgttgttgttgaaacagagcctcactctgttgcccaagctgctctgaaactcttagccttgagccaccatcttgcctctgcctcccaaagtgctgggattacaggcgtgagccaccatgctatgtcaacatctttttttttttaattgactgctacttgaatttcttaattcccctcagccatccaatgctatacgctttccagagctagtcactaggcctcctggtataatatggtgtggaagccagctgtgatacctttcctgaatcctttt

SEQ ID NO: 588257 - DNA, 4001 bp, Homo sapiens
cgagcagacagggccgccgggggcgggggccatctgcgaagctgggggttaggtgcccactcggtgccaatgcccgggtctctcaccagagggccatcctggcccgggggtagtccagccgctccagagcgcccaggtagtggggcagcgagtgttcggcattgcgggccaggatggcaaggaccacggcgggcagcggcgactccgcaacgcccgcagcctccagccacggccccagcaggagcagcagctggagcagcggcgcggcgcgggcagcgcgcatggcgggcgcttgggcggctgcagcggcccccggagctctcgggccggccgaggggagggggcggggcctggggcccgggcggggccgaggcagacccggagagggcggggcagtgcaccctcagagtgggatcctgctccccacccctgtgcgtggatgctcaagttttctctccttggcccggggcaccggagggccagggcccggggacccgcgccagccgcgaccctggagcagccccgcccggctggaccccggaggggcgacggcggaggggccggaggaccggacaggggaggggtgctaggacgagtgcgtcggggccggccgggcgtccgagaacagtaggggctcatggaacccctgggcgttgaacccccggaatccggattccccggcccacgcagccgactcttcgacctgagccgcagacccagaggggcggcgcccactcggccaccacctcccgggcttccccggctcccgccccatcctccgccccgggcgccctctggcggccctggcgctagctccgcagaccagccgggccacgcgtgggccggagacccagcgtggggggcgcagagggagtccccctgagctgggcgcgtcctcccgcggcggtccgctccttaagtcccctgtgcgtcacctccttgcgtcggtcgccagcacccgcattgcttcggccctttaagagagcacagccaggccgggcgtggtagctcacgcctgtaatcccggcactttgggagaccgaggcgggaggatcacctgagatcagttcaagaccagcctggccaagatggtgaaatcccatctgtactaaaaatacaaaaattagccgggcgtcgtggcgggtgcctgtactcccagctacttgggaggctgaggcaggagaatcgcttgaacccgggaggcggaggttgcagtgagccgagatcgcgccactgcactacagcctggatgacagaccgagactccgtctcaaaaagaaaaaaaaaaaaagagcacagccctcacagccctctcttggtctgagtgtagaactaggggacaccacggagctgctcactgcgacccgacccgtccgtcctccaaagcaggggatgttggctcccctggagcaccgccggggtccttaggaccctgctgggagggaaagaactctgcagcctctcgggagaggagcagaaaagggagcggcctggcggcaccacagatgggatcgaactgggtgtctgtcaccaacctcagacaggtccctttccctcaggagcctctcgggtaaaatcgggctgataacgccacccatctgggagggtttgcagggattcctcgagagaatgaatgcactggcagcttttcccgcgtggaggcttacacacaggaagagctccgccctggggctgggaagacaggactggaggagagggaggctcccccttcaccctcccaccgctgggaagatctcctttcctaggaacagcacggggtctcccttcagccttttcccagggtcagggaggggagccagggctgtgcacactatctccactgcaaggggagggctgaaggtccatagaggaaggaacttacctagtgcaggggcagcacgtgcgcactgaaccctggagtcctgatctctagcctagctcaaagcctccaccaggatcgggtggcagcttccatttgaggccatttctaggccagcggccctgcaatgagaagcattctggagagatgccagatttcttctcccttgcacggtagtcccctgcgggaagccactcccagccccagaagagggattccctttctaaagcaaagcagtgttccctacttcacccaccccagagtcattccacagcctctgcctgtcctattggtccaagggtgctatggtcagaatgtccgtgaccctcaaaactcacatgttgaaaacctaatgttaatgtcagggtattaagaagcggggccggcacggcgcggtggctcgcgcttgtaatcccagcactttgggaggcggaggcgggcggatcacgaggtcaggagatcaagaccatcctggctaacacggcgaaaccctgtctctactaaaaaatagaaaaaaatagccgggcgtggtggcgggcgcctgtagtcccagctactcaggaggctgaggcaggagaatggcgtgaacccaggaggcggagcttgtagcgagccgagatcgcgccactgcactccagcctgggcgacggagcgagacttctgtctcaaaaaaaaaaaaacaaaaaacaaaaaacaaaaaaaaaaacaggcggggcctttgggagttgattgggtgggctgccccacctgaatgcggctagtgcccttataaaagaggcctgggggccggatgcggtggctcacgcctgtaatcccaacactttgggaggctgaggggggtggatcatgaggtcaagagatcaagaccatcctggccaacatagtgaaaccccatctttactaaaaatacaaaaatcagctgggtgtggtgtcgcgtgcctgtagtcccagctactcaggaggctgaggcaagagaatcgcttgaacccaggaggcagaggttgcagtgagccaagatcatgccactgtactctagcctggcaacagagcgagactccgtctcaaaaagaaaaaagaggcctggggagcttgtcaaccccttctgccacatgaagacacagctagaaggccccaggtatgaggaacgggcccttaccagacaccaaatctgctgacgccttgaccttggacctcccaaccccccagaactattagcaataaatttcttttttttttttggccaggggttggggggtggttcaagcaattctcctgcttcagtctcctgagtagctgggattacagccacacaccactatgcttggctaattttttgtatttttagtagagatgggttttcactacgttggtcaggctggtctcgaattcctgacctcaggtgatccagctgcctcagcctcccaaaatgctgggattacaggtgtgagccactgcacccggctgataaatttctgttgtttatacattatgcagtctaagatatgttgttatagcagcccaaacggactaagacagggggcttcctgattcttccctggcctcaagtcctcctcttcccccaagtcctcccaccctccccaggagtccagcctgttactaactttcttgcctcagagttttcccatcacacctgcctggaaaacccaatagccatcttgttttggggcaggttggggcaactgcaaactcagggtctctaccctcacttgggctctcacccagcccaagaatcctgtttccctgtgtcccctgcccactcccctcagggcatttcaaatgcttctagtcattgaggcacggtggctcatgcctgtaatcccaggacttcgggaggctgaggtgggcagatcacttgaggccaggagttcgagaccagcctaggaaacacagtgaaaccctgtctctattaaaaatacaaaaaaaggccggggcagtggctcacacctgtaatcccagcactttgggaggctgaggcaagtggatcacctgaggtcggcagctcaagaccagcctgaccaacatgaagaaaccccgtctgtactaaaaacacaaaattagctgggcatggtggcgtgtgtctgtaatcccagctactcaggag

SEQ ID NO: 588258 - DNA, 4001 bp, Homo sapiens
ttctcctgcctcagcctcctgagtacctgggattacaggtgtgcaccaccatgcccggctaatttttgtttgtttagtagagatggggtttcaccatgttagccaggctggtcttgaactcctcacctcaggtgatctgcccacttcggcctcccaaagtgctgaaattacaggcgtgagccaccacacctggccaacgaatgcattttgaaagatgaaaagtacctcgactttaaggatcacacctggtgcattccctggttaccttcgttaggtgggcagatacctacctatgtgacctgtggctgtgtgaccacaggccagcccctgtccctctctgaatggggactagacagaagagctgctgctttcctccacccccaggttgtaataaggaccaaaccatgctctaagcgtccctaagaatgcagatgggtccaagctctgctgtcatggggcacagcctcccctctcctggggaaggggcccccataacagaggtgggggtttagccaagtgcccaggttttgggtgatgctgcccctttaagccaattccccagaaatgaagactacgtgtcaagtcttacaggggtgggaactaacaaactcccaaactgtggtaattgtgggcggcctccccaggccagggctccacccccccagcccaactgtggtgtgttgaagagggtggcttgtcatttttctcagtttacccccaacctcagccagggactcctccctgttctggtgtctacagaccaggggttgtggccttcgatcccagtgccctgggggtacagagatgccagaggggagaggctccaggaagggggactgcccttggctgacaggatcccgcccctctaccaagatctaccaagagagctggccccagcacgggggcggtgggggggccggtctgactcccctgcacagcccggagcccagtgctgatggcacccccaacctgtgcccggaagcctccagcgtggtcgatccctgccacgttgggccccagtggacttcagaggttcctgtctgctcctcttcaaatccagccaaccacaggtcccactggggttgagctgggccctgaaggctggggtgaaaagggctggctgggcccaacctacacccagggaaggccccaagaggaaggagtaggggaccagaaggaggggtgggtgtcccgcgtcggcctgtggcctcagaggtctgtcgtctcccagcagggggctcggggtcctctctggcggctcgggctggcagggccgtctgtgaggggaggggcctgtctaggtggtgtctgggcagggagcgagcagacagggccgccgggggcgggggccatctgcgaagctgggggttaggtgcccactcggtgccaatgcccgggtctctcaccagagggccatcctggcccgggggtagtccagccgctccagagcgcccaggtagtggggcagcgagtgttcggcattgcgggccaggatggcaaggaccacggcgggcagcggcgactccgcaacgcccgcagcctccagccacggccccagcaggagcagcagctggagcagcggcgcggcgcgggcagcgcgcatggcgggcgcttgggcggctgcagcggcccccggagctctcgggccggccgaggggagggggcggggcctggggcccgggcggggccgaggcagacccggagagggcggggcagtgcaccctcagagtgggatcctgctccccacccctgtgcgtggatgctcaagttttctctccttggcccggggcaccggagggccagggcccggggacccgcgccagccgcgaccctggagcagccccgcccggctggaccccggaggggcgacggcggaggggccggaggaccggacaggggaggggtgctaggacgagtgcgtcggggccggccgggcgtccgagaacagtaggggctcatggaacccctgggcgttgaacccccggaatccggattccccggcccacgcagccgactcttcgacctgagccgcagacccagaggggcggcgcccactcggccaccacctcccgggcttccccggctcccgccccatcctccgccccgggcgccctctggcggccctggcgctagctccgcagaccagccgggccacgcgtgggccggagacccagcgtggggggcgcagagggagtccccctgagctgggcgcgtcctcccgcggcggtccgctccttaagtcccctgtgcgtcacctccttgcgtcggtcgccagcacccgcattgcttcggccctttaagagagcacagccaggccgggcgtggtagctcacgcctgtaatcccggcactttgggagaccgaggcgggaggatcacctgagatcagttcaagaccagcctggccaagatggtgaaatcccatctgtactaaaaatacaaaaattagccgggcgtcgtggcgggtgcctgtactcccagctacttgggaggctgaggcaggagaatcgcttgaacccgggaggcggaggttgcagtgagccgagatcgcgccactgcactacagcctggatgacagaccgagactccgtctcaaaaagaaaaaaaaaaaaagagcacagccctcacagccctctcttggtctgagtgtagaactaggggacaccacggagctgctcactgcgacccgacccgtccgtcctccaaagcaggggatgttggctcccctggagcaccgccggggtccttaggaccctgctgggagggaaagaactctgcagcctctcgggagaggagcagaaaagggagcggcctggcggcaccacagatgggatcgaactgggtgtctgtcaccaacctcagacaggtccctttccctcaggagcctctcgggtaaaatcgggctgataacgccacccatctgggagggtttgcagggattcctcgagagaatgaatgcactggcagcttttcccgcgtggaggcttacacacaggaagagctccgccctggggctgggaagacaggactggaggagagggaggctcccccttcaccctcccaccgctgggaagatctcctttcctaggaacagcacggggtctcccttcagccttttcccagggtcagggaggggagccagggctgtgcacactatctccactgcaaggggagggctgaaggtccatagaggaaggaacttacctagtgcaggggcagcacgtgcgcactgaaccctggagtcctgatctctagcctagctcaaagcctccaccaggatcgggtggcagcttccatttgaggccatttctaggccagcggccctgcaatgagaagcattctggagagatgccagatttcttctcccttgcacggtagtcccctgcgggaagccactcccagccccagaagagggattccctttctaaagcaaagcagtgttccctacttcacccaccccagagtcattccacagcctctgcctgtcctattggtccaagggtgctatggtcagaatgtccgtgaccctcaaaactcacatgttgaaaacctaatgttaatgtcagggtattaagaagcggggccggcacggcgcggtggctcgcgcttgtaatcccagcactttgggaggcggaggcgggcggatcacgaggtcaggagatcaagaccatcctggctaacacggcgaaaccctgtctctactaaaaaatagaaaaaaatagccgggcgtggtggcgggcgcctgtagtcccagctactcaggaggctgaggcaggagaatggcgtgaacccaggaggcggagcttgtagcgagccgagatcgcgccactgcactccagcctgggcgacggagcgagacttctgtctcaaaaaaaaaaaaacaaaaaacaaaaaacaaaaaaaaaaacaggcggggcctttgggagttgattgggtgggctgccccacctgaatgcggctagtgcccttataaaagaggcctgggggccggatgcggtggctc

SEQ ID NO: 588259 - DNA, 4001 bp, Homo sapiens
aataagtgactttatcaaggtcacaactagaaggcagtgacagtgtattagaacactggtcccagatgcctagttcagtttttcccagcaggccactccttaagcagtctaatataccaacctaacctgaccagcttagcaagtcattgatcttgagcacagcctagtcttcctctccagattaccaccttctcagtataatatgctaattctcatgtacatgcttttagacgtgtgaccagcatctctttccaccagatcaatccccagcctcccttccatatttgattgcaaactctcctccctaaaggatacaccctcacatgttttctccttaccagactgtaagcatctcttctgtagggatgctcacagcccctgcactaggtcctatttcacttattttttgagacggagtctcacactgtcacttgggctagagtgctatggtgtggtctctgctcactgcaacctccgcctcccaggttcaagcgattctcctgcctcagcctcctgagtagctgggattacaggcgcctgccaccatgcccagctaagtttttgtattttcagtagagacagggtttcgctatgttggccaggctagtctcaaatgcctgacctcgtgatccacccgcctcagcctcccaaagtgctgggattacatgcatgagccactgcgcccagccgaactaggccctatttctataggtgctaaaactaggctctgccagcaccttgtgcagcagttgctgcccaccttacctttgcaggaccctctctcatcttcttgatctgatccttatacttcactagctcagcatccaatcgagaaatcttcttgtcaatggattctgctctactgtccaccttaggggaaaatatcaaatgcactggtagttactgcaatacacttattccagaaggggcaggtagagaggaaggaatacagaggaagaaaagaggagcttaaggggaagggtgaaaaacagtggttcacaaagaagggtattcccaaccagaaaccctgggctttataaattattctcttaccccccgccacactgccccgattctgatataccaggtagccttcaagtgggttggggcagaaaataatttgagaatcactgagttgagttggaatttccctagaatcagagactagccaggctgagagttcctccaagaggcacatgaaatgggccagtgccaagtgaaaccagctgattgtagatctaatgccattccctaaatcggggatggtggcttaatctgaggggctagggttctgagttttgtgttactgagatccaggacgaaggcacagatatgttgacctaggatatcaagctgagtcctgatgtggactggggatgacagatggaagaagggtaagggatcaggcaggatgaggtgggaagggtgtatgggcctagggctgggtgaggtgagaggatcaaggcgagagcgagtggacgggcaatgggcatcaaaacgggttgggtgctggcagggcaaggcagtgatggggttaggggttccctggtttgtggcgttaggaatgacttgggtaacagggatgaaggggagaaggtgagatagagagggacgacgtgtaaggggcccaggacccgaaatgaagtggaagaatatgggcccggggctgggggtgggcggggtcgggtgtgtcagaggtcctgagcctacttatgcatgatcaaatgcccaccgtgccaatgcagtcagtcaggctgggcggcggagccttgggtttcgctttcccgaagagtcggttcatcttgagcagccgcgaagaaacccaaacactagagcaaaaccagaaacggaagcagagtcactcccgcctcgacttccggcccctccgtgcgcaagcgcaatatgcctcctggcgtttcccgattctttttccggattttcagccgggtcttccggggatggagagcaaaaggacttggtgctctcggagagagcctgcagggggcggggtgttggtagaaggagtgggaggggttttactgtagcaaggcggggcctcagttgagtgggtggggcctggaggcaactaacgcggcatagggcgagggcggggccggcaggccggggcggggctgggaagtagtcgggcggggttgtgagacgccgcgctcagcttccatcgctgggcggtcaacaagtgcgggcctggctcagcgcgggggggcgcggagaccgcgaggcgaccgggagcggctgggttcccggctgcgcgcccttcggccaggccgggagccgcgccagtcggagcccccggcccagcgtggtccgcctccctctgggcgtccacctgcccggagtactgccagcgggcatgaccgacccaccaggggcgccgccgccggcgctcgcaggccgcggatgaagaagaaaacccggcgccgctcgacccggagcgaggagttgacccggagcgaggagttgaccctgagtgaggaagcgacctggagtgaagaggcgacccagagtgaggaggcgacccagggcgaagagatgaatcggagccaggaggtgacccgggacgaggagtcgacccggagcgaggaggtgaccagggaggaaatggcggcagctgggctcaccgtgactgtcacccacagtgagtgtcgggcgccaggtgggctccatgcaggtcccgaaagcccggcggggtctgtgggtttagtcacgtgtcctccagaagcgtgtgaccttgcgcttgtcctggcgtccggaagcgtgggttattggttgtgtccgtggaactgtcttttgtcccgggcttgtgtctgtacacttttccatgtggccggtgtattttgtctctggtcatttgtgcgatcctgggtgtttgagcttctccgtgctttacgtcgtgggcctggttgtgtttgtgtgcccgcgcagttattgtgccctttgtgtcaggcatatattgggccatgtggtctacgactgctccgtgtgtgataagtcagaacttcgtgcatgccggggtgctcctcgtgtgctgagtgccttctccgtgtgcgccgcttgagttggccgtgggtccaagcgttgtactctgggcaccctttgggtctgcctactgttggagttgacacaccaccaaatgaagtcagtacaccggagagctgagtccatgaggtttctctagaaccagctaggggaggcccaagggtctgggaatctggagacctggattctagatcctgcggttttgagtgaccttgggatggacggcttcttctaagaatccggtttctcctctgtgaagtagatttggtaaccctggctcctgctgacctcacggagctgttgggggaaccaaaccttggtgtaatgtactgtacacaggctccctccttgctgtccgcatccctggaaaagaattggcgtctcttcttcagaaagaaaggctctgctgttcgtatgcatttgtctgtttacttagcacaaatcatggatgcactcaagtgtgttcagtgggagagacttggaggaaaacagtcacttgcccattacagcaagcgagacgagaccaatacaatacagggtacagggcagtcaagccacaggaagcagatggcttgtgatgaaaaaggtgggcttgggaatcagctagatctgatatcaacttctgattccaacagttgagtctccataggcagtccttaacttgcctgaagtcacagtttgctcatctgtgaaataagaagtaataggtagatctacttcgtggggtttatctgaggattaaattagattatgcatgaaatgcttaaaatgttagcagatatcattcatattgttagttattataatagaggaaacagagatacttgaggaggtcaccagaggaaagctgggtggcatgggggcaggctctgtggagtaggtggcatatgagctgggccttgaaggctgggtaaataaatgtgataaagtgtcatcctatattg

SEQ ID NO: 588260 - DNA, 4001 bp, Homo sapiens
gtaggattgtaggagccctggatttgaatcccactgttttacgctgttttaccaccatcctgatgggttggagcaaagacttccactctctaggacaagagcttccaactctcccaagaagggccctccaggtgtcagggcctctgcacttgctggtcattcagcctggcatgctcttcccctgatctgcttgctgctggctccttctcatcattttggtctcttctcaaatgtcacttctgcagagaacacccccgactcctgccaagccaatgtgaactttccacacccacaaagataccttttttcaccctgtttatttcctccatccctcttactatgaattattttcatttttactatttcatttatctgcttacttatttactgtctgtctccccagcttgatgcaagatctatgagggcagaggccttggctgtcttattcgttgctgaatcttcagtgcctaggacagggcctggcttctagcaggtacctagtaaatatttgttgaattcatgttccaactttctccttctagaaacaaggaaactgaggaccaaaggcagaagaggacatgttggagatcagagtcaggatctagggatagaagccagcgagatgaaggggaactcatctcggagttctgacctctgaggtcaggaggctgtgacctcagaggaagcccatctgctctccaggcctgtttcctcatcggtaagatggagtgaaacatccagaccactctccaagaggcctggtactaggagtgagacccaacccattgacaaatatattctgcgcagcatccgcgcaccccagacactgctaaagcaccccaaaagccgcagaaggtgaaaactacgacacccatgatgccccggacggcgcctgcgcacggcggccggcccgcagcgccgcgggctccccctagcggcgtccgggagcggtgctcgctccgatccccgaggggcgggggccccgcggcgcaggcagtctgggcgcgcggctgcagcggcggagccggagtcggagccgggagcgctagcggcagccggatcgcagcctgcggggcccgccgcagccatgggcaaccgcggcatggaagatctcatcccgctggtcaaccggctgcaagacgccttctctgccatcggccagaacgcggacctcgacctgccgcagatcgctgtggtgggcggccagagcgccggcaagagctcggtgctcgagaatttcgtaggcaggtaggcgcggcgcgcccccaggcgccgacccccgacccccgggatccctggagtccccgcccggggcactgacggcgcggcgacctcgcagcccccgacgctgcacccgcggccggcgcgccccccacccccagccggagcgaggaggccctccccccaccacgagagcccctcggggcagcagcgccccccgctagtctgcaaacgtcgtcaagcctccggctaccgaatcacgccccctcctccgtcccatcctttagggcagacaacgctctgccagaagccccgggcaaagagctgccccccgcccccaacatgggcatggagagagcccgcattactcagcgtctccgttgggctccgggagtcccttggagcgggcagcacccgggggcagcgtcccccacaccgggctcaatgggggacatccccctacccccatgggaattcctgggccgtggcagaggtcagcccccgcatcccagtccctagaagaggacgtagtcccgcgggcatcgaggaccgggcacggcctcccgccagcacacacacacctctgcggctcccgccgccatccgtgcgcagcgcggcgaggggggaggcgcgggctgcaggatgaggaagggaagaggggaggagaaaccacttcttatccttttctgagcagccggccccttgcttcgccacggcccctgggtggggggcgcctgtcagtgtcgccctccccttggcctggccagaggaatcgtgttggagggagaggcggcagagggcagagatgactaagacagggatggcgggaggggggagccatttgcagaacctaatccccctcccgcctctgatcccacaaggcgctgagaggcctaggtggcggagagaggaacaaccgcaaagacaaagggtcgtgggtttagcggggcaggcagggtcgtgacccgcaggctccccacaaacccccaaagggaggcagaaatagtttttctggtgctgaggagagagaagaaagataggagctctccaggtactggaggtgggttggggggctgggcagactgggggatgaagtgagagagtttacactgaccccgtctttcatctcccccccatcttcttcagaaactcttgctttcttccaatgaccttcagggccaaaaaagtgactggcacatgggagagggaggcaggggcccttgtccgcagaggtacagcagttctgtccaagccaggttctgctgcaaaacctcaggcaagtcacttgccctctctgagcctcagtgtccccatctctaacatggacagtgggactgggtggttgttcctgcccctcaaatgtcctgggaaacccatgccagccctagaggtgagagggagagggcctgactggagccatgtgtgtgtgggacgttggaaggccaccgtgggggcggccgtgcccatctggtcagcagaggggaaggcatctgtctctccaatggctcctgcagagccccccttctgatcacatgacccccggagctgcagagacacaggcaagagacacaccacgggccccttccccaagggccagcagtcagggatatccagcagtttagaatggagaaaccatattcctacctctcgtcctttgaatgttggctgaactcctgccccatgccaggctgcgtgcttcaggcttggggtagggaggggaccaactggtgatttcagcccgcatctactgagcccatcccatgcatccccctatgctgagtccttcataggctcacaggagctcccaagaggcaggtaccatgatgcccatcctacagatgaggaaactgagaccctggaggttagatgccttgcccaaggtcacacattcagaaagggcagcagctgttagactccaaagcccaattcctaatctcgacgctgcacatcctctgacagccgggtcctgcaccaggcacagggacgtgtgggtgggtgggcctccatttccccatctgcggaatggaaacgctgacagccgctgccctgccttcctgagaaggtgactgtgggctccaccgagttcatgggtggaaaggtgcttttgtaaacatgcgggagggggcgctgatagccaattaggcttggggacctgcatgcccagcccctgccttcctggagcccatgacgcaggggccatccctgaccacagcagatttcatcgagtacttgcttgttgagtggtggagcaaggtttggaccgtgccccaggaggcctgggccctctggctgccctctccaccccaatgcccttggccgttgtccccacaggaggatgtgcagggtgtccagatgcaggcccagggcaggggagggggcttaggttgatgtgaaggagtaggcagaaaagcattcatgatcctctgaaagctagtgagaaggccagggaaactgaggctcagtgggttccactgtctcagcctgccagctccctcaagggctcctgacctctccaacagggctcagtccccagactggtgagcatagtaacagccattctgtctcctggggcttcccaggagccaatccccaacagaaaatgcttcacaggaaaatgcatcagggctgccccaggcccacccgggcttctgggtgctcaggaggatcctgctgtcaactctgcaatggaggtagccttgcagctgcctgggatgctgctagaacttgtctgggtctatactatttcttcacccccttcccttttacagaagggaaaactg

SEQ ID NO: 588261 - DNA, 4001 bp, Homo sapiens
cgggtggatcacctgaggtcaggagttcaagaccagcctggccaacatggggaaaccccgtctctactaaaaatacaaaaattagctgggcatggtggcgggcacctgtaatcccagctactcgggaagctaaggcaggagaattgcttggacccgggaaccggaggttgcagtgagccaagattgcaccattgcactccactccagcctgggcgacagagcaaaactctgtctcaaaaaaaaaaaaaaaaaaaaaaaaaaaaaaaaaggagcagcatcttggaaggaagagctgagactgctctccatattgggaaattgagacaaggccacagacttaatgcacagggctagagacaaccactcagacatctggatggtcaagaggcccaggcatcggcccagcttagccactgctgatgcagggcaaatgatttcccttcttagcttcttcacctgtcagatggcatctaatctgaatgtgagtgaagtgtgctgagtattgcccaaagagccagcaccatggccaaggacacacctctgcaatcagacagatctgcattcaaattagcagcttagggactttcacctcctggagccttagtgtcctcatgagtgaactaggatgccaagaatagctccctctcagggtggctgtgtggagttgagatttagagcaatgcgctgctagggagctaccactaaaagagactgagaagaggcctggggccatccataccttgcaactgctgtaaaagcaaagctctctgcagcatggagccgttgaggagggaggctgagttggtgccctggagattcagaagcggctgctgtggctgctgcggggggagccccctgtgtgttgggagggggtgtcagagggttatttggaaagtcagaccttccttcttccccaaggcttctcacctccattctctgccccactctgtggtagacagaggaccccttggggctggaattggtgatctccaggactcaaacggggatggcactgggaaaaaggatggggatcgggagctccgagacatgggtctgagtagcaaggctgaagccatcgcgcccgagaggggaactcaccggctgacagccatgggcaacggggcctgtggtggggactgctggagcagctgctggagctgcagtaactgctgctgctgcaattgctgctgctggagctgctgctgctgtaactgctggagctgctgctgctgttgctggagctgctgctgctgctgctggctgaacatggtggctaggggcagaaagcagagtgaggcaaggggtccccaccataagtcaggcctgctcccctcccatccaccgccactccccgcagccacagcccgcagagactgctgaggagcttcacagctgcattcccagtcctgccaagagcctgccacactcgcttggcccatccttccaagttacctccagtcctgctaggggcaagattcaaccaccctcctgccaatgccccccagacactgccaacagcccctccttcaagtccctccatctctccatttctggcggctccatcctcccaccctcagcctcagcctctctctgcgcccatcacttcctcactcacagccccttttcaataccgcaaccctctctgggcccccgggtgtcaataacatcggcacccgtccaacccggtcaccgtggtcctgagctccgtgggacggcttctctccaccaccgccacctcctcgcgccccactccgcccgctcccaccccgccagccgcctcctccgcagacacagccagctcgcaggcggagccccacgacccagccgcccccggccccgcacctcgcctccccgcgcgccctcaacgctcaagtcgcccccacggatgggccggccccgcagcccccacgcctcggccgggcggctccggcccgcgggctcccggcctccccgctgctactccggggcctgtgggctcgtaaggcccaaatgcgggcggggccggccggggcagcgccctctgggggacgggaggtccaggcgcctccggccgcgccacccgagcccgcccagtgcacaagtcacgctggggggcggctgcggggcgctagcaggtgcgagggggtcctgggcggctcataccctctgtcccgcgtcctccgcatcgcgaaggggaggctcggagaccaaggtccgtctgccgcccggaagggtcagccatcccgcggggcatcgagggggacttccttcctgttcccaacccacctccctgcggccgccgcggtcctgcgatcctggggccccgcgcggggctgcggtgagagggggcgcgcagttggcggatgtacattcattcgagggacccaggccaggcgagagggcggccaaggtcttacagtccgtcaggagtttgcccacggaggggtggagggagagtccccctccaagtcttttctcagtagatttggctaaggaaggagtaggtgaggagggtcgaggccaattatcaaaaaatagccctaggggccgggcgcttccgcctgtaatctcagtactctgggaggccgaggctggaggatcaagaccagcctgggcaaaatggcgaaatccctctctacaaaaaatacaaacattagccagggtggtggcgggcgtctgtagtcccagctactcgggaggctaaggcaagaggatcacttgagcccgggaggcacaggctgcagtgagctgagatcgcgccactgcactccagcctgagcgacagagcaagagctgtcaaaaaaaaaaaagtaaaaattttaaaaagaaaaggagaggaaaacagagccctgctcccttatcctgcacctaaaatggtcctgcccccaagaacccccttaacaaccgctgtatccccccatccccgcgccgtaacaatccttggctactaagtagtaattcttttatttattttttatttatttatatttttgagacggagtctcactctgtcgcccaggctgaagtgcagtggcacgatctgggctcaccgcaacctccgcctcctgggttcaagtggtcctcccgcctcagcttccagaatacctgggactacaggcgcgggccaccacgcccggctaatttttgtatttttaatagagacggggcttcaccatgttggtcaggctagtctcgaactcctgacctcaagtgattcgcctgccttggcctcccaaagtgctgggattacaggggtgagccacctctcctggactaagtagcaattccggctcccttttctgtggctccctgccttgtgcgtgtcacagcctgggcgactcctcgccctgccttccgcgccgacgttgggcgggcagggcgcgcgggggcactggcggcgcgcagacccgggcaggcggagcgcgttgacggagggcgctcgggcagcagaattcgcgcgtccataaatcactgcagtcatgtgacgagcgccgctccaaagctctggactggctctgcggcagatgggcggcggctgaggagcctaactcaacctggactagtcgtggaagagctaggacttagaggcgcgaaagtgactcagcgaggccggagcgcagggtggcgtccagggccccggggacgtcggcgcctatgggtgaacaggcagcctggagggtggggacttcgaatgctgggctgagaagtaggctttatcctctaagggtagggagcactggagaagggtgtgaacctcatgagtgacagcatcaaatctgccaattagaaaacccgctcccgtgaaaaccaagacagaagcagtgaggagagaggggcgagtcaagactgcccaggctctactgggcacagcggctcacccctgtaatcccagcactttgtggggggtccaggcaagtggatcacttaaggtcaggagttcgacaccagcctggccaacatggtaaaactacgtgtctactaaaaatacaaaaaaaattagccggatgtggtggcgggcgcct

SEQ ID NO: 588262 - DNA, 4001 bp, Homo sapiens
cagcaccatggccaaggacacacctctgcaatcagacagatctgcattcaaattagcagcttagggactttcacctcctggagccttagtgtcctcatgagtgaactaggatgccaagaatagctccctctcagggtggctgtgtggagttgagatttagagcaatgcgctgctagggagctaccactaaaagagactgagaagaggcctggggccatccataccttgcaactgctgtaaaagcaaagctctctgcagcatggagccgttgaggagggaggctgagttggtgccctggagattcagaagcggctgctgtggctgctgcggggggagccccctgtgtgttgggagggggtgtcagagggttatttggaaagtcagaccttccttcttccccaaggcttctcacctccattctctgccccactctgtggtagacagaggaccccttggggctggaattggtgatctccaggactcaaacggggatggcactgggaaaaaggatggggatcgggagctccgagacatgggtctgagtagcaaggctgaagccatcgcgcccgagaggggaactcaccggctgacagccatgggcaacggggcctgtggtggggactgctggagcagctgctggagctgcagtaactgctgctgctgcaattgctgctgctggagctgctgctgctgtaactgctggagctgctgctgctgttgctggagctgctgctgctgctgctggctgaacatggtggctaggggcagaaagcagagtgaggcaaggggtccccaccataagtcaggcctgctcccctcccatccaccgccactccccgcagccacagcccgcagagactgctgaggagcttcacagctgcattcccagtcctgccaagagcctgccacactcgcttggcccatccttccaagttacctccagtcctgctaggggcaagattcaaccaccctcctgccaatgccccccagacactgccaacagcccctccttcaagtccctccatctctccatttctggcggctccatcctcccaccctcagcctcagcctctctctgcgcccatcacttcctcactcacagccccttttcaataccgcaaccctctctgggcccccgggtgtcaataacatcggcacccgtccaacccggtcaccgtggtcctgagctccgtgggacggcttctctccaccaccgccacctcctcgcgccccactccgcccgctcccaccccgccagccgcctcctccgcagacacagccagctcgcaggcggagccccacgacccagccgcccccggccccgcacctcgcctccccgcgcgccctcaacgctcaagtcgcccccacggatgggccggccccgcagcccccacgcctcggccgggcggctccggcccgcgggctcccggcctccccgctgctactccggggcctgtgggctcgtaaggcccaaatgcgggcggggccggccggggcagcgccctctgggggacgggaggtccaggcgcctccggccgcgccacccgagcccgcccagtgcacaagtcacgctggggggcggctgcggggcgctagcaggtgcgagggggtcctgggcggctcataccctctgtcccgcgtcctccgcatcgcgaaggggaggctcggagaccaaggtccgtctgccgcccggaagggtcagccatcccgcggggcatcgagggggacttccttcctgttcccaacccacctccctgcggccgccgcggtcctgcgatcctggggccccgcgcggggctgcggtgagagggggcgcgcagttggcggatgtacattcattcgagggacccaggccaggcgagagggcggccaaggtcttacagtccgtcaggagtttgcccacggaggggtggagggagagtccccctccaagtcttttctcagtagatttggctaaggaaggagtaggtgaggagggtcgaggccaattatcaaaaaatagccctaggggccgggcgcttccgcctgtaatctcagtactctgggaggccgaggctggaggatcaagaccagcctgggcaaaatggcgaaatccctctctacaaaaaatacaaacattagccagggtggtggcgggcgtctgtagtcccagctactcgggaggctaaggcaagaggatcacttgagcccgggaggcacaggctgcagtgagctgagatcgcgccactgcactccagcctgagcgacagagcaagagctgtcaaaaaaaaaaaagtaaaaattttaaaaagaaaaggagaggaaaacagagccctgctcccttatcctgcacctaaaatggtcctgcccccaagaacccccttaacaaccgctgtatccccccatccccgcgccgtaacaatccttggctactaagtagtaattcttttatttattttttatttatttatatttttgagacggagtctcactctgtcgcccaggctgaagtgcagtggcacgatctgggctcaccgcaacctccgcctcctgggttcaagtggtcctcccgcctcagcttccagaatacctgggactacaggcgcgggccaccacgcccggctaatttttgtatttttaatagagacggggcttcaccatgttggtcaggctagtctcgaactcctgacctcaagtgattcgcctgccttggcctcccaaagtgctgggattacaggggtgagccacctctcctggactaagtagcaattccggctcccttttctgtggctccctgccttgtgcgtgtcacagcctgggcgactcctcgccctgccttccgcgccgacgttgggcgggcagggcgcgcgggggcactggcggcgcgcagacccgggcaggcggagcgcgttgacggagggcgctcgggcagcagaattcgcgcgtccataaatcactgcagtcatgtgacgagcgccgctccaaagctctggactggctctgcggcagatgggcggcggctgaggagcctaactcaacctggactagtcgtggaagagctaggacttagaggcgcgaaagtgactcagcgaggccggagcgcagggtggcgtccagggccccggggacgtcggcgcctatgggtgaacaggcagcctggagggtggggacttcgaatgctgggctgagaagtaggctttatcctctaagggtagggagcactggagaagggtgtgaacctcatgagtgacagcatcaaatctgccaattagaaaacccgctcccgtgaaaaccaagacagaagcagtgaggagagaggggcgagtcaagactgcccaggctctactgggcacagcggctcacccctgtaatcccagcactttgtggggggtccaggcaagtggatcacttaaggtcaggagttcgacaccagcctggccaacatggtaaaactacgtgtctactaaaaatacaaaaaaaattagccggatgtggtggcgggcgcctgtaatctcagctactcgggaggctgaggcagaagaatcgcttgaacccgggaggcagaggttgcagccgagatcacatcactgcattccagcctgggcgacagagtgagactccattttaaaaaataaaaatcaaagactgcccaggctgccaagcaagcatgttaacaccttgatctgggtgctagcgttggagaggtccaggattgaatcgtgactcccctgccttgtggctaggtgacactggctgggggagaggcctcttagctggtttcctccttggtgaaatgtgtgccccctcccggggtggtaaggatgacattacataatgcttagcactggcacctggcacagaaggagcttagcaaattgccaaagtgaaaaaactaaaaataatgcttgtgctggtgaaggtggaaagccagcactaacttcctgtgttggttcatctttctgggaagcaatttgcaaattttatatcaagaatcttgggccgatgcagtggctcatgtctgt

SEQ ID NO: 588263 - DNA, 4001 bp, Homo sapiens
atattaatacaaaccaccctagactcatgccttagtgctatattattactagtttcccctttaaaattatgtgtggaaattactatcctgtttcataaaggttactggcttggccaattaataccagctctaatttttattggattaaaatacatcacttcagatatgtaaactttcttctatacattaccacacacaaatcatttgagtatattaaaactaaaaaatcgacctactgccatcagaaagaagtctgagaaatagcttcatttattttcaatattataccctaaaagaaacttgtaccgacccttaaatccttatcctaaacacttggcaccagatgtgtttcagaataattttctaggttttagtaagattattacggtttacattgtgttcattattggatatcctcaatagggctcttgattaacatcgcataattgaacactgccagcatattacacgagtatagtttattattactataaggttaacacaatctacttgaaatttacctacagccagaaaaacatgctatttttctagctaggaatacaaaagggtgcaattactactacccatagaaatattcagtagtcctcatgtgaaaacagacttccatgctactagggagggggagaaaaagagaaaccacccactgttttgttctttcttccttaaatagcattcggagaaatctaacctacaaaggcagcagacagaaaacaaggtcacaatttggccaacgatggcatgggctttatctcccctaaatcttggtagtatcccagaacgcagcgttctagtcgctacctagttaagaaaaaggggttgactgttttctgaagccacgccctaaatgaagtgtcccgcatacagtaaggacaacaaattttaaatgtccctactcgctttcccccaatctactttaattggggggaaggggacagggacatttaaaatttgtctaattttactgatcgattacagccaccatgttctagtacggtgcttcaggactcaaacgcaaaagtttctcaaagcccaaaatttggccagtgtatactagcagaaaatgatgcccaaagtccactcaagttcttaatcggccttaaaatgaaactcctttaataataccctcaattgtatgactgcggctaacctataatggcccaaatcaccatacccagtaaacattttcgaatccccatcaagctcatttttcggggggtcgcctccaaagcttattcttataccactcacttcaaaaacaagaaaaagaaaagtgttcctctgtgttaacagatgaaaatgaccatttgaccattctaaaccacaaactagtaaaagctgcatcaccccgtcagcgacagggaaagtgtgtcacggttgctaaaggaaaaaggacggcaccaggtgggttttcctggactggttcaaagaactggaactgagaccagctactgaacggcctaattacttcggccacggccgagaaaaaagtgacgggatggtcactccgcgtcgccgaggaccccatgacccccaagttgcgccggttcctacccaggtactaaatgcggcccggtgggcactcttccctcaccctccgcgcacaccgaacaaaggcccaaccggcccggcgcggccaggcacccaaccatgtccgactgcgcggggcgccaggtggccgcgaccccaaaccccggccctcgccctccggccccgggctccgccccccaggccccggcccccacccccgaccctactatgcctgggtcgccccgcccgcgggggccccggctgagggagccggctcggggtctaagaaaggcgcccaccggtactcgtagtgttcgtcgaagtacttgtccgagtagtagatctgcttgtgggccatcctgctggcgcgctgcagaaaatgaaacgagagcgcgaagagcgggcgcagcagacaaaaccacgtccagcccaggcaacaactcgccggagactaacgaccgcagtcccaacgatccggatttgaatccgacagcccgccgccgattggacagcagcgccgaccaatcaccttctgcggaagtcggccggctgccagcctatcgtcgccgccgcctcgcaaagtccgcttcctgggtcagccaatcagagatctgttgcgaggttgcccgagggaagataggtacgtcacgggggtggcagggcccttaacgggcaggggcgtggccagaggagggcgaagtcgggacgttaagggccgcagagcgcgtgcgcaggaacgtggaaagttccaggacacggaaccgttgggacggaggacctgaaggtggagtgaggtatcacggggtttggtgatgacgtagtcggtcgaggccggaagcgtgggccacagggctttgagcggaagctgtcgaccttgcacggtgatggcgctcctcgtgatcccttgtatcccctcaggctcgagccaggagcctaggtccactttgaaaagtagtaaaaggcagaaaggttctgcggtgtgagggggagggcggcttcgtggtcggctgggtcgggggagcgccgggcggccgcggcgtggctgtgtccggggctgccctgcgcagccggccgtttcgccgcctggtgcacttgctgagcttccggcctggcccgtcgcggggctcctggcgcccccctagacgactgtgtggagaatggagcctgcggagccacgcgtagagagaggcccggagccggcgcggtggcggcgggcgccagtggtcccagccactcgggaggccgaggtggagtgtcgcttgagcccaggagttccagacaggcctgagcaacagagccagaccccgtctccacaaagaaagaaacaaatgggccagagacccagaatgctttctgtagcctaacctaatgttcaaaaccagggcagacccaagccatggaaagcttgagggaataaaataatattctgctgcggccaagaataacaatgctaattcctggataaggggatttaaaatgatgtttaacaacttctggtcttttaatattgacccaagtttaaaaacatgttcatataaaaaagttactggaagaaatttataaatgtaactggtggttatttttagatgacagaattaaaagtgatctttttggtattttttccacaacgagcacgtgtcatttttatgttaatttcattttatgcgaaatgctccagcgcagtacaggctagtgggttcagggtggctgtgactaagtaatgtagatggggtaccttagacaaagtttccagactagaggctggaagtaagaggtccgggtgcccttttccacactgcagaccacggacttttccggtttctgaacaagtgagacaggccggctaaggacatttataatctccatgggtgagggccccaccctcatgaccatctaatcttgattacctcccgaaggccccacctcctaacttcctaatacaatcacttcttgggggaagagggtgtttggaattccaccccccgcccttttttttttttggagacagtctcactctgctgctcaggctggagtgcagtggtgtgatcttggctcactgcgacctccccctcccaggttcaagccattctgcctcagcctccagagcagctgggattacaggcccagctagtttttgtatttttagtagaaacgggttttcatcattttggccaggctggtctcgaactcctgacctcaagtgaactgcccgccttggcctcgcaaagtgctgggatcgtcagaggcaagtgaaccagagcaccttcatcttaaacaggagctgggtaagatgagcctaaaacctactgggctgcattcccagacagttaaggcattctaagtcacaggatgaaatgggaggtcagcacaaaatacaggtcataaagaccttgttgatgaaacaggttgcagcaaaggagccagccaaaacccaccaaaaccaaaatggcgaa

SEQ ID NO: 588264 - DNA, 4001 bp, Homo sapiens
gggtttggggatgggaagtgatcccgagacctctggcccttcagatgtcaggacaccctcactcccgacaaagatgcctttattgggcgacagacgcggggtggggcgctagcgggggtgcacggcgggccggtaggccgccaggatctcggcgctgtgcggacacgtgtatttgaactctttctcctgcatcgcgctgtccaggtagcggcgtacgccgcgcagctccgcggggatgggcgcctggcggaagtgcgcgcacaccgtctgcgggcaggatcgcggggcgcggtcaggacctgccgtcccccaggcgcgccgcggtcaccctcccgcccgcccaccttccgtgctcacgtcgacgatgtgcagcttgggcaggaggctgcagtcggccagcgtgagcctgtcgccgtccaggaagcggcggcgggactcgcgcagctgcggctcccccgccagctcgtgctccaggggcgcgcgcaggtagctgtccagcctggcgagggcgcgcagcagctgctggtacagggctagggggcaggcggcgcggtgaggaccaggcccagggcgccctcccgcctgggcacccgaccccctgaccccgcttcaccttcgtcctgcgcgggcaccgggttcttgatgaacgcggagaacttgtggaaaacgtcgttgccggcggtgttggactccctgtaacgaggcgccaggctggggaagctgcgggatgagggggtgggactccattagactgggggcagccccgtcccggccccacagtacccccacagcgccttcctgggctctgtcttgcgcgcgtcctccctgggcccccctcttttcccctcccaccctgccggggctctcactcgggcggccccagcgtctcctccagaaagtcctcgatctgcagcgtgtctgtcttggcgtcgctgtcatagagcaggatgggcagctgcgagccgggggcgaagtccttcagcacgtccggggacctgcgggcagcagcggggtgggaggaggccggcccaccagtgtgcgaggccaggcgggggtccacaggatggggcctcacctgcgcgtgtccaccgtggtgagggtgaaaggtacgcccttgaggagcaggaccatgaagagccgctggcaggaggggcagtgacccacgctctccccgtcctcactcgcctgggtgggtggagcgggggtggggggtcagggctggaagcagacccaggcatcctgccgccaggctgggcgggacccgcctcccactgccagtgggattggagggacgccagggctccagcttggtcggcgcgacttccaagtgcccagtgagggcccttgacttggtccccagaacgtggggaggggggcagagctgctgggagccttgaggcctggggcaggcttggcccctggaatcttgtcagagcctggacagaggccaggcccctgggctcagtccccaaaagctggttgcaggggtggggtgggcctcacaagctgttttctgagtgattcacacatgagactgggcactgtggccaacagcacatcagtcccccaccccagtccccgacctgagagctgatggggctgcctggcccagcaccccccatcctggaacaccgaccgtaagctccactgttggcagcctgcttggtacctccccaccaaggagctctcctccagaagactgggctgggcccaggagccaaggctgggagcaggaccagggccactgacccctctctgggtgactcgctgggtcccactttactcagcctctgtagggctgcctgagtccccctagccacccacaggaaggggctcagacattactgggaggcccaccccacagcctgccacagaaagcaaagcccagaaaagcgcttcctcccagacaccctccccgcagctgagtccgccctgcaccttgacaaacagctggagcttggtctccgccatggtgggagctgccgcggtcaggcgcgggtggggacctggggagctctttaagtctccctgtgcgccccgccctccctggccgaggggcccgccccgtggagccacctaggcgggcagatgaagctgcccagcgcgcagaaccagctgcctgagcaacgccagcccggccccggggtgtctgagcctgagggtgtgacctcagggtggcggaatggtgtggggggctgccctggacttgagtctggtgtgcacggagatccgcccacccggtactgagtgtgctgggagccagcgtggtgggtggagaccagggggcagggcatagggagagcctacaggccagaagggtgcagggggtgtcacctgggaagggggcggctctgggtcaggaccacctccaccgtgaacccagctcagaccctgccctatggctctcccttccgcaaataccccttgtcagggctcccagcccagaaagccagtgggtgtgggtgagcaggagaaatggcctgcccagcctggcttcagttccccatctgcagcaccagggcatcgggagggtgataagcccacctgggggagccgccccttcccagctacggagcagtcaggcagggccctccccgctcagggcagggctcaaattccagacctgcccgcaacagggcggggaggccagcctggctttggtgtttggccggcagtgcaggtctccaccccacctcccatccctcccactggcgctcagcgcaggtttcttacccccaaccccttaacctttaaaaagaagcagcaggagaggggttagaagccacagcctgcgtggctggaagaaagaggccaggggagggtggtggtccacaggtgtgagcctgcgctgagcctcctggcgtgattggaacccacagttcagtctggccctttggggtcgccaactgtgccttcctcccacctggccctgacgctttagggtgcagccccagggaggtacaccgaggggagattccacccagagacctggggtgcccacaggattggcctggccacacctcccccaggcggtgtggtgcctcaccagcctggacagggcagctgaggtggcactgctctcctgctcaccttctccccagggccttggtacgggcccctcatccgtccccggtggaacacactccagtgctgccccagtcagcccagcctgatgcttctctggataccacgccagtcggggctcctggacacagagccttggaaataccatgtggctgccccatcctttggtgtcctgaacctcaatttccctccatccggcctccacctcgattccaagccctagtatttcagctctttctggacactgtggttatagctccgcttgctggtttcccacatccctggcaggcaaatggccaaccacagagaagccccaggcccccagccccctctgctgccccggcatcctgtgtctttaacaccgacagacgcaccctcacaaacccacaggaaaaatgacggcacggacagaggccgtgaaccggtggctcagaaggaaaaagaaaacaagacacaggaagaccattcacctcacgcccgtctcaagaaacaaaccaacaagactcggttcaccgctgcagcggccccactgcgttctgtgggcgtgggctgtggactgtggagcggcagtggccatccaacacccccctgtgccctcgccacctgggaatcagcccggtggcttccttttttttttatggtttaatcaattcatttatttactagaaacagggtcctgccatgttgcccaggctggtctccacctcatgggctcaagtgacccacctgccttggtctcccacagtgctggaactacaggcgcgagctgccacacccggccggtttccctgtgaagggcaagtgagtgctggctgccccactgcgtggcgtggcgtggcgtggcgtggctccgtggcacggccaccaccctgtctatgggagactccagttgtgtccagggagaaggacggaaaagg

SEQ ID NO: 588265 - DNA, 4001 bp, Homo sapiens
cctgggacagccacagctgcctgtctgttatcgcactacacccctgctaaaacaactaaacactgcaacagaatgtggtatattctaagagtgggtagacttggggctcagctattaactcgtgcttttttaagcaagtcgtttctctctaggattgcttctcttctattaaatgaggaaggttaaactaagggtctaagaagtcaattttaaaattctcagacaaatgttagagaccacccaatgaaaatatcccctaatcacttaaggccaacttcatctcacaatcacagcctagtttagtccaacctacccgctataaagttgcatattcgggcatattacatgttcccactaagttcttattgggggactgatttgtttaggaagcaacatggtgcagtcaaaaactcaagaggctgcaaactagcagcacacccaccaacccatccatcaaaaggttccgcctggctggcacagtaacttgagactgctggatctgaatgcctttacacagagcactactatagtgcagcaaagcctcagtctccaacacttctactgtctcatgtcaagccagcttctctcgtatatgttacctacctggctccttaaggtttgaatttagggtagacactactcctatatgccccagtagtgccctattctcccttagttggaattttttaagtgaatgaaaagccgtatttcatttcttctagctaaatttcctacttctttgtattattaagtaggtcttttccactcatgatcctaagcatcacacacaggttaaggcatccaaaggtcaaactgccatcctacctgccccatttttacttgagtttggctgagaacattctctattcacctcttcatccctccctgattggtttaggctaatcttgggttctgcttaggcaatattgcctaccaaagctgttcccagaggaagagctccagaagtcctagctgtaaatcaatcgctcaacgatagcaaactcctaccgcgcttggcagttctttctccagacctagatcatctttcgagttccctactccctccttcctcctcgtaatccaacactctgtacaccttaagtgcttaaatgctgaactgcattgctacttttgtttgtatctctcaaaaacgatatttccattcttatttttttccgccctccttttctaataacgagttctgtgctcggctcagacttataagcttataagtctggaaaaactgcgccaatgcggttgcttcagagaccggactaaaggcacagcaaatgcttaatgaaaagttgctgaattgaacgggcttcttccggctccggagcctgccaccctacacttgctttctcgctccgcccgcgcccagaagcactcaaacatgctgagaaccgaacaggcttctcgagcctaggtttctgaaagaccgggccagggtctcgtttcctgtttgcactgctccctaacctcctaattcagcaaggagcacgagtcacacagaagctctcggacccactgtggaccgagtttccagacaagtcctctcgccccaaacgcgcccgcactctcacccggaccccccggcggctcgccgtgcggctggggcccgggggcgccgccgtccaggatggcgaaggcctcgtcgttctcgatgcccgcaatctcgctctcttgctgcgccaagaaggccgcagccgggtcttcttcgccggcgccggccactccgttccccagcgcgggaccgccaggggcgccggcaggggcgccgaacggatccagctcagccatggcgggcaactgaacggcacggacaccaacggtgagacaaaaaccaaccgacccaccgacaccacgcccggcagccaccgctgtggtgccgactgggagaggaggacaagcgccaggagggagacgggtaaagcggaagccctacccgtgtatccggtcggtctaggcggtgttgcagagccgaaaagggaacaaccaatcagaggacaacaatggttcaggagctacccaatcagcaagtggaggggcggtccccctaaaacaactcgtgactggggtagggcgggaggtgagggaggtgagctgcgcgggccccgggaggcggaagtgctgcctgatagggagcgtcctacccaccccgtctgctggagctggactgaccagggacggccacccctgaggggactctagtgctgcactgggaggtgaggtgaagttagggcagcgacgattggccgattactgaagaggcatgccacttaggctttctgaacctcagtttcctcattcgtaaaatagaaacaagaatcctgctcttgcgccccctcccgggattattagaagattgaatcctaaaaaaaaagaagaagaagattgaatccttttatggatttgagggtccctggctttataaatttaaaatatttaattctttcagccagcctggattatttgctcccttagagcccatagatttactgtaattgattcagtccactccgatttttctcgcccataagtatttttatttaaaaatgaatatatcttatcttcttcaacgaagcacttttgcagccattacgtcttttcggagctagacagaagttactaaacctggaaaattccttaaggatcacttgcttcaaagggagacacggtggccctgctgttcaaggagcgtcagtgacccagagagtcagtgaccaagaggaaacgcctgtctcctggggacttccaagatactagctacagtctcttatatttacacctttcctccctaaggacagcaggaaaaagaaagttccgtgtttctttttaaatcagggagatgttaatagctacatggctcattttgtctacaccacagaaataacagtggttccagttaatcatgctcatgttgagggggagtgcttatgcaggggccaccagaagacccctctccttcactaccaccaccaccaccctaagaaatgaaaagccaaaaaaagaaaccaaaaaaccagaggtcaacaagaagcttccagaggtagtcagcaggggacaagaaagtgtttttataaaaaacgcacatatctttgatgacaaaaaaaaagggatagctatgaaggaaaaatgaagcaaataaaaattatttaaagcatatatttacttaaagcataattttaaagtcatttaaagtatgaaccataggaaagtgttgaagaaaaacatttaagaaagttaaaatgttagggtctgcaattgattctgtttccccttgtctgttgttttatgctcatccctaacatacattggcaacagtgcatgaagtattttcacattagccttgacatagtctcatgaggaaaagaggggcagggactactatgagagagcccaaggaagacaacttttagttgctcacaacagtagtagctccggaacagacagcattctttttggggaaatgcatgactttgggagaaactctcctgtgattcccttgctagaggaggcattacatattatgcaaaagcaacaaacaagtatacactcaaaattggaggaatagctgatgtgtttacggatgatttcacagaggtggcttggagctcagttttgaaatatggggaacgtttagaagagtcaataatgagggtctaatgttagtgtcatgtaaaagttcagaggtgggaaaatgtttggcatgttttggggacagtgagtaaattagttggagtctgaagagctcagcaagatgaataattgaaggaaaatctggggacagattctggagccctgaaagcattccatgttaaggaatcttaatggcaataaggaaccatagaaggtttcagataaaggaatgttttgatcaactgctgcttaggaggttaatcgggtccctggttgcaggatggatggggcagaggctgtgggcagagatgtcaggagtgacatgatgaaggtctgggcagggcagaggtatggagctgagt

SEQ ID NO: 588266 - DNA, 4001 bp, Homo sapiens
agctctatctcaccaatgctgaccaggagcccctggcaccagctgagaggatttgtgtgggttgtgacagtggagacagagaggcatagtttgagacacctaggcccttctagcccccaagtcattgctagccctacatccctgggaatctgcaatggttcaagccccattcccacacgtgtaatgacacaccatcacacccagagttagatacacaaaaatacacctggtgtttcaggcccctcggacacacagcaattacagatgcacagacacacccagcatttcacactcgcaccacctcagtgaccacagccacacaaacactcccagtgacacagacacaaattcaccaagtattacaggcagaacaactagtgttagagacacactcctacagcggcatgcagacacacacccaatgttgcagacaagctgccaggcacacagacacacacagacgcttctcaaaaagagagactagacggaaagaaagaaaatcctgaattttcaacaaggcgtgaaatagtcctgcccgcctgaagctactggaggggggagggggacaagggagcgagcaagcgagcgagctaacgctggaggagaggctcgggagaggagaggagccgagagggagagctgtccgtctggtgacctccccacggcccagcccccacgcacgcggagatacactactcggagcaacacagggacacccagactggctcacactgagccgcactggaggagacacacacgagcagactcacaaagagacacttggggatacaccataggcagactcgcacaagccaggaagacttacaaagagacacactggaggagacccactacatggagatacatccaggcggactgaagagaaaaccatggggacgccgaccgacacacacatgcacacacacacgcgcgcgcgggcgcgcggattcacacggacacacatgcactggcagacgcgcaaccgtcggttcgcatccccgggcgctttgaagtccagatttctgcccgagaaagaagccacctttgggcgcgcaaaggccactacgaacctccccaaacccaggaatttttccagaccccgcgcgtgcagctgaggggtggggagaacagggacactaggacaaaccgccggagccacctccctctagtccacagtcggccccaccaccaccaccacgcccaacccccggagcgcccggacgtggggggccgctcctccagcgcccccgcccccgagtttgcaggcaaagtttctcgtgaactttcctgtcgcccccgtccgtgggcccacgggtgtcccctcactcttcccgcacgcatgagggccgccggtctgctggtcagcccgggctctgagggtccggccgcgcgcactccgccgcagggtactcaccgcgccctcgggccacccgggcttcgcgccgcgccttccgaccgcccccggcagcgagcgaggcagggagcgcggagctagcaccgcccgccggatcccaccgccgagcctcgcgccgcgccggctggagccgccgcctccgctgccgccgccgccgccgcccgctctgcaccggctcttcagcgctcggcggctttaacccccccatcctcctccctccctcgcgcgctccctccctccttctctcgcccatgtgaccgcgggcgcccgctcggccgcgcgcgccctcgctcccctccccctcttgccttgtctccccgcgcctccgcggccgcgcgccacgacccctccccgccacgggccccgcgcgcccccgccttggcacgctctcgctcctggcacacgcggtccgctcgccctgcgcgggcctgtgagcccccactcccactcgcccagcactggcacgcgctctgcccccccgctggcacactcgtccgcactggcacgcgtggccccctcgcgttcaccctttctcgggcgcgccctcaagacggctgtggtccccgtgcttcacgcgcagccccggccgcgggtctcgcaaacgcgcgcgcgcacacacacacacacacacacccactcggcccgctcccctagggcggctgggcgcgcactcacccccgggatcgctccttcacactcactctccctctcggccttagccaggtctctcctgcgcacactcccgcacgttcaggccctgacggcctcgcaccgactccctggcacaccccgggccaactctcggggtcctccctccggcgtcgccgtgagaggaacgcgagccagaacccccaacccccactttgggcagaagaagccagccggctccgcctctcccctattgctactgccccccgcaacgactcccctcccggtcaccccctcgcgcgggggaaaggggcttccttgaccggggatggaccctgccgggagcccaggcccatgcctccagtgtctccgatgacaccaacaccactactcgcatgttcctcgcgccccgaggacacacagccgggggagaagcctccactggaatgaaggggtagggagggtgcactctcaatgccgggcacaggcgcacccctcgataggaggctcactcccttcgcagcctgggcctctgaggggccggggtgttcactgcactcgtccctgggcctccggtctggctgcaacataggagagtaaggttggacaacctgaccaacttctgaggccacgtgaaagcgcaatggagtggcaatggcagaggcagagaccgagaaagccacccccgtctccaccccttggatttgtcacctgacccttgacccataatcctgggccctgcccctccggggagctgctctagggctgagggcgaggagaagggagggaaatgtctccatgtttcctcacatccttccccagtaggctgcctagagcgcccgggccctttcccaacaaatgcctcagggactcccactgcagaggaaaatccttcttcccgccacggcctgggcttttcactttcacttccgtggccacagaatccccttcctacaactggcaggggtcggcatgggctggagctcagagacggccagctaggacttcaggacacacagcaaactagctgcgccccgctgagggtcagcgcacagccgcccacacaaggtgtcctctccccgggctctctgggccgccggcctcctgcttcccgtgccgcagaccgggattagactgtggacgcggggaaggaagggggcgttgcgacgggatcttgaggggagcaggacttgcccctgcccctgcggcgaagctctaggccctggcaaggttcggtacaccgggggccgctcctccccagggggctgaccggcctcggcgctctaatccggccggggaggggcggacggggtgaaaattggcgagtggtttggggaacggacttgacctccagatgccctggtgtccctggctcagcctctttctgccaggttgggagcagtcgggaattctgtcccggtccaacgtccccctcggcccccggggacgcagaggctgctgtcggcagagcagcagtccacggctgcggggacaagatccgcactgggagtccggggtcctggaagtggacgtgtggatgtcagacgataaaggaagggaagaggcgcacgtcggacctctgtccaggcgtcagtcggtcagcagctcctcccggcgcgggacccagcggcctcgagcgcttccccggggccgaagcgacacctggcggacggtgcgggacgtgcgttcccttctggctgctgctcctgctccgcgctgaggcctcggccacctactgaacaccgggggctgccacctctccacacagccgccacccggctcacaaccaattttcctccccccagagctgggtcaacagactagtagtggtttccgctcctgccgcctctgatgccctacctacacagtagcctttgagcttgtaagcctcagtgctgagccctccccaccgccttgggggcaaagttgagtttcttag

SEQ ID NO: 588267 - DNA, 4001 bp, Homo sapiens
gcatgagggtctttgtgtgagccccagtgtgagccctaggaccccagtgagattctgggtgtgagctctaggtctcaatgtagatctaagctaaagggtaagaccgtgaatctaagcatgagcctacagtcccagtgtgggtcccagtgtgagcagagttccaatgtgagtctatgtggaaactccaggactgaagtgtatccctggatatgagccccacaacgtaagtgtcagtccatatgaatgtaagcccctagaccctagaaggagctgaagtgtcccagtgtgcatctgagtatggattccagagcccccagaagtcctgtgcatgaactttaaactcctagtctttgtgtaggctcagggtctcagttggagtatcagccctgacagtgtgaaccttagctctatctcaccaatgctgaccaggagcccctggcaccagctgagaggatttgtgtgggttgtgacagtggagacagagaggcatagtttgagacacctaggcccttctagcccccaagtcattgctagccctacatccctgggaatctgcaatggttcaagccccattcccacacgtgtaatgacacaccatcacacccagagttagatacacaaaaatacacctggtgtttcaggcccctcggacacacagcaattacagatgcacagacacacccagcatttcacactcgcaccacctcagtgaccacagccacacaaacactcccagtgacacagacacaaattcaccaagtattacaggcagaacaactagtgttagagacacactcctacagcggcatgcagacacacacccaatgttgcagacaagctgccaggcacacagacacacacagacgcttctcaaaaagagagactagacggaaagaaagaaaatcctgaattttcaacaaggcgtgaaatagtcctgcccgcctgaagctactggaggggggagggggacaagggagcgagcaagcgagcgagctaacgctggaggagaggctcgggagaggagaggagccgagagggagagctgtccgtctggtgacctccccacggcccagcccccacgcacgcggagatacactactcggagcaacacagggacacccagactggctcacactgagccgcactggaggagacacacacgagcagactcacaaagagacacttggggatacaccataggcagactcgcacaagccaggaagacttacaaagagacacactggaggagacccactacatggagatacatccaggcggactgaagagaaaaccatggggacgccgaccgacacacacatgcacacacacacgcgcgcgcgggcgcgcggattcacacggacacacatgcactggcagacgcgcaaccgtcggttcgcatccccgggcgctttgaagtccagatttctgcccgagaaagaagccacctttgggcgcgcaaaggccactacgaacctccccaaacccaggaatttttccagaccccgcgcgtgcagctgaggggtggggagaacagggacactaggacaaaccgccggagccacctccctctagtccacagtcggccccaccaccaccaccacgcccaacccccggagcgcccggacgtggggggccgctcctccagcgcccccgcccccgagtttgcaggcaaagtttctcgtgaactttcctgtcgcccccgtccgtgggcccacgggtgtcccctcactcttcccgcacgcatgagggccgccggtctgctggtcagcccgggctctgagggtccggccgcgcgcactccgccgcagggtactcaccgcgccctcgggccacccgggcttcgcgccgcgccttccgaccgcccccggcagcgagcgaggcagggagcgcggagctagcaccgcccgccggatcccaccgccgagcctcgcgccgcgccggctggagccgccgcctccgctgccgccgccgccgccgcccgctctgcaccggctcttcagcgctcggcggctttaacccccccatcctcctccctccctcgcgcgctccctccctccttctctcgcccatgtgaccgcgggcgcccgctcggccgcgcgcgccctcgctcccctccccctcttgccttgtctccccgcgcctccgcggccgcgcgccacgacccctccccgccacgggccccgcgcgcccccgccttggcacgctctcgctcctggcacacgcggtccgctcgccctgcgcgggcctgtgagcccccactcccactcgcccagcactggcacgcgctctgcccccccgctggcacactcgtccgcactggcacgcgtggccccctcgcgttcaccctttctcgggcgcgccctcaagacggctgtggtccccgtgcttcacgcgcagccccggccgcgggtctcgcaaacgcgcgcgcgcacacacacacacacacacacccactcggcccgctcccctagggcggctgggcgcgcactcacccccgggatcgctccttcacactcactctccctctcggccttagccaggtctctcctgcgcacactcccgcacgttcaggccctgacggcctcgcaccgactccctggcacaccccgggccaactctcggggtcctccctccggcgtcgccgtgagaggaacgcgagccagaacccccaacccccactttgggcagaagaagccagccggctccgcctctcccctattgctactgccccccgcaacgactcccctcccggtcaccccctcgcgcgggggaaaggggcttccttgaccggggatggaccctgccgggagcccaggcccatgcctccagtgtctccgatgacaccaacaccactactcgcatgttcctcgcgccccgaggacacacagccgggggagaagcctccactggaatgaaggggtagggagggtgcactctcaatgccgggcacaggcgcacccctcgataggaggctcactcccttcgcagcctgggcctctgaggggccggggtgttcactgcactcgtccctgggcctccggtctggctgcaacataggagagtaaggttggacaacctgaccaacttctgaggccacgtgaaagcgcaatggagtggcaatggcagaggcagagaccgagaaagccacccccgtctccaccccttggatttgtcacctgacccttgacccataatcctgggccctgcccctccggggagctgctctagggctgagggcgaggagaagggagggaaatgtctccatgtttcctcacatccttccccagtaggctgcctagagcgcccgggccctttcccaacaaatgcctcagggactcccactgcagaggaaaatccttcttcccgccacggcctgggcttttcactttcacttccgtggccacagaatccccttcctacaactggcaggggtcggcatgggctggagctcagagacggccagctaggacttcaggacacacagcaaactagctgcgccccgctgagggtcagcgcacagccgcccacacaaggtgtcctctccccgggctctctgggccgccggcctcctgcttcccgtgccgcagaccgggattagactgtggacgcggggaaggaagggggcgttgcgacgggatcttgaggggagcaggacttgcccctgcccctgcggcgaagctctaggccctggcaaggttcggtacaccgggggccgctcctccccagggggctgaccggcctcggcgctctaatccggccggggaggggcggacggggtgaaaattggcgagtggtttggggaacggacttgacctccagatgccctggtgtccctggctcagcctctttctgccaggttgggagcagtcgggaattctgtcccggtccaacgtccccctcggcccccggggacgcagaggctgctgtcggcagagcagcagtccacggctgcggggacaagatccgcactgggagtccggggtcctggaagtggacgtgtg

SEQ ID NO: 588268 - DNA, 4001 bp, Homo sapiens
agctaaaggcctaactatgtggggaggcagaagtgggaggaaagagtgcggaaaatatgccaaagagtgtcttagattaggactcagagtatcaaaggcctttatcatgggttcacatcttaaaactccccaaagggtgaggtctgcagatgacaaatgcttcaattcattgttgtcatttatttatccctttgctccttatccaacgaagaacagaaaaatggtaaaacgaaaagagggcaccatattaaatgtcccaaccttgtttaaccaaaggcacattcaatttgaagatggtcccatttttacacccttcactcagtcagcaaggacctataaaatgggcaaaagaatccaacagaacaaactatgagagaatgaatttctgtaatcccagcactttggaaggccaaggctggcggaccacgaggtcaggagatcgagactgtcctggctaacacggtgaaaccccatctctactaaaaatacaaaaaattagccaggcgtggtggcggacacctgtagtcccagctattcgggaggctgaggctggagaatggcgtgaacccgggaggcggagcttgcagtgagctgagactgcaccactgcactccagcctgggcgacagagaatgaatttcatgaactgttttattaaactgatgatactgttcacaaagttactttgatgttcagcagctcctaattggtttctaagttgaagacagagtgacttaaagatctactgttcagtgagtttcccacatccaatctcccaaccctatctaaaggttctggtaaaatcaaaagagatgatggtaaggatgcaaaactaaaggaaaattcaatctctttgaacatgagtatagtcaagtccatccttacaaaaactctacaaacaggaaagtaattttaatgcaattgatttagcaaatgtttttcactggcaagatcacatgaaaatgtgatttctcactcaaggaccgcggaattaccatagctggttaataaacaagtaccaagcatcatctattgttaagttcccggctctgagactttctaaacgttactcgtctgtgtttacaacttaagtttgactgggtaaaaacaaagccaagtgtgggtttgaaattttaaaaacaggctccttcatcgatggattttactctaaccgaagtgtttacactttcctgttcatttcaactagtggactgcatgtcactcctgggcccccggcaggtatcagctaccgtcaccaccaagaacttgggcttgggggggaagcggagaggatgcgactgcgagtatccaagtgaccaaaaccaaacccgggcgcggaggcgaagcctgtctggccgcagttcggaaaggggcaggggcccgggtttggggagccgggcgcagccgcgtccctccagcccccggccgcgagcgaagcagggtgtgcatctgccagggagcgtcgctgggcggggtaggtcccaaggcagagggagaaaggcgcgcctccccacgggtcccggccccgctgtggtggggaaagggggactgcgagactcctcgatacctgacacagggccaactcctcctttaggctgctcagctcttcctccagcagctgcgtccgggtcaccatcgcctcctctaccgagatgccctctagccgtctggaccccatgggcgcgctgaggaggggagcatgagccggagctgcccccccaggccctcgccggccccctgacccttcttcacccacccagattttatcactttcgtccgcgaccacctcccgcgctgcgccggcaaaacccgaggcctcgctgcgcattgcgtgtacttcagctccccgcccaacacgtggggacctggggcccagctgtcgcgctgggggcgaagggtgcggtgagggaggcgaacgcgccgccatggctgcggctgctaacgggtcaagttccctgttggaaactccacctccctttccccaacccggcgagcccggaacgccgaaccgcgcatgcgcgaggcttttcccgccttggcccgcggtgtcccgtgttctctggtcctggccggcttcccgcgggcaatgcgcccagcgcgagccttggggtacgcacgcgccgtggcccgaaagggtaaggccggtccgccgggcaggccatcccagcgtcctgtgcctgagtccttggccaggatcgcctggatttcccgcccacctaaagccctgcctgccacttacatcccacctcttaaagccttccttgacaagcccccagccccaaatgatccttaactgtgaaatccctctccttcaaggcccctgccaactcgtgtgacacgtttcattgaccgccctggagtgtcagttacacggctaatctccccagccctgttgtaagctccttgaggatcaaggaatacgttttacacttaagtgttttcttcacaccccttggcaaaactgctttagtacagctgacatccagctgactaatgtcaaggagatgtggaaagccttgtgctgatctgggactatcaagcaggtttccaacttgaatgatgatcctttgtacaccctttgtcttttgttttgcaggagtcatgatttcctttgagtttttatgtcagcttctttatgcgttggctggatatcagaggaagtgtagcccacattgctgaacagtttgggtccttggagcagtttgaaatcagtaatttggagcgtggatgaagaaacaagacctactttatcttttgttctcttttttttctttttcttctggctttctttataaacttcaaataggtagtaatcgtatctttctttgcccttcaaatactttgttactattgataagattaatgagatgcatattgagctggcaccagaacatccctgaaagttagaactgccctcttcttcagaaagggttccagaatacttggggaaagctgagatgggggttgagagcagaagtagagagatgaccactttactgttaacttcatttaaccaaaatatcaccatctctgcatgagaatctagtcaggatgccaaaagacaccctcccaattagaatcctgccaaggcaaccaagataagtggacttctttcaaactgaaggtgaattcctcacaaaaacttattaaagagtacattagaaaaagtatgtttataagcctgtcttagaactagctaacctactgaacatttaccatatgctgagtccagtgctaagcacttttcatatatgaactcacttaatacatatgtcaccttcaattagattattatatatctccatttttactagtgaggaaacagacttgcaaggttactgtaacttctctgaagtgccatgtctggtatcagaaaagctaggctttgaattcactgaattccacttaactctgaaaacctgtactttgatcgctaccctgtctccacacctgtgacttgaaatacaacatttggtcttgatagtctgtgagatttcactagacttaagactgggaagtctaaccacataagttacgtgtttggccccaaatcagtattaatgcacatttttaattgctgtatgtcattcactcaaaaggacatcatttcacctgatcataaaaagatccttttgaaaagcagtggtataaatatgtatatgtgacctcccaaaaggataatatcctgactctttgactaggcatttttttaaattttgtctttattggagcaaaatacacaaaatacacaacataaaatttaccatcgtaggcattttaaatggctacaaataggccaggcgtggtagctcacgactgcaatcccagcactttgggaggccgaggctggtggatcacttgagaccaggagttcgagaccagcctggacaacatagtgaaaccccgtctctgctaaaaatacaaaaattagctgggagtggtggtgcattcccgtaatcccagctactagagaggccacggcaggagaatcattggaacacg

SEQ ID NO: 588269 - DNA, 4001 bp, Homo sapiens
ataactaccaatacaactaatcctgagaataaaaagtaatcacaactatgcaacaaaaacaggaaaggtggtggcagggtctcactcagatttcattgctttgcttttctccaggaaggtctttttgaagccctgtttattcaatagtaagagtgacctctagtgactttttttgttgttgtattttgccagttgattggtcaattactctagcatgcctttctataagtagctcatttatatgtttgtttaagccaaacggcagtttccattacaagacccaaggattttgatttaagtaacaacgttttattcacaaagccttctcacaaaagcagattaaagttgaatctgaaacacggtacagcatctgaccaaaggaatccggagcttgttttttggaagggcacaccaagtgtaggattaactgaggcgcaactgaatcatgatgcacagtgagttcatgaacccatgtgcgtgccctgtgtgtgaagaaccaacccacccttgagcccgcgggcagaacagcactgagctacggcaaacttttcatgacagcttaggagaactgctgaaagctacccttggttatcctgcaataatctaaatttccaaacatggccactggcgtttattggaacttatttcgaaagagattttggtaggagagggctgaggctgacagcggggagatgccactgaaagaaaaataaaagtgatttgagaaggaagaggaagacattttaaaaattctaatctcatggtttgattaatcaagaaagaaagacaactctctgctagagatttactccaagccaaaaaaaaaatgtgcaatgttgtgtaaacatttttatgtgtgataaaatatgggtacattatgttttgctcatctgtctggaatatcatcattacattagaatcatagcccattctagaaataaaggcttcctaggtgtttaccaaattaaggaaaataaaaaacagggaacctgatggcaaattaaataatgtaaaatattagcatccagagaggaatcattttcaagatcacctaaatgactggctgagttttgtctttaagcaagaactttctactatgagaaacgaagcccctgacaggggtgttcaagtgttattcccttagtagttaggacaggttattaatttagtttcacctacaggcgctctgtccctatactgcatggaagttaattagcattttaactctgaagctgccaaggtcggcaaaactgtaagctgctaacatctaagttgatgcagtatgatgtaatgtctgccagttttttccctgttagacttaattcctacaaaatattacaatcctaaaaaggaataaatgacagcatttgcacgctaatctcttattaagatgcttttcaggttttacagaaacgtccactttctcaatgaatattcaagtacatcgattaaaaagtcaaaacatgcatggtatatcttagactcccccacaagaggaaagtctattgtaaacaaaatcgtctttttcgggttgcaattccaaattttttttaaggttcttcatgttcaggagcatgttctgcaattccacttccaaatattaccgataataaaaaaaaaaaaacaaagttttccagacagcctagcgcaagttttaaaccatttgctgtacttacgtggatttcctgctcccacggggctccaagtctgagtggggagaagcagcagcaccttgaggacggcccaggccactgaagccatgctcacttcagccaggcgccctgagacccgggcacggcgacggccgctctgcgtcgctcctgctctcactcccgtcccctgcgcggctctgacgctgctctgcctcccctgtccagtctctagctctcttcctcacgcaccagcagcctccctcggcgctgcagaccctcccgccaagccgcgcccggccccagctgcgtctccgaggtcggccccgcggactcgcgccgcagctttctggagcgctcggggccgcgcggcgccaccccaggcacggaggcggcaggttcaggcgcgtcccggacactaggcgcgggaggcggccggcagcaacgcgagtcaagaagcgagcgggagggacgccccagctccgcctggcgctctcctcccgttataccggcagcttcctccgtccctctctcccaccggggcggggcggccgcggtgcacggactcgcgccaaagaccgcgccgtcagcctccgcctgcaggtggagaacgccaggctttatcactgcgctgttcacccaacgcaggggctgcacccaggaaaatgctgtcctgtttgagttcaaatagggaagatggggcagaaataactctgcggcgtgtacttgggcagacgcgcgcacactttgattttgctaggaattctgacttgtagagaaccaagctgggaaaccgggccaggagcagggagaggccggtgagcctgggttgtgcgagtgcaagcctttatttaaagttttaatattttgtctatcatgggtttttttttctttgcgattacattcaattttaaaactatttcattcattcaggattagcgttacttaacagttgctcctgagactagtgcgttagtcccttcaccctagtcctggccttggtggaagtctaaaatttacgttttattccagctttctgtccaaaagagcaacccctgcaagtgtaggatgaggagctcagtccagcagcagctaacactgcactccttgcgcgcctactgtgtgctagagggaggggcggaggcagggggcgggggggggggtctttctctttttctcttcctctgcttctcaaattcacagtaggggcaaagattgacaaactcactcacattaccaccaccgcgagtttccaaaaaagaaaaaagaaagaaagatacttttttagatggtatctctaagaaatagtgtattaatcttccctttagaaagacaactttgaaaggctttttcattaaaatgaattcaaatgtaatagatgtaaaatgtaaaatgaattcaaatgtaatagatgaagaatcttacaaagtcattcttgaattattaattgggttcacttaaactacttttgcacaagaactctgtaaatagcacgtcttttattacagaaaaaattataaatctaaagttttgattgacagatcagttgccttcagtgagacagaaagagagaaaatggaaatcattttctaaattggacctagagtaaaacaacaaatgtcaatctattattataccaatttgtcaggcatcagatggagtctttaaaaatgtgaacttggccgggtgcagtggctcatgcctgtaatctcagcactttgggaggcggaggaggccaagaggtcaggagatggagcccatcctggccaacacggtgaaaccctgtctctattaaaatacaaaaaattaaccgggcgtggtggtgcctgcctgtagtcccagctactcgggaggctgaggcaggagaattgcttgaacccgggaggcagaggttgcagcaagccaacattgcaccctgcactccagcttggcgacagagccagactccgtctcaagacaaaaaaaaaaaaaagtgaacttgggtgttcaaagtgttaggcttaatggagaaaggccaagaaacttctacggtggtagacatttgcaattaaaacaaaatggcttcattaaactgtaaaatcactagcgtagtgagggtgcatgcattttttacaacattggaggaatatatttatgaatattattcccaatacataaaatatacattttacacacttataggtacactcaaaatttgttccaaattgttcatgtctagtaaatgtatatacactattttatatggttaagccaataagcatcagcattttcttctaagacaggaggcttgtaattgttttgattcccctgcttttgacttaaaacttatttaggtttattctacttaagttg

SEQ ID NO: 588270 - DNA, 4001 bp, Homo sapiens
acttattttgttgtattttgccagttgattggtcaattactctagcatgcctttctataagtaactcatttatgtgtttatttaagccaaacggcagtttccattacaagacccaaggattttaatttaagtaacaacgttttattcacaaagccctctcacaaaagcagattaaagttgaatctgaaacacggtacagcatctgaccaaagcaatccggagcttgttttttcgaagggcacaccaagtgtaggattaactgaggcacaactgaatcatgatgcacagtgagtgcatgaacccatgtgcgtgccctgtgtgtgaagaaacaacccacccttgagcccacaggcagaacagcactgagctacggcaaacttttcatgacagcttaggaaaactgctgaaagctacccttggttatcctgcaataatctaaatttccaaacatggccactagcatttattggaacttatttcgaaagagattttggtaggagagggctgaggctgacagcagggagatgccactgaaagaaaaataaaagtgatttgagaaggaggaggaagacattttaaaaattctaatctcatggtttcattaatcaagaaagaaagacgactctctgatagagatttactccaagccgaaaaaaaaatgtgcaatgttgtgtaaacatttttatgtgtgataaaatatgggtacattatgttttgctcatctgtctggaatatcatcattatattagaatcatagcccattctagaaataaaagcttcctaggtgtttaccaaattaagtaaaataaaaaacagggaacccgatggcaaattaaataatgtaaaatattagcatccagagaggaatcattttcaagatcacctaaatgactggctgagttttgtctttaaccaagaactttctactgagaaacgaagcccctgacaggggtgttcaagtgttattcccttagtagttagggcaggttattaatttagtttcgcctacaggcactctgtccctatactgcgtggaagttaattagcattttaactctgaagctgccaaggtcggcaaaactgtaagctgctaacatctaagttgatgcagtatgatgtaatgtctgccagttttttccctgttagacttaattcctacaaaatattacaatcctaaaaaggaataaatgacagcatttgcaggctaatctcttattaagatgctcttttcaggttttacagaaacggccactttctcaatgaatattcaagaacatcgattaaaaagtcaaaacatgcatggtatatcttagactcccccacaagaggaaagtctattgtaaacaaaatcgtctttttcgggttgcaattccaaatatttttttaaggttcttcatgttcaggagcatgttctgcaattccacttccaaatattaccgataataaaaaaatacaaagttttccagacagcctagcgcaagttttaaaccatttgctgtacttacgtggatttcctgctcctacggggctccaagtctgagtggggagaagcagcagcaccttgaggacggcccaggccactgaagccatgctcacttcagccaggcgccctgagacccgggcacggcgacggccgctctgcgtcgttcctgctctcactcccgctctcactcccgtcccctgcgcggctccgacgctgctctgtctcccctgtccagtctctagctctcttcctcacgcactggcagcctccctcggcgctgcagaccctcccgccaagccgcgcccggccccagctgcgtctccgaggtcggccccgcgggagcctgggggccgcgcggcgccgccccaggcacggaggcggcaggttcaggcgcgtcccggacactaggcgcgggaggcggccggcaccaacgcgagtcaagaagcgagcgggagggacgccccagctccgcctggcgctctcctcccgttataccggcagcttcctccgtccctctctcccaccggggcggggcggccgcggtgcacggactcgcgccaaagaccgcgccgtcagcctccgcctgcaggtggagaacgccaggctttatcactgcgctgttcacccaacgcaggggctgcacccaggaaaatgctgtcctgtttgagttcaaatagggaagatggggcagaaataactctgcggcgtgtactcgggcagacgcgcgcacactttgattttgctaggaattctgacttgtagagaaccaagctgggaaaccgggccaggagcagggagaggccggtgagcctgggttctgcaagtgcaagcctttatttaaagttttaatattttgtctatcatgggttttttttctttgcgattacattcaattttaaaactatttcattcattcaggattagcgttacttaacagttgctcctgagactagtgcgttagtcccttcaccctagtcctggccttggtggaagtctaaaatttacattttattccagctttctgtccaaaagagcaacccctgcaagtgtaggatgaggagctcagtccagcagcagctaacactgcactccttgcgcacctgctgtgtgctagagggaggggcggaggcgggaggtgggaggcagggggcgggggggtctttctctttttctcttcctctgcttctcaaattcacagtaggggcaaagattgacaaactcactcacattaccaccaccgcgagtttccaaaaaagaaaaaagaaagaaagatactaacttttttagatggtatctctaagaaatagtgtattaatcttccctttggaaagacaactttgaaaggctttttcattaaaatgaattcaaatgtaatagatgtaaaatgtaaaatgaattcagatgtaatagaggaagaaacttacaaagtcattcttgaattattaattgggttcacttaaactacttttgcacaagaactctgtaaatagcacgtcttttattacagaaaaaattataaatctaaagttttgattgacagatcagttgccttcagtgagacagaaagagagaaaatggaaatcattttctaaattggacctagagtaaaacaacaaatgtcaatctattattataccaatttgtcaggcatcagatggagtctttaaaaatgtgaacttggccaggtgcggcggctcatgcctgtaatctcagcactttgggaggctgaggaggccaagaggtcaggagatggagcccatcctggccaacatggtgaaaccccgtctctattaaaatacaaaaaattagccgggcgtggtggtgcctgcctgtagtcccagctactcgggaggctgaggcaggagaatcgcttgaacccgggaggcagaggttgcagcaagccaacattgtgccctgcactccagcttggcgacagagccagactccgtctcaagacaaaaaaaaaaaaaagtgaacttgggtgttcaaagtgttaggcttaatggagaaaggacaagaaacttctacggtggtagacatttgcaattaaaaaaaatggcttcattaaactgtaaaatcactagcgtagtgagggtgaatgcattttttacaacattggaggaatatgtttatgaatattattcccaatacataaaatatacattttacacacttataggtacactcaaaatttgttccaaattgttcatgtctagtaaacatatatacactattttatatggttaagccaataagcatcagcattttcttctaagacaggaggcttgtaattgttttgattcccctgcttttgacttaaaacatatttaggtttattctacttaagttgtttggttagggaacttgaagtccttagacataaatgtgtgtcttgaaatgcattttatgtggctataattgctgctatatggttattatttaaatcagcatagacatttgccgtggtgataatgctggcaatgaactttgcagactaagagtagtgaggctctaaaaa

SEQ ID NO: 588271 - DNA, 4001 bp, Homo sapiens
actcctgcatgtgaatcagctcctgaaattatagaaacagatcatcatcagtagaggaaagacatgaatatcacaaagaacaagttgttttgatgttatgtaacaaaaacaaaaattaagccatgaatataccaaaaaagctggctatttctaatcataatgttttaataatattttacttcatagcatttcataattataatgaaataatgatgtaatgattgtaatactataatgtattataatgtaataactataatgtattgtatattacaattaatgtattgtaatactataacgtattgtaatgtagtaactataatgatacaaagatgataatggttatacacactataaatatttggtgtgtgccaagctttgggctaagtggtttacatttttaaaatttaatttatacaacaaacctttgagatagaaattattaatatcatcacttactaaaaaaaatcatttgctcaagatcctacagctaattaaggcacaaatccagaacttgaatccagtcagaggaatataaaacttgcacttttaactatatgaagttttcagcaatattttcgtgttagtttttaaaaataaactggtaatacttagttgtttgtttttttagaaaattccaatctaaagttcagaaacactgaaattcttaaaaatcctcttttcctatttttttatggtaagaaactctaaatttgttgcacttttaaatagagaaaatcacaacatattttatagagctagagcagtcacttgatggatggcaaatctggtcttataactttcctggatattgttgtcaaagactgttaatgccacattacattttacaaaagtagccctaaaaagtaaatcacctcttggttcctgccttacgagtcagaaaaaattaatcctgggttgagatccaggctgtgagccaaagattctctaagattatttacaagttagtattaaatttattttggtgcaaaataaaaagatatttaaatttaacttggcttgttcttggaaagaaaattgattaatattctaaatttgataacattctaaaatattaatcaaattagaaataacaatatgccaacttgcagcaaagatatagtataaactcagtgttgttaatgctaataaaacctgattagagtttaatggctattatttcatgacttaccaaagaataacttacttttgaagttaaatgctctaccactaagctatacccccaacaatgcacttttgagaacagattcctagactaacagatgattttaagaaaaaactaaaacactagtggaacatacatacatgtcccatatgtggaaatcagtccattcacagataagcagtttgctaataagaagactggcataggccaagtatgtataacgtttttttactgaattaaggcgctccactctgaagtgaacagatcttccctccccttaaccaaagaggatggcaagttttgggatgagttttaagacactctcctaccacaggaaacaaagcttcctctttctgaaaactccctctttgaatccactgacatctttaccctcacccagaaacctcaatcctccaactgtccttacagtccttaatttctgttaataaaaacaatagatcaaattagtaccagaatgttacagttggaccaaaaatgcaagccgaaaattttccatctctacttgaagtatgtggtcagaccaattcttagattaaaaagtgatacctttatggtcttgatagtccaaaagcatattgttttcatctgcaatctcaacttgctcacaccactgtcctccagaatgaaaaggtagagtctctgatccaatcaaaggtgaaagtgacctagatctcatattggacatagatgatgggataggagagtgagatgatgatggtatctttgctttggagaatattttttgttgagaacctttcttcattgcaagaataaagccaggtgttcatcaaaacctgtaagagttttcagtatattcaacaagattaatttttaagagttatcaaaactattctttctagaaccttcaggtctataaagttataaactcagaggccataaatgctaggacccatactactccaagctgatggagcagacactgtatcaaacatcactgatgaccttgccagagagaaaagggatctccagaggggatagaattgacacatgctccagctggaagtgttgtcattcctgttctgtttattgaaccaaactagtcccaaggccccttttacccacataacggggtcctagaatgcaggaagctggaatatttggcaaccagcagtatttaatactgatgagcactctctccttcctcaaagtttcttcctttggtttctgggacaccgcattctcctggtatcctcctgcctccctggccactccatggactcctttgctggcttttgttcctccttgcagtgtaatttaaacatcagaactcctcattggtcccttctagtttctgtctaatcttatcttggacaaattaatgcacacccatggttcccaatgccatgtgtttactctatttaattttttattttttttgagacagaatctcactcttgtcgcccaggctggagtgcaatggtgcgatctcggctcactgcaacctctgcctcccaggttcaagctattcttctgcctcgacctcccgagcagctgggattcctggcgcctgtcaccatgcccggctaatttttgtacttttagtagagatggggtttcgccatgttggccaggctgatctcgaactcctgacctcaggtgatccacgtgccttggcctcccaaagtgctgggattacatatgggtgtgagccatcatgcccagccgatatttataacctcaatccaatctttctctgagctccagactcctatttccaattgcctacgtgatatctcattggcatcctacactcagtccagattgaatttatttaccccgttcctcctctcactctccttttcgtcttccagtgttccctaaatactgaacactgctcgctggaataagccaaaaacctgggagtcattcctgacacctccctcttcccttgtcccatactcagtcaatcgctaaatcctgttaattcttactcccaaataacctctcaaattaagtctgcttctttccattttcactctcacgcactctaatccaagccctcatcaaactactataacagcttctaactgatctgtctacaagctctcttgccttattcttccatcattacattgcagtcagatagccagagtgatctatttaaaaagtaaatccagtccaggagcggtggctcatgcctataatccccgcactttgggaggccgagtcaggtggatcatctgaggtcaggagtttgagaccagcctggccaacatggcaaaaccccgtctctactagaaatacaaaaattagctaggtgtggtggcatgcacctgtaatcccagctacttggggtcgaggggaggaggctgaggcaacagaatctcttgaacccaggaggcagaagctgcagtgagcctagatcgcgccactgcagtccagcctgggaaacagagcgagactccatctcaggaaaaaaaaaaaaaaaaaaaaaagtaaatccagcagtctgtaatgaaggaaatctttaccatgacctacaaggtggtcccccatgatctgtccctattgctctagattcacctctgtcattcgttccctcaattgtgggctccagtcacactggcctcctcacagtaataataatgcttgatctcattctttttaccatgttaatttgtagtcttccttcagagatcagctcaactgttgcttcttcaggaaagcctccagtgcagggcagatgaagtgaagtccccggttctatactctcaatgaatttgtattttttcctcacataatcagtttgaaattacacatttatgtcattttg

SEQ ID NO: 588272 - DNA, 4001 bp, Homo sapiens
gctgagaagctaaaactatactccagctgccctttgatctgcaataaatgccaggctggacactctggcaggaaaagctatcatcggatttgggtcttgttgcccaggagacaatgggctgtcttgggcttcttcaggcaaacaaagagttaaccaaggccaccttctcaatcccgtttcctttgggccgactagaggttgtttcctagactttctgttcccttattcaattgaagatgtgtactaatcccccaaattcaaaggggagggggtcagaagctatagaaagcatggctcttctgcaaaactgcatggagaaagagctgagcaagggcaagagcctacagacctggattcaagtcctggcttttggactggccactttctaagcttctctcaacctcaatgttataaaaatacctgcattgcgatgggattaatagaagcccaaacctcagcaccgtgcaatatacccttgtaaaaaaccacacatgaccactccctgaatctaaaataaaaataaaaatacttgcattgctttccaacacatagttactgcaagaatcaagcagtaatttctatcacttattttgtgcctagtatatactggaatcatgggaagcacattatttctaatttctctaatattcacaacatttctaggaaggtaaaatggtctaattaatcgcctttttcagatggggaaactgaggcacagagcgatgaaatccattgcccaagatcactcagccagccacagttcaaacccaggcagtctgaccttaaccgaggcccattttaacttaggtctactttaacttatatcttactattcagccaaccgcctgagttctgctggagaaactgaggcccggggaacggaagggatcagatctctggcttccaggccacagctctttccaccaccggtggagccactgcccatgatagacgtgaccgcttaggtaactcagagctgggttaagcaaccgagcaattcagttccgttatttcttgagcagcaaaagccccagatgtccctcccggtgttcatgcttcgcacctgtgtgcggagaggcaccagacctgcccttaccagaagccagccagcacgcacaacctaagctgctggcgctgggtgcgctgaggctgttggcgctggcgctggcgctgtttctgaagtccctctctgcctaagattggaggctccgcacccagctcagacatctcgggtgcccagacaacgctccaaccgccccagctgcccagggatcccattcacagctataacccctgcactgccaggaggtagccgcccgcgggaccgccagtgcgcactgagtggcaagactcccttttatgtccaggaatgaggcacgcatcgcagccgcgtccgccgccaaaaccgacttcccccacgggcgcggaggcagccggtgccaccctccgaccgggttgcttacctgtcgcaccgcgggtctgggtgacagcagggaggggcgtggagaccgagagcagcatcagcagacaccagcactgcccgttgttcctcctgcaagatgtgcccgagggagaaaaggtgaggcgggcaagagtattggaggggcccgggacgcgaggaagcagagaagcgggtcttaccttggtgccatctcgcgggtctgcggagccccggaaggcgcgcggctagtcgagcagagcgttggagcttagcggaggacgaagggtcgctgagcgctggccgccgcgctcgcccttcctgcagggaacaaaggcggcgctcggcagcggcggcggcgggcagaatcccggctcccggcccgcgccccgagtcacccgcgctctgaaacccgactccgccgcgccctgcgctcccccgcgcgctgcgcactcacgcccgggggataccggccgccccggccgcctccccacgcccctttccccctcgacggacgtgcgctcgcctctgctgcctccacccgcggctgccttatgtaacctgcgaggaaagccccgcgcccgcgttcgttggggcaagcgggatgggctccctcccgcccttaagtctgtcctgtcggggctgacccgcaagaaagcactctttcacagccgctgagggaatcctctccacagcccaggaaggctggaatcagtgatttccttatatgatggacaaggagactgaggctcagagaggtggagcgtatgtcccaaagtcccaagctgcactgagctcctagatgctgtgacccaccctgcacgcctgacacatggaccgacttgaatgcccaggagtggacctgcctgggggccataagggatacatacaactaaatgcagcagagataatcctaataaaagtttttaatgtactggattccagggctttcctccctatgtataccttgcctgcccccttcatcagaatgtaagctccaggagggcttatctgtgctttgttccctgcctaaaacagctcaggtagtaggagatgccaataaacgctggatgaatgaaggagcacagtcttgggtgaggcatcacaccaggccctgtgatgagatgtgggggtcatgaaccaggctctgcctccgaaagccctcagtgggagtgaggcggttcagggcagactaacccatctgtgcagagcttatcgcagggcactgggtaaaccctcaatggtcgctttttattaagattaccacccggcacatagtgtgagatcttggagtgagaagaggcaccgctgaagttggctgagacctggacagctctgaagccaggtaaacactagaaacctctcttcctgaagcaccaagtagccacagtgggccgtggctctgtggtcagttcctgtgtttgattcagttccactctagaggatgggtcacctcttgccaagtgagttagccttgcagaggagatggcatgggaatggatataagcaactaatgcttacttggtgtggattatgtcccaagccctctgctaaatgctttagctgtgttatctcatttaatacccacaacagccatggaaaggtgatactgtcatgatccccatttcatagataagaaagctgaggttcaaaacattccaaggctaatgaatggcagatgcaacacccatgctcctccccactcagccatgctgcctgccagtaagcaagaagattagactcactctccaccctcaagagcaaaatcgcagtggagacacagagcactcggatatgaaagggttcatgccagcctgggcggtgagggctcagaggagggatggttggcctggagatcaggagtctgggttccagtccaatgctggccctggctgcagggtgaagttgggcaaatcttgcccttggtctgattttttatttctccacctggataatggacacaactaccttgaattgaatggtggctgtgagtcccttgatgggaccacctactggtacaccacagtgctctctgtccattggattttggcttctattattagaggttgtggatattctcatcggggctgcggcctgtggagggggacaactggcaagacagaggggggaccctagatcaacctcttaagggattgaggctccagtagccaaagcagctcgagaaccaggttggcctcatgtggagctaacacataaggcgaactgcatcccgacaaaattgtccacttgaggcctctttcctaatctgttcacattccctgtgaatgtaaattctctcccacttgcagccactctgtgatgggcctaaccttattttattttgattcactaaccatagggaatttgctttcataattctatatttctctattgtttgtaaagtaccacattaactaggaatataattgactttcttagaactatatttctatactgcttagaaaaaccacatcagttatggctacatagtagatctagggttctgtttgacagttttaaaaccagagattgtgaactggcagccataggctcaattttgttt

SEQ ID NO: 588273 - DNA, 4001 bp, Homo sapiens
accaggaggctgctggctgctgagggtccgcagcgctggtggaggcacaggagagggagaatgttctgagtacagggaggaaacagaaggaggcagaggccagggatgtgtccatagacatgacatggagtttggtccggccagaagggtccaggagcagaggcatgctggagagcagaggcatgctggagagcagaggtatgctggcgccagagcgcacatgatgcaggacaacgtgatgtcaagggaggcagggaggcaggagaaggcagagactgggcctccgagcagtgttgactgcccacttgcccacagctggagccccaccatggggtgctcgcctggcaccacttttctgcccaactgctggcatctaccctggcgcagggtcttctggagaaaatgagtcagcagtgtgctcactggtgccgcgcgcgcgtatgtgtgtgtgtgtgtgtgtgtgtgtgtgttgtggtgagggggtgcggggcgggggaatcgcaaacagccagctttttccaagacatggggaagaaaggagggggtgtcatcccgcggactccagctcaaagggggcagggcccagctacagccctaacagcctctggggagtgtcctggtgtcctgggggcaggatggaaagagaggagcgccgtccacaggccccaacgggctgcttgcatgctgctggctcccacacacacccacacgctgcgccggctccagcacaggctcactctctcttacaactcctactccacacgctgggaatcccagcctctgggccccagctccgcgcagccgctcctgggagagtccctgcccctctccggccctgtctcccgatctgtacactgaggggttccgcacagtgatcgcccagggccctttctgctctgacatgctggctctcactttttctctcttacacacgtgaaagggacaggaaccgagaagcaggaaacacagacacacagacccaggccgactaacacaaacacgcggagatttccagaaacgcggggacgtgcagagccacacagacacggagacaggagcagaacccgagacctggtgacctagaaacttgcggacaatttcacaagaacagatagaaacggagacgtacaggcttgggacctgcagacactgagacaccggaacacaccgagacggccccaaacggagacccccctcctcccccaagcatccaaaaagcccccctccgcaccccgccggccgctccaggcgccaccacccacccccacccccgacccccgggctggctctgcccccgccccaacgggatcgggcagccgggccaggcgcggcagggcgggcagcgttcgccaactctcgcccggccgggggcgcagcccctattaacccttggcgtcccgcctcgcgggggcgcaggaaggggcaggaagctgacgttccgctggaagcgaccgcatggcggggaaccccggccctccccgagattggagcagcaggaagctagggagggggcgtccccgagttcgtactcaccccccgcgcgccgccgccgccgccgctgtgcctcgggccccccgcgccgatcccgctcccatggcaggcccctacttcatgctcccgagcccggggggcaagtgtgggcgcgccccatggggccgccagccccccgccccgccgcgccaggccggcttagagcgcgcggcccccgcgcccccagcgcagccccgcgcccaggggcgcccgagcaggcaggcagcgcggctggggccccgcgggcgcccgcgccaggcccatggtcccaggagtccgggcgccgcgctcgcccctgcctcggtccttttctgcttccaccaaaaaggaagaagaagcaagaaaaagagagagagagatgatcaaacttttggaggcgggctgctggcggtccccggaggcagagcaaggccgggtgagggcgcgcggagggcggtggaagctgcctccccgccggcctgggggaggagaggaaaaggaaggatttgggggaaatgaaggcgatttaaagtctcggcccgcggtggctctccaccttccctcctccccgctcccggccgccctctgctgccccctgctgccccctgccggccggagccaagggtacagcctcagctggcccactacagccccgatgggacacccgcccccctcctccttgtatagatggggaaacagattcacagagaggaaggggctgcccagggcttcacggtgatttgatcaccgttctgagattaggaacttctgactggtgaggctgggggtcctccaatggggggttggggtaggggagaagggccaaattctactcctggaagaaacccacagtttcagggacggagctaggaccagaacttggtgtccagacgcccacgacaaccagtatcgtgatccccaccgcccaccaaaagtttgcgctcccagactcggagcgccctggagaacatatagggtgggcttgttaagggtttgccaccctctctctcccttctgtcagcaattggaatctaaccgcaccccaccaccaccactaaccacgcacctccccagaatcgacaaaaactccctcggatcccatccgggagctaagagctgcacaccttggcccccgggcaaattctcacacccaaaactccagtccagccctgggaccacagctccctccgcctctaccacctcttgccactcgttcacgagcaaagttacacttattcaccggtgcacacacacactcccacacgtatccaccctttccccaaactcagacacacgctcacacacggtcccattctgggacagccacgcacccttcctaggttcacacgaaacgcatcctcagatatctgggctcaggcgcacgctgatactctacactcgcagaagcatgcacacggatgcttacacaggcacaaatgcacgctatcctggccatatcgcccccacacatgtacacaccccgggtggacacacgcgcgcacaccctcacttgcacacagttctccgagagtgcccaccgcacatgtgcacacacgcattcactcctcacgcgtgtacccacctccccatacgcgcacacctttaggcgcgcgcacacacaggcatataacacttcgcaccgctccaggagcccccaagcacttactgggtccctacgtgcgaggctggccggtcggtccttcctccggcgcctaacggcatttgtattcatgggtccccgcagccgtgggcgcgggggcggggggcgaggtccccttccctaaacggggcgcgggcgcgcggagcgcagcggcaccgggaggggcatgggcgcgcgggactgcgccgccgacccggtccgcctgcgctcgaacttcggcagctctgcgtccacgggctccggcgcgggctccgagagctgggggcggctcataggtgctggggcggcggcgcccgccgggccttttgaagtctccgctgggggcggggagggggcgctgaaggcggccttttaaaccctggctgcacgcgggctcggtcgagcaaggtgtctggtttcaacaaactttaggaaaagtcccaagccgagagaggggaggtaggggggttgggggagctgcatagctgtgcgctgcttcctgcagagggcagagcacccatggctgccaggagggaggccagtcgcgggactggggaactggcaggctgctggccggcgcgtggaaccacccccgccacccccgcacccccaatgttgaaccagagttcttaacttccatgtgcacgaaccccagggagtgcaggaacacccccaaactgtgcacaaattgagcatgtttgtgcattcttcaggggagaggggccgtgggctttcctccggttttcagaagtccacggccccctaaggttgagaactccctcttcaatcataactgatgtttttttagttgcatacttggtaccatgcagaccctgtctttatttacatttta

SEQ ID NO: 588274 - DNA, 4001 bp, Homo sapiens
aaagtccccagaggcgctgagacagggcctagtcccccggcaatggcacagtccctgaccacaccttccttctcctctccacttttctggggacctctgttgtcccccaccttcagctaacccctggagaaacacaagcccagttagcccagggtcaggagagagttggtggcggcccagggatgagatcccaggtcctgggagccaggccaggctcctggctcctcccccagagccccagggcagcccccacacccagactccagctcatccagttagcccaacaagcactgatcgtgccagggaaaaaggaaaagagtgttttaattgacaagcggaacacggacaatgattcttcccacttgtcttccaatcgtgaagcagagagaagcattcttgctggcaggcggcgggctggtccagacgttcgctgagcccaccgtcccatcgctctgcccgccacttctcctgacctggcagcacacagctctgagcctccatctccccgcctgtcaataaggattcgggggaccttccagggctgggggctctgatgttcgagagtctgtgaaaacccaccccgccactaactaccaagagcgatgcctagaaaaactcccccgtcaggaagctgcgccagggagagttgaaccctcgagaacccaggcagggacgcagacagtccccgccttgaagcgccctccccgggaagcaagcctccttctaagggctgacccttggcagaaggaatcccacatctgcatatcatcccaaccactcacagccccgcctgcaagcccatctctggctttgctccacgcatcccatctctcagcagcgaatccaggaaaagctgccttccagggatcaagaagtttgggggtgggattaggagcagggctgtctaccaccctgcaggggtccccagtgcccccgaacacttaggtgaccaaggctgcaggaaacgctgtccctggggaaagcagggcgccagctcagcctagagtgacagtgcctgggggaagttcagtgctgggggcccaggcttctgggattccccccatccccaggagtcccgggatttgaagggctgtaactctagggggcggccctgcccggtttggagcagaggaagttctgctgtagggctgtgagggcccaagctgggcgcctgtgatgtgggacagagaaggaaggtttttgggacaaaagtttgcccgcctcgtggacaacccctcctgctgatccagccctcggtccttcctcggctcgcgcgacagccccacccgacccgcccgtctggggagggggcggcggcgcgcccgcgggcattgtgtctgcgtgtcgtcatctcgggggggcccccagcaaatggcattcgtggtcttggcccgtgcattccacaggccaaggaagaaaagttctgcgggcgaaggcgcccggggatgacagcggcgcccgggctgcgcgcgccccatcccgcagccccgcgccccggggcgcccttacctgcgcggctcggaggcggcgcccacagcagcagcagcagcagcgggggcagcagcggggcgcccgggcggagcgcgctgcgcgctttccagcgggtatggacgtccatgccggcggggcgcgggccggggcgcacaggggcgctcggaggcgcgcggggacgcacaggggcgcgggtcacggcccgggcagcgcactcagcagggaccgcaccactttaggaggtcatggggacctcggcaccccccgttcttctttgtggcggcggctgttctggaaggggcggctggcgcgctcgcccacgggcgggagggctcgactttggcccgcggggcggccgggaccccgctgggctagctcgccctcgcctcctcctcctcctcctccaactccttctcgcctcctcctcgccgccgccgccccgcgacccgctccccgtgggcgctccgctcgagtgaggtcctgcgccagccgcggggacggagagtgcggacctcgccttcggcgcggagcacttttttcccccttttcctccctccctctctcctggaaggcagccgcggaggctgtcgatccccaacgcccgcagcaaatcagagcccggcgctgggctcggcgaggccagcccccgcctcccactgggcgccgcgggcgagggggtggggacagcgggcgagtcgcagcgaggaaggggctggcccggggcggagcggacgtggggcgggcgcggccccctgttctttctctgagagccggtaggcgggcgggcctggggcggcctcggagcccaggggcccaccctggtccccccactgttcccaccccaggtgcccgcacctggccatgctccaagaaccagtgcagaggggccccgaggtttgatcacttcgggttaaaaagaaagttgcagtttaccccgcctaactttttctttaacgtggaggagttcagagctcctcttctgggtggagactaaacttcccatccagccagatcagggcgcccaagactgtggcctacgtgtcaacccggaccgaggacctgcctcctaactgcagattggcacgggaccgagctggggtctgacttcccaagagctcccgggacctccatgtgcttggacgggaacatctgggttattaatcaggcgaagtttggctctgcggcccccaggctctcacccctcactcctgcccactccctggtggcccctctgcaataaaaaggaaaccaaagaaggcatccccttgggagtgacagctggcgcagggagaaggcattcctgatcggctgctctcggagaagagctggggccctgattctcctgcctggcttctttaagcccctcggggtctcctccagcaggaggcccgccagtctctgggtggtaggtgggcgtctctccctccagcttccccaggcctggcctccctgcacagcctcctgaagcctgacccacaccccttccccaagggctgcagggctagttttttaaaaggagggaatcagaatgaattaagaacgatttgcaaaccctgggccatccccattccctttgaacaaacaatttagccagagatgccagacagggctgggactcccctctccagttacatctccagactgggcgtgaaattccccaaatgctctttaattctcaccattctggaaacaggaggtgagagaggcgtccgaggttaggtttgccaggatagccatggcaggctccggagctgggtgataggtcgctgttgctaacttggtgatgaggcttttagtctccatatctgccacatgcgcttgcatagatatcaaatatttcgcaggaaaagaatgagaagctcttcacacacagacgtggggaggtgcttgagatacattcagtaaagcaaatgttagttctgacctgtttccttgttgattttattttgttttacaacttgtataaggcatatgtgatcaggcaaaaatgtgtgtgagttgtgtgcatgtgtgtgtttgtgtgtgtgcctgtgtgcgtgtctgtgcgttggttaacctgcagccactggccctttactttccctgtggacttcaatgagtgagaaattccatcaaaccccagactccgcgccagccccagctgtgcttggtccttggagtgcccccgcccctaccagcaaggccagcttcacccctgaagactaggggtgctgacacaggccatggcctggttatcagaagagagtggaggctttctggttccagcttctttttccccaagcacaagtggagttcctttctgacagtcccatgtgcacatccgtgccagtcagcaagccctcctgtaactcacagccagcatctaaactttgccctgaattaacacaactggcgccttaagagctgacactcaagtgaccaccccaaggtcccccaaaagttgacttctcagcaatggtaagatggctcagtcttgcagctcaagcagccatgacagatgcactttatcc

SEQ ID NO: 588275 - DNA, 4001 bp, Homo sapiens
tcagtgtcttaatttgtgaagtgcagacaacacctttcttagctggttaatgtgagaaaccatgaaaatcatatatatataacacttagtggccaagtgtagcggctgacacctgtaatctcaacactggggggctgaggcaggaggatcacttgaggccaagagttccagagcagcctgggcaacgtggcaagacgccgtctctacaaaaaaattaaaaaattcgctggtcttggccgggcgtggtggctcatgcctgtaatcccaacactttgggaggccgaggtgggaggatcacctgaagtcaggagtttgagaccagcctgggcaacatagcaaaatcccgtctctactaaaaatacaacaattagccaggccgcacaggcctgtaatcccagctactcaggaggctgaggcacgagaatcgcttgaacctgggaggtggaagttgcatagagctgagattgcgccactgcactccagcgtgggccacagagcaatactgtgtctcaaaacaaaacaaacaaaaaaccactggggacatggagatatagtgtattttttgtttaagacagggtctcgctctgtcgcccaggctggagtgcaatggcgcaatcacaacttactgcagtctcgaactccccggctcaaatggtccttccacctcagcctgggaatacagccgcatgcaaccagccccaattaattcttgtatttttttttgtagagatggggattcaccgtgttgcccaggctggtttcaaactcctcagctcaagccatctgcccgcttcggccccccgatagggattataggcgtgagccactataatagcgcctagcctgtttttgttagtaggaataacagtacttcccagaactcaaaaatctaggaggcataagaaaaacactgtagaaccctagaatgttctagtcacacatccagcaaacatttattgagcatttactatgtgccaggcactatccagaaggctgcagatgcagtggaacgaggcagacatggtcctcgacctcggagttgactttctagtaggatattataaactgatcggtacttatgaatcatctatttagtctagatgttctcaatatggctgcatgacagattctcccaagtagtttaaagacagactttcggtttcacgcccatttctccctccactgcagattcagattcagattcagtgcgtttaggtgggatccaggaatctgcattttcataaacgttccgagtggttacgagctgcaaccaggtttgggtaccccgacctaggctatgttccagttacccacaggaaacggctccaagccgcccccacgggggcgaggcgcgggcggccttaccgtggcggtaggggttatagagcgccatcgccgcggagccggcggccaacagccctttctgcagcggggaggtggggaggtggtgcgagtatagcgggccggcgccgtcgctcctagcccggaggggcatttctgcggggcaagaaaaaggccgaggtcagaggagccgggcgccctcaggctccttcccgcctgcgcccagaacccggcgccacttgcctgccgcaggccgctgtaggcccgggagcccgcagagccgacggaggacagggcgcagcagagtcgccatggcagcgggcgtccgcggaggatgggcgggtacgaagaacgccgcgattctgtcaggcgacggagcgtcggaggggtcaaaactcactgaaaaaccgattctgacggcgtagcctacggcctttcgaggggaaacatcgcttcacgggcagaaggcatgtaggccaagtaggcgaaggaaacgcacgcgaactgtctaccgtctacgtccaccgatccaagactctcgccatgtcacctcgccccagaaagtgtctgcaaaggacacgcaaccacgctcactcagcgccgggccctatttccttctccacagccggttttccccgaagactataaaatgcgaacctcttccggctgtggaacatggcggcgcccgtggaaaggaccacatttgggggcggggcctggcggtacttccgtccaggtccagcgggtgctgtgatcttcaagtatggggtctgctggcttgtcgcggctgcatgggcttttcgcggtctataagcccccggggctaaaatggaagcacctgcgggatacagtggagctacaacttctgaagggtgagtgcctcgaaccagacccacgttcccgctctcgttctcttggaagtccatctccgcttctggtccttaccccaaaacaaaatcacgtgacctattcacctgggcagagcgctttcccaaacgcctgttctctgtgctttcttactcctcactttcctctgttttccgagggggaaactgactcagtattgttccttgtcacacggttactacgttgtagagtctgtttgaatccgcctgtttcttaactactgctatactgccctctgcaccatgggcttctgctttgtcttctacatcatacttccctgttgtctaatcccccaagtgtttggacagaacaagatattcctggtcagcatcgtggtgcacgcctgtaatcccagctactctggaggctgaggcaggaggatcgcttgagcccaagagtttgacgttacagtgagctatgatggcgccattgcacttcagcctgggctacagaacgaggccctgtctcttaaaaaatattttatatgtacatatatttgtatgtatgtgtgtatatattatctctgtgtgttcaggtctcaatgccaggaagcctcccgctcctaaacagcgtgttcgcttcttgctgggccccatggaaggcagcgaagagaaggagctgaccctcacagccaccagcgtaccctctttcatcaaccatccactgggtaaggcagatttaagcaggatcctgtgtgtcacttcccaggaaatccctgagccgagtcagtgtcccagtgctcagattcctgtgccaggcccttgaaggtccacagaggagtgaggtattagaccaggaattggcagatttccttggaaagggccagatactgaatgttttagttttcaggccatgtgatttccgttggaactgctcaactctgccaatgtagtgccaaacagctatagacagtatctaaaggaatgagcctagctgtattccaatagaactttatgaatattcatatttgaacttcaggtaattttcacgtgtcactaagtacagttgcctctgagtccatgagttccacatcccatgatccagcttcagattggcagtatttgggaagaaaaacacaaagttccaaaaagcaaaacttgaatttgctgtgcacctagtactgtgttgaatccactcaaggtgatgcataggcattatattaggcattataagtaatctagctaggcgtggtggctcacgcctgtaatcccagcattttgagaggccgaggagggtggatcatgaggtcaagagatcgagaccatcctggccaacatggtgaaaccccgtctctactaaaaatacaaaaattagccgggagtggtggcaggcgcctgtagtcccagttgctcaggaggctgaggcaggagaatcacttgaacccgggaggcggaggttgcagtgagccgaaattgtgccactgcacgccagcctggcaacagagcgagactccgtctcaaaaaaaaaaaggtaatctagagatgatttaaaatatatgggaaggccaggcctggtggctcatgcttgtaatcccagcactttgggaagctgaggcggtggattacttgagcctaggagtttaacatcagcctgggcaacatggggaaaccctacttctacaagagaatacaaaaggccgggtgcagtggctcacacctgtaatcccagcactttgggaggctgaggcgagcagatcacctgaggtcgggagttcgagaccagcctggccaacatggagaaaccccgtctctact

SEQ ID NO: 588276 - DNA, 4001 bp, Homo sapiens
caccagacacacacaggaccacaagggcgacagagctgtccagccatcagctgtcctgagaaggtcttgtcctgcctggaccttctggagacagagcagagcttctttctgtttaatcccccaaatcaagccctgaccaaaactccacacaggtttattgccccacaatctccttatctgggagtttcgagcgacaaggatcactggggattttccaagacacctccaggaggctgaaaatctggcagctccactccctgctcactgtccgctttctggcacagagctttcagacctgtctttggacagagagggacactgaggctcagagaggaagcgcgccttgcttagcgtcccacagtcagcccgaggcagggctgaagctctgtaactctggtcctggggtgggcatccaaccaggggtcctgcattctgttctcagcgtggacccacaaatcagccctcactctgcctgcctcagggacctggggcccagagtcagttcagccaacatcattggtgcccactctgagcctgatgccatgctgggcactgtaggggagatgcatgggcagacccagacagcgtcacttatgggggagctcagaggatgggggaggcccccatgtaaccagcaagctcaattcagggtcatcagggctaaagccagcgctgcaagttgcagcagggagatggaaatctgggaagtcagggagggcccccgggaggatacgactgagctgagctttcaaggccaagtagagcaagcccagcagaggagggaaggggaggcatggggtggaaggcgctgtgctaggtcatgcctgtctgtggtgtgcggagatggagccaggagcttgcagcgcgggggtggggaggctgggtctgagcaaatgcaggccagcaatggggctgccgctgggagaggtgctgggggcgcagtgctgaggagggggcacctgagacagtggggaggcatcaaagtgtgtaactgggggtgtgacatggtcagagccgaaatagacttaacccctgcaattaggaagtcaggacattgagcctgggaaacgatttctttcctcaactttgggctggtatcgaaggaagaaataagtgggtttcatttcatgtccagctccagtgggctggaggggttgcggaaccccatgaggaggagggagagaattctgaggccttccgtgcttggactcaggaggaaaagggtgtgactgccctgggacaagagtccccagatatgactgaaggcctgcctgctcctgcagatgctggaagccccacaccccacttctgagctcggcacccccaccccacttctgagctcagccccacgccctacttccgagctcagtcccacaccccacttctgagctcgaccccacgccccacttccgagctcagccccacaccccacttccaagctcagccccacaccccacttctgagaccccacaccccacttccaagctcagccccacaccccacttctgagctcgaccccacgccccacttccgagctcagccccacaccccacttccaagctcagccccacaccccacttctgagaccccacaccccacttccaagctcagccccacaccccacttctgagatcgaccccatgcctcacttccaagctcagccccacaccccacttctgagctcgaccccacagcgggaagtggatgggaagttcttttccgctactctctcacctgcttgttaacatggagataaatgcctctgctcacccttaatcagttccccaggcagagtctgcaacagctggcaggagaggatggtgaggtacctcctctctgcttccagcctccaggagctccacctaaattgtttgtccaggctgggcctgcaggccagaaaggcaggaggccagactgattgcccttctcaaatttcaagtgccagcagcctgggtttatgaggattaaaagagtccagcaaagatgtcagtgcccctgtgggaaaggcacttctgcccgcaagactggctgtgaggacaggtgacagcatcacatttacatgtgtttgcccgctgtgtcacagcagagcatctgagggtgctcagagtcacctggagggctggaaaaaaacaaacccaggtggtggctcacgcttgtaacccagcactttaggaggccgaggtgggaggatcgcttagggccaggagttccagactagcctgggcaacacagtgattctgtctctacaaaaaacaaacaaacaaacaaactccgattgttgggccccaccctagagtttctgattcggcagcgtgggtgagagctgagagtctgcacttccaccaagttcccggtgactaggaagccgctggcccaggggccactctttgagaatcgctgctctacagcccagctctatgattcacaactatcgctcagtttacccctcacaaccatctgggggcgcggaggattatctccacttcgtgagtgtggccggggcactctgcagagcagcggcgtcagttttctgaggttacacgattaataagcagcaggaactcctgtccaaaatccacgggctccatgagcactcaaccaccccccaactcggtggccactgcggctctgctccttggcttgctttcttaagtctcttctcaacatataaattgcatgctctgaggccagcactccggaactgggcgtcccaatcctcctcgtcctccttctcatggtgctccacagccggaacaaaatccacctattgcgtctgctgtcccataacagcttcgcagcccagtacacgtgcttaagatacgggcttcagagtcagagaaacctggatccaaatccagactcacttcccttctctaagtcttgataccacatcgtcaggttgctgtgagatgagcaaggagcttaagagcgtgtagcctttggtctgggtgtggtggctcacgcctgtaatctcagcactttgggaggctgaggcgggcagatcacctgagatcgggagttcgagactagcctgaccaacatggagaaaccccgtctttactaaaaatacaaaattagccgggcgtggtggcgcatgcctgtaatcccagctactcgggagggagaattgcttgaacctgggaggtggaggttgctgtgagccgagattgcgccattgcactccagcctgggcaacgagagtgaagctctgttcccccgcccaccccccaccgccaaaacaaaaaacaaaaaaaaaaaaccaaagagcgtgtagccctggcccatggtaaagttctcaataaacggtagcaaccagtgggccaaggcaagcatttgagtagctttcctaaacctctctgtgcctcagtttcctaagctgtaagctggggtccatgatagcacctaccttatagaggagatgttcattcatataaagtgcctcagagcagtgcttggcaagtgctcagccaggtgttagtctcctacatgtatattcctgttttgtcaaatatatttcagtctgaacataagctcttcattgacacatgtaaacaaaaacattaaataatagagtaggctactgtgaaatcaaaatgtaaaaatcttggcagtgatggtgatatggtttggctctgtgtccccacccaaatctcatcttgaattgtaatccccaagtgtggagggaggggcctggtgagaggtgattggatcatggaggcggtttcccccaggctgttctggtattactaagggagttctcatgagatctgatggttgaaaagtggcagtttcccctgcgagttatctccctcctgcagccctgtgaagaaggtgccagcttccccttcaccttccgtcatgattgtaagtttcctgaggctccccagccatgtggaactgtgagtcaattaaacctctttcctttataaattacccagtctcaggtatgtcattatagcagtgtgagagtggactaatacagatggctgcacaatgggaat

SEQ ID NO: 588277 - DNA, 4001 bp, Homo sapiens
agcatgactttttaataaccagaatctgccatgctcctaaatcaggccaaaaaggcttgaattaggcaagcaggaaaacagggcccagattatacatgtgtcgagatgacaggagacccaggtagcacttaagcctgtgcgtcggagctgggctcatgggccagcacatatactttgcctgcttttacgaggggataataacactcatttgtggtccagctcccagtcctgtgcagctccaccatggccgcagggcaaggtcataggcactacttcagccctagaattccatagactttcagtccaaggtagctcacccccaggttctgcttgaatacctgtgatgacaaagagctcactacctgtccaggggcctcctgccctcttttggctgttaagaaaatccctgggtgcagggcaggtcatgaaggggacaagaaagaccaggaggctgagaagtgattcctagaaactgctccctcaaacagggcaggcatcagggaggtggagaagaggccccatggggcaggaaaggcctgcagaggggctccggctctcctcactccggacctctcagacggtccccaggaggggcaggaagctggggagacacattccagtcctgatgcacaggtgggttctgaacaagccccaggaaagcggaggccccacagcctgctccagggcagacacctcggctccctcttcttgccttggctccctgggatctgatgggagaaactgctgggcctggggctgctgggtctggagatgagcatatttaagggacctgaccactgccccagggtgagggaggaagggtcagaggttgtttgtgtgtccagagcaggaccagcaggagaggcagtgactgggtagcagattccagcttggtttacaactagtgagattcctatcacaaggagtgtgcaagggggcagcaagaccttccagaggggatcttacagaggggctgggccagatgccataggtcttctttacctagggagcctgggaccacagtccctcagacctgtgctctgccccatcccttaatgccacgcggacacagcaccttggcactgtcacccctctgaggtccaggcgtggccgccagtcaccccttgtcacaccagctagtgtgtgtcacaccttatcacacactagctctgggacacagagctaggcaccagcacctggcccgggtggggaaggggaaggagctatcctataccactctctaaatcgaggtgcctacgtggggctggtccaggcagtcgtgccgccaggagtccagccacctccaacctagggctcctccagccccagacgagtaaaccctcttggcgggccggctgatgccccacatgcacgcccaggccggcttggcggggacccggggatgccccccaccccaccgtttcctgtaccaggaagctgaggcccagcaggtaacgcagccaagagggggagggtcccgacaagagtcccatggagcacccgggccacagcaggggcctgtcgggaccggctggccgcgcccagagtgagcttccctcaccgcgggcaggaggggtgggcggtgcagacagtgctcatgagggcagcgagccgtcgggagcccggacctcgaggcggcccctcccaacaaccccgcgagaagggggccaccaatgagcaagctatcctgacggggaaactgaggcctggagaggagcagtgctttgtgcaaggtcacgcaaaggggctgaaagccaggtcccccgcgctccgagccccgcatccctccctctccgggagctgcagccgcagcgcgcacgtcccgcccgacgcccccatcgcgcagaccgggaaggcacggccggcggcgcagggccgccctaccttgatgactgccgcgcaggtggcggtggcggcggcggcgtccagctccggctccgcgctcctcgccgcccgccgactcccggcgcccagagccgccgccgcctccccctgcagcccggcgggcggggccggagggcggggcgggggcctggcccaaggtccgcccttttgcccgccccgcgggtccgccctggccacccttttccgcccccacgaccccgaccgcgctcctggctccccggggcgggtctcggggcgcgcacacgtgctgggaacaggcgcgcacacgccgcagtgattggggcgggctgccggccaccaggcggaggctggggacaggcagagccgcgggccccacgtcgcgccgtgccctcgctgcgtggtgtgggatgaggaacctgacctcccggagcctcagtttcccccgttgtgaaatggagacagtaaccgcgtcggcctcttaaggctgtttgagccctggatgtgacgatcccggccgggtacagtgcgcgcgccgagcccggccagggaagcgctcctttccccgagcagttacagcggttaccgaggcttccccgtccgcagggaggagaggagccgggagcgccgctgggaaccgaggaggacgcccttccttctctcgggaccagccgggggcgctgctgccagcctcgctggctggagagccctgaggacactagacaatggggaggccctacctttgggtaccacccccacctaacactactgagccacgcactcctctaagcgccttctgtgcattacctcgcttcactgtcacacaggcctatgaggttgataccattactcacctatttaacacaaaagagctgaggcacagagatattaagtacctaggttaagatcacccggctagtcatgcaaccccaggcagtatggctcccacggctactaagctaacagccactccactccacaccacgtctgtgaagagctcttggttttgttcagtagagacgggttatcttgagggccttgaactgctccgtggcacatagtaaccactcaatatatagttgtggagtggataacagagtacactgttactactttacatatctgtatcgtttcttctaagcttctaataatagtggctttatttagccactattattacctccattttacagataagaaaactgaggcttggagtggcaaggtacttagggagctcttgattctctccttagaatgtgactcagcttccatagtccactgtaccacccccctgcccagagctggacgggctccctgcctaccacccaaagcccagtgtgcactatggtcctgaaaaccccatcctacagctctgattcagaccttctggagctggattgcccagcaggtagactgaacgcatgcttctggtgttagcgtgcaagagttgggtatcaagcatatggatggctgggcgcagtggctcatgcttgtaatcccagcactttgggaggccaaggcaggtggattgcttgagctcaagagttcaagaccagcctggccaacatggtgaaaacctgtctctactaaaaatacaaaaattagccgggcgtggtggcatgtgcctatagttccagctacttgggaagctgaggcaggataatcacttgaacctaggaggtggaggtggcagtgagccgagatcacatcactgcactccagcctgggctacagagtgggactctgtctcaaacaaacaaacaaacaaacaaacatatggatgaaatcagaacattgtgggaattctttataatcatggtttggtttttacttgaattacagctggacggtgggcaccatgatctttcccaggctaaggcatctgaataactttgttgttgttgtttttgcatggttttgttctgtcgcccaggctggagtgcagtggcacaatcctagcttgctgcagcctccaccacacaagctcaagcaatcctcccacctcagcctcccgaatggctagaactacaggtgcgtgccaccatgcccagccaatttttatattttttgtagagatagggtttcgccacgttgctcaggctggtctccaactcctgggctcaagcaatctgcctgcc

SEQ ID NO: 588278 - DNA, 4001 bp, Homo sapiens
tggcaggactgaggttctgggccctgtctgtctgccttggctggatctctaagcctaactgtgctacaaagtgagtgagcagaacctagccagaggcagccacttgcctgggctggaaagagaagacaagagccaagattcagcgggaggcaggtggcagtggcgatggctgtggtggaatcgggggttgtggcagtggcaggggaagctcctggactctagaagctgctccaccctcccgagctcccagaagtagaggaatggggagcaggtgagagggctagtgggggggcattccagtagaagggaacctggaaagttctttcctttcttctctgcatgggctcagtgccagggagtcaggacaaaaggtaataaaaaatccacctgtcagaatctgcgaagatcgttttgatgagggaaaacttggctggaggacagagactgcctggccgctgaggttacaccacagccctgggatcggtcctgaaattagggttggtgcaagggagcagacaccaggaaaaggccatcagtggatgggacagccagaagccctgcctatttcctgtttctctccaggactcctgggacccatctgagccatccctctacgaacactcattttttcctgagctgtggctcattcagctagggtccaagagcggaggacttttggtatgaaaaataaaccaaaggacactgggattgggctggatttgaatgagcaggtccaggggactctgggcaagtccctccttgcctcagtttccctgcaggaaggtaaccagtccagtcggatggtcctggaggatgatctagaggctgtttgtgggatggatgcagcttgggagacagtgacaagggtgcggtggaggctcagggtgttgcaacacctaaaagagcctctaggcctgagcctggatgcaccctccgccctctggccccgtagtgtgtgtctgagacagagtgagacaccagcaacatatgcttggatcagggacggaagggactgaaattaggctagcatccgggctgctcaccggggaggactgaggggtagatatagccagggtggggaagggggctagaggggaggatatagccagggtggggaagggggctggagggaaggatacagccagggtggggaagggggctggaggggagggagaccatggggctgccacctgccagttctgaggcctttctagcttgatgcctccgcgtgtttctctggccacacacaattccccagggaccgtctgataaaccaaaggagtgtgaccaactggacagggtcggaggagtggctctggcctaagcgtgcgacgggtgtgtcaatcggagaataactgggagagtgagctagggtctggatgctcctggtctctctcccctaccggcctgtctctgggtctaagggtgggggtgctaactgaagccggggtcccccttgtctttcctgggtcgttggaactgaatgctccaggacgtgggtttaatcccgcttctgaccttgcgccccaatctcctgctctgccaaacctgggacgcccgcctgaccccaccccatcagctggaggccgggtcgaacagcggccgcaggacgcggtctccgttcccggacgcaaccgcacggcccgcccaggccgtccagggccctcaggcccgggatccgccgcactcaccacggtcctggcagcgaaggctaacatcttcgctgcccgtccgcggacacgcagtccgctccgccccacacaccgggcaaagtccgcgccgccgccgccgcggctggggtcggtgggtccttgctagagccttcgggccaaggtcgctgagttacagccgccagccggtagaggcagccccgcgcccaccctctgggccgagcgggctgcgggaaggcacccggggaggaggactcgcgaggcggggcctgggccggtagcgggccccgggcgggcaacggtgcccgggaggttggctgtggggcggggacggggcatcgatggggcggagtctccttgaggagggacaggaggggcggggacggaggggcggggcgtcgcccggtagcgggtcgcagtaggctggctgcgagtcgggggcgggaccacggcgggcggggacagaggggcagggccgagggcgagtcattgagacctgtggaggaggaaggaggaggtcaccgtccagctgtctctcccctgtccccacatgtcttctaagctgttggaggtagtggtgtgcacctttccaactccgtctggtgtccttgagcctaactcttagagtgataggaaaacacaaccatgttgaccggggaatgtcctctaatattccttgggttagggtcagtaccacccacaaagatgacaggtggtactccgggacaggagactgtcccggaaaaacatggctgagcacaacccaaacttgacgccccgcacaatcgtggcagtcgcggcgcccgacgttcgggcggccgtgagcggtcctagcgcttggcggccgttggcgcgcatgcgccccgcgcgccccgcactgacatggccgtcgcccggttccgcgcgtccgccgcgcgccggccgttaataggcttgctccctgagcgccccgcaccgacatggcggccgtcttcgctgtggtgactttaactctcggttttcggttatagccggccggcgctcacttgtcttcaggaagctcggagcctttggtggagccggggagaggaagggtgggtgcaagagtgaaaggcgagaggggactgcaagcatccgggtcggctcctggccggagcaagatggctgagggcgagcggcagccgccgccaggtaaggccggcggggccaggccgggccggggtcgggtagggtgggggcggtgccaggtgtgggaggctcaggagggcgagagtcatgacacggaggaactggaggggcaaaagctgaggggccccgaggagggactgagttgaatggccttaggggagaggtgggtggtggggcgccgctggggagggaaccaggggctgcaaaggggtggtgattggggcgcaactctgggttttgtgggagtccaggctgcccgaatgctgggtgggcagcgccgtggtcataagggggccttttgcatctctgggcagcgcgtgcttaagtaagctgctgactcggtggggaagctgccagggaggggggcgaaagtgattccggaggctgccgtctttattagtcgctgcttaggggatggggtggtgctccgtgggcctgcgcccgcctcgcctccagtttcggcctccgcgtcctgctcacccctcatcctcctactctctggttccagtgcctgagaatttattgagggaaactgcccgtggtgtctaaatccctaattttaaaaggctggttgtgcaaggaggttagtctctccggcatctccttcggtaactcttatttaccttgtagcctctttttagttcatcttaaataactgggatggaggtgctacggaaggatcttagagaccctttttgtgcagaaggagaaggctgtttgccgacctaccttgaactaagaaggactggccatagataacttttacattcccgacagaggcaaataggttggccgaccaaacacagctaatgttttgaaagcatttgatattcttgctatcctgtctccaatgttggggtccctgggaaggtctcaggagggagaaatgttgaaaatcagaaaaggcatcccctccatgccccacaaaagaggtgaacaaagagctgggttccgtttcttaggacattcaaaaccagacatttattttgtacaaaacctctgggtgtgtgcccttagaacaaggatgtccaggccaggcgcggtggctcatgcccgtaatcccagcactttgggaggccgaggcgggctgatcacctgaggtcgggagttcgagaccagcctgaccaacatggagaaactccgtctcttctaaaaatacaaaat

SEQ ID NO: 588279 - DNA, 4001 bp, Homo sapiens
gttttcaagtgacaaaatccccaatccctcccctcccggcaggcagtctagggtaccagcatgcagaaatggtcatgcctgcagtgtaccccaccaacttttagggatccccagggatggcgctcccagcacagaaatggcagaggaaaggctgcccctgggcaacccagcaggcctgatgggttgagtgtacacaccagtgtccagaccccccacagcctccatccactctgtgcctccaggtcccctgtgagtgcacactgagtgtgaatgcacacatgtccacatgtgcgtgttggggtgtgcacattggtgtgcaggcacatgccatgtgtgtaggtaggtgcatgtgctggtagatccacatgtgtctgtagcacctgtccctgtggtgctgtgtgcccttgggcatgccacacaggtgtgcggagtgtgggtgtgtgagcatcacagggcaggggacagagcaccgatccacagaccgggatctcacgtgctttgtatgcagagaacagagaggagcagccaccccgccccccgccaccatgccccacccctctatggagcccaagtcgcctgccagcagagcccagctcataagtccccgtccctctctgagccttggtttccttcactgcaaaatggggtcctcatcctccctagggccccatagagaggataggaaatgaaagctttgtgagtgcgggaaacatgagggtccccaggtgggactgggagacacttggcccccacaccctacagcctgtggagctctggggcagggagggctcccccagcctcaggagagcccaggccctccttggctccctccccagcctgtggtggtgggggcaggggacttcccaggcccggcccctgtaactatagtaactaacaccaagcgttcccttggaccccccaggaggaattccaggctccgagagcttggacaaaagcaaaaagggcttggcaaatgtggtctggcttcagggagccctttcagattggccttggaatgctggggagggggcagcaggggacacacacatgttcccaaatccccagccaccccacagggacccagagcatccccagcagccctcagcacaggcagggctaccgcacaaatggaggggtgcgggcaggcacccagctccctgagtctccctcacgcttctccactcagtcccgagttggggtcggctgtgcacatcccacacccctcatgttgagagcaaagacctagttcaaccctggacaacctacaccccacagcgtgtgctaggacacagctcaccacacccaactcctcggacacaactcacggctcaccccagacagctcatccacctcccaactctaacacacccacaacctgtgccccacaacccagcatgcgacacagaacaagctctggggtgaggcttatgccacctgcaactccccaaactcagcccctagaaacccagaagtcccccagccctttacaggatgcaacacagcacctcccaaaacacgcaccccatccctcacccgcatcagctcccccaaatcatgcccagcccccgatcccccaaccccgaaacttacaacccccctcaacatgaaacagccccgagcctcagaacacactcacctccgtggagccccacagagtctgggggccacagccgcgcactcctgtgcaccccacagctcaggcctgcacccacgcggaccagcccacccaccaccccagcagccaaggcttggggtatctgtcttgggggacagaccctctcccaggcccctccagacatgggccccaactcaccagccaggagggaaagggcaggggcccagagcagcagtagcaggacagaggccagggcctgggggtccggggtcccaggcctggccagcgccatggcagcccgctctgcgctctgctcggctgctgtgagaacgggagggcggcctggctggctccgcacccccctcgtccctccaaccagcactaatgctgtggacagaggcccagcccctccctcccctccccgccaccgcctcctcctcccacccaggcctcctgggctgctccacctcgtggacgtccctagacatcagccccaagtcctcaagccccctagcctgtggggctgacctggtcttggcacccactggtttctccctcctgaccctctgccccactctcctcccacctctcaggtcagcctccttggagaaatttctgtccttggagagggggctgttcaggactctcgtctcaccaggtgatgccagctactcccaagtccttagttatcccctctcctggatccccctccccacctctccagcccgggcctctctcccaagcccaggccttcgagtccagtcgcctcccagaccctgtctctgctgggaagctgcagcccctcccacccagctcgtccccccacctgctgctccccagtgctcccatcggagccaaggcacctcccatcgggcagcccaacgccccctccccactcccccctccccacactcggtcagcccctagctcctggccatgccaccttctcagtgtctcctgctgtccccaccccgtcccacccgaccacacacagctcctcccaccatcggcctcaggatcagctccctgcagggcacctcacccctgcaccacggtggtccctgcctccctttaccctctccacccttcaccagccaaactgaacctttcccagctttcttccacttgaccttgatctctggctctgctgtttgcaactccagcgacctcactgcaatccaaagcagcccattctactgaaaggcagctctaaccaagcaagcattgctctcccctgccaggaagtccttcttgttgtctaaccttatagtctcctgctgcactcgatgtttgcttgctctccagctggcctcttgttggggtggacaggaggagctcttcagggggacctggttcaggaagccaggtcatctcagagacactacaacatagaacaacattcctttcttctaccaccctcagccccagtggggagagaatcctcttgctgaagggactttcctgaaatgagccaccggcccctgccaatacatgcctgtttgtccctattcagtaaccgtggatacagcccacgcaggccctgggctctgggatgtgtccctgacacgggaggacacagcctggaaagacagcaggagccattgagggaggtccagatgagctagagggatgggcaagggtcccctgcagtgcaggggagggagcagtgggcaccacacaggccctggccgaccctctagcccggggcaagtgccacagccctgggtccccagggaccaaaggagggaacccaaaaaggcctgggtagactccttatccactgcccctgccccatccctgcccttgaggcctgttctctccagggcagggattgccccttggtttctgggacactaacctctctcagtccatctttaatcccctgcctctccaatacaacaggatccctctccccaggtgggagaagcccctctccatgccacaggaaaagcagaggcctcacagcgtaagagatctgggttcgagcccagctcagccactgattagccggtgacctcagcacgtgacttccttctctgggcctcagtctcctcacctgtaaaatggtggcgttagtgagccaaggcgacagtgccagctctctttatccagcttctcagtgatcccccagagacccaggcaatcccaatggggggctggggggagcacggcaagtcaaccaccaccctctggttctctggatgcacagacacaaactcccacactttcacagagcggggaggtcacccggcgcaggtccagtctcctctgcagcccggcccccagcactgtcctgcagccgccacactccaccttgtggccagacctggaagtgtcttgtgaggtctggagggtatggaggggggctcccccgacagcaccgggt

SEQ ID NO: 588280 - DNA, 4001 bp, Homo sapiens
tccaaatcccatgaactttcttagtagccacatcacactgctgactcatcttgtactttgaagaaattaaaattcttcactttgggaggccaaggtgggtagatcacttgagcccaggagttcgagaccagcctggcaacaaggcaaaaccccatttctactaaaaataccaaaaaaaaaattgccgggcagggtagtgtgcacctgtagtctcagctactcgggaggctgaggtgggagaatcacctaagcccagaaagtcaaggctgcagtgagccatgatcacatcagtgcactccagcctgggcaacagagcaagaccttgtcaaaaaatatatatatattcctgtaacctttctattaatgagcactgatttcatcatagtaccccagtactctgcttgtgaagttgccactcattgcttaaaactgaaaactaaggattttacatttattcatgtactgcttagtccaaccctgttgaactctctaaacagttctaccattcagcaagaggtggattactatgaagccaacgaagtgtcaaggcccttcacttacacagtcctttccaaggcccaatactaatgttgcactgataattttgagttatttttttaacagaacaccaaaatttgtataagcccaacaaaaacgaggatctgcccttgcatctggcatattgtgtacctgcctcaacttcctattagcaataaatctactaagtttctcacctcaatccttttttaaagttattgatataaagttaacagaatttgcctacttgggacttttaatcccttttcagcctttgttcaaccaatgagagtcttaccttagtgagaggaagtgtctcaggcagaataagcccctccttctccaatagactcttctcctcatctgtcagtactagcctagcaatctcctagggtaacaagaaagtggacggcagttgcatggggatgtcagagaggaatggggaatcctgcccccacctggggaatgtgagagtaatctcctgaaaatcaagtcaagtacctgctctgccagctcctccatatgctgtggagtcatctgggtcccctcttttctacagctctcactctctgcaaaagggaaagtatgaatagccaggcccatgaaccctgtcctccccgcaaacttatttcagactcacctagatccatagagacagtttcccgtgggagggagtaggtgtggtcatggtggacaaggcaggggttggaggagctgagaatgttcaacgacgctgggggactcagcagggagcacagcaaatcatctacttcccagtcgctcggtacctgcgcagggttccaatgaacaggccttgaccttatcaccatcacctgacttcatggacatcccacgctttccccagtcagaaccccaacctacctcagaaagcggcagcgcccagtccagtggggccctcacggcctcatcgggtgccgtccccaaatctccactttcctctagcaggaaggccagcaggtcttggtcaccagcatccaattccagctccatttgggacaactacggaaagggtgggccaccgggccccaacgtccgaagcccagacacgagccccaggccagctgtaggcctcgggcacctatccactgtccctctacggccgggattccccgccggcggctttccatagccctctccggacccgcctcccaggctcaattctcctcagcctccaacgcagcgaaagtgacgcaccccaccccgtggcactgtgggacttggagttccctccaactgagaagaggcttgggtgcagcgccacgtcccaggggctatgcaaatgtaggggacggccctgctgccgcctcgcaccccgagggcgggggttccggggctccggctccgccttctaccccaagctagaaaaaggaagagttctagcctgaaagggaactcgggcgtcgtcctggcgtcctctccggattgcgccgcaccctcgcttcctgccagggaggggctgccgggctttggcggctcccgagcatcgagaacggggccagagcagcttcctgcctgccccccgcgaccatagagcgcgggcccagggcgccgcccgcgggtgggggacgttcccaggacggaagtggccgagagagtgtcgaagggagggcgaggccggagcccgagggcgacccgagaagcggcggggcggcgggccggcgggcggggcgcagagccaggcagcgcaggtaggccagaccgggccgggcgggggccttagggtggggccgcggggcctggccccggggcgggcgggccctgcctctcttgcgtgtccggttcgggtcctattagttggagaggtcagcgtccagcgcatctcggcttgagctcggcgtgaagtaggccgtcttggggaagacaggcctttcctgggagcagtcctatgtctgggataggctttggggagcgtgaggagtcgggtggcagcggggcgcagggcggggacgggctttggtgttagctgatagcgggcatgtgggtaggaaagctttgggtgagttggggattaggtggggtccgtttaggaatcaagggtcgctataggagttaaaagctggggttaaaacttaagagttagtgtgagtcaggtccgttttagataggtaaggtttagattacggtcattatcttgtttgctgggatggccatcatacgtcataatttgagttcagggtcaggttaagggtcaacaaacaacaggaatcaggttagagcttgtttgagggattaaagaatgttggcatggtcggtgttaaggataaacagtgaaagcgtgagttaggaatcaaattataaatgaactttaggcttaggggtcaacatttagggttaacatcaggggatttggtgctaaaggcaaaacttagatcagtttcagggatcagggattggatatgagtctgtgctaggaaagggatgaatgtccaagccggtactgggaatcaggaaacaaattagaggtggggttaatgttaggaatttggggcagctttaggggttgtggtttgaggctagcatagttgaccttgagcagataaaatttaagaggttggcagtaggtaaatgcccttcttttgtagggaaatcctttattcctatgtagttacaggggcttctttttacccagagagataaactaatttcaggctagcgttctggctttagctagaattgcaggcatctgggattccagcttctttattccattctctaagcccaaggcccttgctgtggccaccacagttaggggacagagattctggactgtgttgtttacagacaacataggtgggaaatagggacccaggatgtacaaggcctagtcacaagttggggactgcctagggaagaaggagctgatgactatgggggaagctaaccaaggaatcactgttgccatgggagaagggaataactgaatcccctgaaagtttagccctgcttctcccacttcacttgttctcttggtattaagccctcctctccaactctcatccctgactctgcatttcacacccatcctgcctatccccttacaaaatacttcccttgcctttaactctcccatgctcatcttatcatccgttcccatccttagttctacctccctcaccaacctttaatccgcacatcctacctgaatttaccctcatcaaaacctgagctttcccatcattttaaattactctcctaccattttcacccagtcatgtacctacattccacctggtcatctgctgaataccctactcccatcccctgctgtgtgtcaccccctggatctaagcctcttttaatttcttggaccatttgtagatccccttcccccactccccaacagaaaagaggaaacgagacccaaagaggaaactgggtcttgctgatcccacgcccagccaggccactgaccacacccccacttcactcccagcctgaccctg

SEQ ID NO: 588281 - DNA, 4001 bp, Homo sapiens
ccatctttttctctagatctcattactgcttctaatctctagagaggacacagcatagtgtagcaaagagaaccttctggagccagggtacctggattcaaatcccagtttggcacttattgaaagccctaacaacaaattatttaacctcagtattcctcagtttcctctcccataccacgagaatatataccaacttcacatgattgttatgagaattaatgagttaatatttacaaagtgcttagaacctggcctaccacatagtaagcattacataggtgttatttaaaaaatggataaaatactatcaacttgaactccatcactctcttatctctctgcctcttaaaactgctccagtgtttctcgttttggttgtgttgtgctagtggagataggcgaggagcggagggtctgacattactgagggatcccagtgccccttcccactggtcagagcctcaatgagacacaggaaaagggaaggagagtgtcagatatattcatcactgctccgttagccatgcgaaggtgaagaaaatagggatgtttatttaaccagcataacaggaatccagggacatgtgtaactgctgttttcaaatatgcgcagggctgggcaggagaagagataatagcatttagaattctatgcaacagctacaggctccccttcactgaacatgtttaagcagggtactggtggccaggtgtcaaggatgctaaagaaagaatttttagtcagataatctttaagatttcttctacctctaaaatcttggtaatcctagtatgagtcacgaagtggttacaacctagatgtgagtcacacatcgccaacgcgctcccgaaggcacagaattcactccccacagtgcttggcatcttaccacagacctaagtgaggaattctagccctgaagctgcatataacccagctcagagaaacaaaaactttcctaaaactcagggcgtcggttagctgattggcaaatacagtaacgcacacatcccaaacgggacttggcaaaacggtgtgcatctggattaactgtcatacagtctccacgtcactcttccacgaggccggacagaagcgggcagaagtgagcagcagcaggttcaggggaaggggtagggtggccgggatgaatgggaggccagcgaactgacctacggcggggagggacaaaggatcagggagcgcacgctgggcggggaggccgggaggaataccccaggcggaggagccgggctcgggaccaggctgcgaactggtgacaaagtcggttatcgtggagggccctaagtaccagcgaggggccccgcgggggtcctctctgcctcgggagctgggctcaaccactcgccccgcggagggggcatcgcccggccgggggcacccgggagccgcagacccgaggcaggtactgggggcaaaggcccaggccggcacccccgccccgcagcctcccctgctgccgagtccactcaaccctgccgccggagtttggattatccagtctctcgccgcccgggccgaggcccgtcccggagccccacacaggcggtccgacaagaacgccgcagtgccggcgcggaaagtggggcagcggctgcctcccgtccggtcgtgcgagcggcggccgccatcgcgggccgcggcgggaaggagaagaggggccgcgccaggcgccactttacctgagaaaccagcgggagtagcgtctgctccaccgagcgagttttgatctccagtcccgagtcgagggcgaagcccgaagagccggagccgtagactgctccggcgccgccaacgccggcgggtccgggagaggcggccatggccctcggtctatcccgcagccgggactccgcgccgcggcgagcctgccgccagtcagcccacccgcccgaggcggcggcgacaggacactcgcgccaaccgagaccccgcccccaggggcccgcccccccagggctccgccgccaaccctgcgtccccgacgcccgtcaccgtatgtccccgcccacccccggcctctgccccgcccgcgcagtccagcctggtgtgggctccctgcaaccccaccccctaagccgggtcccgcccccacatggccccgcccttatctcttctcagaccccttccatgggttccaggcaccttctcgccagggtggcgaggagaaacaaaacacatctgtcacacagccacatggcctcctcttacttggacagacaagcgtccccagcaaagcttcccgtcctctcgataggtgactcgtcctaaatcagctctgaattcccgcaaagacttctggaagctgtgctggggttgaaactggtagaccaaaaccagaatcaagtctgttgggaggggcctttcccctgggacgggaattccagtggtaatgtcttcctggggcttctccggaaggtccaatttccactccaccctgctcattctttcaccatgtatttctcacaaacactttgagctggattgaaggggaaacatttgataatgcaatcattaatggagtatctgggtattcggcaggaagtcagtatatctttcacactactgtttagacttattcaaaagaaatttaaaagaaacatgaaaaagcctcatctactgttcaacactacttcttaaaactatttttcgaagttttttcctagtgccaggcacagagcagtttcttcataactgttcattgcatgaaaacaccaagtgtgtatttctgacaactcacttgaggggaagggtaagaatcagttctgtaagcacaactctgagctcgcacagagccccacgatgggggcggggagctgaagactcctattctaaggtctccaggagcaaggccaaaaggaggttgtcagcagtatgcacgccgtgaaggaattccagacttaagcaacagactgagaagcatgaaaaaatgttttgtcaactaccatatctgccagtgagaacctgtcagagtaaaaaagaatctgaggctggccagtccacccggacaccttggcctggatcatttcttcttccataacaccagattgatgagctgggtacatcaacctgaggcataagaaagctctttcccaagcaccgttgaaaggcgcttcacagtgcttcaacctgtagcttcagcttcatcaatctaccagtgctgcacagctgtctttggtattgaagatagccaagcttcagcttctttttcttcattcaaaaaggacaggtcctcaatccaactttttcttccaattcttctcagccaaccatctcaccacttccttacctatcacaaggccaccttcccctgtgcactgagggcccttgacctctttaaggcgcccagtgtccacttcctggacacaccttcccttacgaagttgacagtatctcctaagaattcagtgtacacaatggtgccggaggaaatggcataacagaaggcctaagagacggatggattcatgaaactttggcttcacaaaagatcaagtttttcaacacacaggagattaagtttaccacatgattcattcaacactagtaattttatttcaaaatataaatatttcacattaataaagaagttacatcagtaggttgtcaaagcaagttagctaagaaacagcatttgtgtgagaacagagggtatttattgtattcgaatattcttttttacttttgaattgcctccttcacctgagaacccagggatgatacattttcaaagagttatgtaagcaattacaactctatatcaaatcttagttcaaaatcaaattgtactggaaatacacttcagttacctaaataagtggcactgcaaagggcaaagaagggttttctttgggatggctacaatgagagttacatctgctgggtctctgcaataaaaaataaatgatatttgataataagccaaaattatcaggatttgcttccatacttttcactgtaaaataaaaagctagca

SEQ ID NO: 588282 - DNA, 4001 bp, Homo sapiens
ctcccacactgctctcctccatccttcttcattctagaggcaaacatgtaactgatgctctttacttctacctaaaacccaactcatcctcaccaagtgaatctgcagacagagatggaagagaaaccatggcaagggaaggcttgacacctctggggatgctgttctccaaactgagacacaacaaggatgaatgtccacattgtgctcataatccacgccattaggttattacattaggctattggtaaaagctggcctctagaagctactctctgactaaaacttctcaacagccaggactattctttctggggaagtttcactaaccatgccgtataatctgttgtgcatcgccttccacttggtccactgtgcctctaaactgtgatcaaatgttagagtagctgaggcaattcccaggcaaaaggcagcaaggatgagtgtaggattcatgttttaaaacctaggaagggaacaaaaatgaggatctgattagaccaatcctaaaaagccatcttactgccccctgaaaaattagggccaccatggtagaataaaaatatttaaattattctcccaagcatttacccaaggactgtggaagaggccaaggatgtgcctggagaaaaacagggcacgtggaggtactggatggactcaccaaaatgaaaagcagcctgtccagagctgtaggagctgaaacagtttatgcgatgacaatttaggttatgagaacggtatgaaactaccttgtgtgtgagaagcttaaggcaacaactaggaaaccgggaaacggttgatccaggttttgtaccaatcgcaaaaaatccaggtttcgtgcccaggcaaaacctcactaatgataaggtgggattcccaagtagggacaaagagatccccaagagttaggaggccttcacacatcttcctgactaacaaacaccaaaagctgagataagttttccaatctctcctatttatttatttatttatttatttatttatttatttattttttgagatggagtcttgctctgtggcccaggctggagttcaacggcgcgatatcggctcacagcaacctctgcctcccgggttcaagccattcttcctcagcctcttgaatagctggaactacaggcgtgcgccgcctcgcccgtctaattttgtattttcagtagagacggggtttcaccatgttggccaggctggtctcgaactactgacctcaggtgatccgcccacctcagcctcccaaagtgctgggattacaggagtgagccaccgcgccgccccaacctctccttaaatgaaacctttctgaaatgctttcccaggaaaaactgggaaggagagcacgcactgctccctccttcattcacttgggcctgtgctgccgacaccccaaactgctcccctaaatcagggacggggtcatatggccgcacgcgggaagccagcgccctgcagccagcttccagggctccaggcgtggcagggccggggacatgacgcctgcgccacacactggctgtagcggtcagaggatgtttgcggtgacgccagcaggagtaccgctgtctggcgtgcggggactgagcttccctgtctggccgggccaggccctgagtcggcgcggcgcggcctggctgcggtacctgtgtccacccggctcggaggctggcctgcccgctcaaccagtcacgcgcctccgcggggtcctcaactgccctccccggcttccccacctcaaggccagcagagttcggggtagacgctctcgttgccagggctggtgcacacctactcgaccgcgtcctctcttccagtccctgtccggccacagctgggcctggccggcggcgctttcctgctgcggtcgtagctgcgcaggcgcactccacggatgccgctcaaggttgcggaggtcgcggttctggcccagcttcgcctgactctgcttctaaaacctcgggtctgggttcggccggcaccgccccgccgcctggctgcgctgcgattggctgtgccggcagctgggcggggactctgggtgctctgatccctggcgcggttcgtggcttgtttactgactgtcccagagctgggcgtgcctgcctcagtggacctggaggaagcagagctggtgccccggggcggcgcagagtagggtcgggcgtctccctggagcgctcgagtcaactaagtacacgacttactgcactgggcgagtggctcctgaaaagacgtttaccgcaagccctgtgtggactgtttcagcctaaccttgctattccttagtcctggaatttttggtccgcagagccgagagtcaagtgtactctagtccagtggctcctgtttagtccacagcaaacgtggggccgggtggacgaacgcagagcccgcgggcagaagccttatctcccacttaagggtgggtgcagctgggctttagaagaatctggtaaggaaaggcatccccaaaacacgagatgctatcgtcaagaccagaccctaggagggaggagactggctgcgtctccagagagcgcgggcgttttgtcaagcatcctttccagactcctccattcagggattcttccttctcccacgtcttacccaaaaccaacagaaatgagttatttacagaaacatttggttgacaggagaaaagcagttgagaacattagaagctgcttttattcgcccactctctaggctatggattatatcttccttggtaaccaagtcgttctcttgagatttaagaaatttaatgacatttaatgtcaggatttaagatacagagaatggagaaatgttgtagatagaggaaaaatatgtatcttaatctgtataatgtagatattaatttatgtaattaaggatttaaggaacaaaacccacaaacattctaaacttttgtcatttcattttttattacataaaaacattcattgtagaaaatacctttcggggaaaaaaataattacctctgcctttaccccataaccttttcgtatgcatattttgactttgttaaaaatgaacaaagtccattgatttctattgaagattaaactgataactcttttagaagcacaatcacctatagttttttaagtggtaaaatatacctcacatagcaagtaccattttaaccaactttgagttcagtagcattaagtaccttcacattgtgtaaccattactactgtttattcccagagcttgtttatcttcctaaactgaaactgtatccattgaataatagttccccattccccctctcctagctcaggtatctaccattatatttcctgtctgcaggaatttgtttactattttggagattattcctctttttttttttttgagacggagtctggctctgttgttcaggctggagtgcagtggcgcaatcgcagctcactgcaatgtctgcctcctgggttcaagtgattcctctgcctcagcctccagaggagctgggactacaggcgcgcaccaccacgcctggctaatttttgtatttttagtagagatggggtttcaccatattgaccagactggtcttgaactcctgacctcgtgattcgcctgccttggcctcccagagtgctggaattacaggtgtgagccaccgtgcccggccgattattcctctttttatgcattgcttctctggagaaccagtcacaatgtgtagaatacaatctaactgtgatatctgtcctagtctcttttctgttgctaataacagaatacctggaactgtgtaatttatgagaacaacatttatttcttacagttttcgaggctgggaagtctgaggtccaggaagtgtatcttgtgagggccttcttgcttgtggggattctttgcagaggcccaaggtggtgtagggcatcacagggcgagagggctgagtgtcctagctcaggtctcttcctcttcttttaaagccatcagtcctgcctgggcgcagtggccca

SEQ ID NO: 588283 - DNA, 4001 bp, Homo sapiens
ttatgtctacttacccaacccatgttcaccaagccgatttgcgggcagaaatggaagagaaaccatggccagggatgggttgatacttctctgggagctgttctccaagccaagacacaatggagatatatgcccatattgcacctataatgggtgctgttaggttattgcctggtaaggtctggtgtctagaagctactctctggctatcaactcccaacagcgaggaccattctctccagagtccctctggacagtttcagatgttaccaaccgcgccatataatcttctgtgtgttgccttccactggtaccactttgtatccaaattttggtcaaattttggaacagcggaggctattcccaagcaaaaggcagccaggacgagcgaaagattcatgtttcaaaacctagaaagagaaaagaaatgagtatctgattagaccaatcctaaaaagccatcttacagcccccgtggaatagaaatatttcaattattctccctagcatttccccaaggactgtggaagaggctgaaacaggccaagtggaggtatttgatgggcccaccaaaattaaaagcagcctgcagagttggaggcgttgaaacagcatatgcgataatttagggtatgagaagggtgtgaaagatacctgacgggtgagaagcttaaggcaacaactagaaaactaggaaagagttggtccaggttttgcaccaattgtactgaggtcatccaggcaaaacctcactaatgaagacgtaccatcccaagtagatgcaagcggatccccaaggaacaccacctcacaccttcttggctgatacacagcaggagatgagctatgtcttccaacctctccttttggaataaaacctttcgggaatccctttccaggagacactgggaaggagagcacccactattcccgccgtcccacacttgggtctgtgctactcgctcccctaaaccggggcagggtcacaaggccgcgccgctggaagccaggggccccagggccagggcccggaccgaggcaggcagctcccggagctccgggcgggccaggaccggggccgcaccgcctgctctcgccctctgcacgcgccgccgcgccccgagaatgtttgcggcggtgcagggagcgggggctccgcggccaggctgggggcatgaagccgcccggtccggtccggcttcagcccacaggatgactgacctgccccgcccgggccctcccagtggtgccggcgcctccctggggtctccaaccgccctcccccgttccccacctcgaggctggcagagctccgggcagaagctctcactcccagaagcgcccgcctcctctcagtgtccctaaaggggggttccctcctccagtcccccttcgccctgtccctcggtctggtcgggggcgctcaccagcagccgtcgcagctgcgcaggcaccctcagcaaacaagcctctgagattacagacgtccgcggtctggtgcaggttcgcccgcctcgggatttaagtttccaggcggccttccccgcccccaccgccttcccgcgctgcgattggctgtgccggccactgggcggggccccgggcgcttagagcccgcgcgtgacgcagcccagtcccaacccgtctcaggtctgggcgcgcctacctcaatacaccctggctgcgggaagctgggccgggcgcccgggggctgcgcggaggagggggaggcgcctccctcaagggctcagatctactgactatcccgacttactgcgctgagcgggtggtttacagcgagctctgtgtggtatttcagtccctactttaacttagtcctagagtttttggtgaaaatctgcagggccgggagccagggtactctcgttcagtggctcctgtttagtccacggcaaaggtgggacggagtggaagaacgcacagcccccagcagaagcattaccttccacttaagggtgggtgcatcagggctttagaagaatctggtaaggaaaggcactcccaaaacacgggatggatggtcgagaccggacaccaggagggacgggactagctgatagggtgtccagagaccgcggagcgttttgtggtgcgtccttcccagtctgttgcattcaggaattcttccttctcccatgtctttcaataccaaaaaaaaaaaaaaaaaaaaaaaaaagagttacagaaatatttggttaataaaaaagagaaaagcgttgagaatggtgaaataaattgctttaaaaatttttcttttgtagaaatggagtttggctaagtttccttaggctgctcttgaattcctggcctcaagcgatcctcccctctcagcctcccaaaagtggtgggattacaggcgtgagccactacgcccagtctgagagtggtggaaattgcttttacttacctactctctgcttatgggttacaacgtctcttcctcagtattcaaagtgtgcttcttttgagatttaataaatttactttaaaaatgtttaataccggccgggcgcggtggcttacacctgtaatcccagcactttgggaggccgaggcgggcggatcacgaggtcatgatatcgagaccatcctggccaacatggtgaaaccctgtctctactaaaaatgcaaaaattagctgggcgtggtggcgggcgcctgtagtcccagctactcaggaggctgaggcaggagaattgcttgaacccgagaggcggaggttgcagtgagctgagatcgtgccactgcactccagactggtgacagagcgaaactctgtctcaaaaaataaaaataaaaataaaaatatataatatcagggttgaggtgatgcagtttgaggaactgctctttatggagaaatatatgtagctaaagatttaaggaaatcattaataattcagaaacgtttctaattctttttaaagttatataaaaaaatccattataaaaaatatgttttagaaaataaacgtcccttgtgccctctccataacccttttctaggcatatctttttttgtttttacaaaaatgaagttataatgcatattgattaataaactcttaaagattaaattgaataatatccacagtttttacttgttaatttgaaaatttgtgaaatcaagtttagcctaaagctgcctccccatgtgatttaagtttggcctaaaggtttctctgtacatagcgaattgtaatctaaatggaggtgtaaacagactgtagcctgctcttgtgcctatccccgaatttctgtaaatcaaagaggttcagttgttcaaaccatgttcaaataaggcaaacatggagctgtatccaatcctgcagtttctgtgcctcacttgcccttttctgtctataaatcttcccccatgtggctgcactggagtctctctgagcctactctggcactggaggctgccagattcacgaattgttttttgctcaattaaattctcttaaatttaatttggctatggattttcttttaacaaattaaaaacaattaaactgacaacttttcagaagcaccatcaggcaaatacatctttttaaaaatcaatttattaataattatatgtccttcctttaaataaatagcagcttttccctctcaaatacaactaggggccaaagctgtcaggtggttatataaaaaatacaaaagtatattgtattgcaggccaaggtaggtggatctcctgagcctgggagtttgagaccagcctgggcaacatggcgaaatcacacctctaccaaaaatacaaaacaaacaaacaaaaattagccaggcatggtgatgcatgcctgtagtcccaactacttgggagactgaggttgtagtgagcggagcagagcatgcgccactgcactccaacctgggtgacagagcgagatgccgtcccaaaaaaaaaaaaaaaaaaaaaaaagcatcttgtacttgtactgcaaatttgccgtctcaaaaaaaaaaaa

SEQ ID NO: 588284 - DNA, 4001 bp, Homo sapiens
caagaaacagaggctcacggaacactttccccttcctgaatttctggtttcgaaagcaacccatcatctgcctgaattcttcattggtcttcaaggagaagtaaataaaatgttaaaagcaagactattttggtgaagaactgagaagcagcacagagttcagcaatccttgccacactcaccatgtcaccaaaagcattcatggccattgtgaagccatgtttcccttggctgtattccccattgtgcagttcaatcattttcatattcttttcccacactgctctcctccatccttcttcattctagaggcaaacatatagctggtggactttatgtctacttacccaacccatgttcaccaagccgatttgcgggcagaaatggaagagaaaccatggccagggatgggttgatacttctctgggagctgttctccaagccaagacacaatggagatatatgcccatattgcacctataatgggtgctgttaggttattgcctggtaaggtctggtgtctagaagctactctctggctatcaactcccaacagcgaggaccattctctccagagtccctctggacagtttcagatgttaccaaccgcgccatataatcttctgtgtgttgccttccactggtaccactttgtatccaaattttggtcaaattttggaacagcggaggctattcccaagcaaaaggcagccaggacgagcgaaagattcatgtttcaaaacctagaaagagaaaagaaatgagtatctgattagaccaatcctaaaaagccatcttacagcccccgtggaatagaaatatttcaattattctccctagcatttccccaaggactgtggaagaggctgaaacaggccaagtggaggtatttgatgggcccaccaaaattaaaagcagcctgcagagttggaggcgttgaaacagcatatgcgataatttagggtatgagaagggtgtgaaagatacctgacgggtgagaagcttaaggcaacaactagaaaactaggaaagagttggtccaggttttgcaccaattgtactgaggtcatccaggcaaaacctcactaatgaagacgtaccatcccaagtagatgcaagcggatccccaaggaacaccacctcacaccttcttggctgatacacagcaggagatgagctatgtcttccaacctctccttttggaataaaacctttcgggaatccctttccaggagacactgggaaggagagcacccactattcccgccgtcccacacttgggtctgtgctactcgctcccctaaaccggggcagggtcacaaggccgcgccgctggaagccaggggccccagggccagggcccggaccgaggcaggcagctcccggagctccgggcgggccaggaccggggccgcaccgcctgctctcgccctctgcacgcgccgccgcgccccgagaatgtttgcggcggtgcagggagcgggggctccgcggccaggctgggggcatgaagccgcccggtccggtccggcttcagcccacaggatgactgacctgccccgcccgggccctcccagtggtgccggcgcctccctggggtctccaaccgccctcccccgttccccacctcgaggctggcagagctccgggcagaagctctcactcccagaagcgcccgcctcctctcagtgtccctaaaggggggttccctcctccagtcccccttcgccctgtccctcggtctggtcgggggcgctcaccagcagccgtcgcagctgcgcaggcaccctcagcaaacaagcctctgagattacagacgtccgcggtctggtgcaggttcgcccgcctcgggatttaagtttccaggcggccttccccgcccccaccgccttcccgcgctgcgattggctgtgccggccactgggcggggccccgggcgcttagagcccgcgcgtgacgcagcccagtcccaacccgtctcaggtctgggcgcgcctacctcaatacaccctggctgcgggaagctgggccgggcgcccgggggctgcgcggaggagggggaggcgcctccctcaagggctcagatctactgactatcccgacttactgcgctgagcgggtggtttacagcgagctctgtgtggtatttcagtccctactttaacttagtcctagagtttttggtgaaaatctgcagggccgggagccagggtactctcgttcagtggctcctgtttagtccacggcaaaggtgggacggagtggaagaacgcacagcccccagcagaagcattaccttccacttaagggtgggtgcatcagggctttagaagaatctggtaaggaaaggcactcccaaaacacgggatggatggtcgagaccggacaccaggagggacgggactagctgatagggtgtccagagaccgcggagcgttttgtggtgcgtccttcccagtctgttgcattcaggaattcttccttctcccatgtctttcaataccaaaaaaaaaaaaaaaaaaaaaaaaaagagttacagaaatatttggttaataaaaaagagaaaagcgttgagaatggtgaaataaattgctttaaaaatttttcttttgtagaaatggagtttggctaagtttccttaggctgctcttgaattcctggcctcaagcgatcctcccctctcagcctcccaaaagtggtgggattacaggcgtgagccactacgcccagtctgagagtggtggaaattgcttttacttacctactctctgcttatgggttacaacgtctcttcctcagtattcaaagtgtgcttcttttgagatttaataaatttactttaaaaatgtttaataccggccgggcgcggtggcttacacctgtaatcccagcactttgggaggccgaggcgggcggatcacgaggtcatgatatcgagaccatcctggccaacatggtgaaaccctgtctctactaaaaatgcaaaaattagctgggcgtggtggcgggcgcctgtagtcccagctactcaggaggctgaggcaggagaattgcttgaacccgagaggcggaggttgcagtgagctgagatcgtgccactgcactccagactggtgacagagcgaaactctgtctcaaaaaataaaaataaaaataaaaatatataatatcagggttgaggtgatgcagtttgaggaactgctctttatggagaaatatatgtagctaaagatttaaggaaatcattaataattcagaaacgtttctaattctttttaaagttatataaaaaaatccattataaaaaatatgttttagaaaataaacgtcccttgtgccctctccataacccttttctaggcatatctttttttgtttttacaaaaatgaagttataatgcatattgattaataaactcttaaagattaaattgaataatatccacagtttttacttgttaatttgaaaatttgtgaaatcaagtttagcctaaagctgcctccccatgtgatttaagtttggcctaaaggtttctctgtacatagcgaattgtaatctaaatggaggtgtaaacagactgtagcctgctcttgtgcctatccccgaatttctgtaaatcaaagaggttcagttgttcaaaccatgttcaaataaggcaaacatggagctgtatccaatcctgcagtttctgtgcctcacttgcccttttctgtctataaatcttcccccatgtggctgcactggagtctctctgagcctactctggcactggaggctgccagattcacgaattgttttttgctcaattaaattctcttaaatttaatttggctatggattttcttttaacaaattaaaaacaattaaactgacaacttttcagaagcaccatcaggcaaatacatctttttaaaaatcaatttattaataattatatgtccttcctttaaataaatagcagcttttccctctcaaatacaactaggggccaaagctgtca

SEQ ID NO: 588285 - DNA, 4001 bp, Homo sapiens
gtgcgtgtgatgatactagcatctagttggtagagaccagggatactgttaaaaatattataatgcatcttacaatggacagaatgctggatctcccctacccccagcacctactaatcctctattccaacaaaaagttttctagactacgatgtgagtggtgccaggatttataaaaccttgtctacatcaaggtgaatccctagaccaggatagtaagagacgactttagtaatgctactcaatagagagaaaaacataaaatatacattagatacgagattgggaagctaatattggaattttaaatgttcatatatttagataccctatctcacaccaaatttttgtgataacctctcctacctgtttcagaaatcttagttctattcaacattataaatgggctgagttgactaacacaacctaaatttgaggccaaggccagaagtgatgaaactattaaatggtatagttgaggtttggatagagcaaaggtattagagaaggaataagtgggaaaggaaaaactgagttcaaacagaaaaattttctttatcacatacaagttgatagccataggcacagaaatgttaagtccaaaactaaggctctgccatccttagaagaattcagtgaaaagacaaatggagtcgaaaattaattttctgcatcttaaattttgcgtgttcaatgaattgggagctgtcacttgaactcaaagaaatatgctaatttgttattaagaatttttatgtatgcttttctggctaatggtgaggccatttgattatgatttctatcagtttcctcctacaaaaaccagaatgttttgggattacactagaataacaccataaaaaatagccataagaccaaaaagaggtttctaaccattgtggtcaagttctctgaaagctatttgatgctcatgataacaataataccatcgatattttacagtgcttatatatttgaaagtaattaaaatacagtgtaattctgccatgttaggtgccagaacatagatttttgcatagtaggcatcaatttactcagcttctaaagtaatcatgacaaatgcatttaaacctttaccaaaaattatactttaatgattgttttataacaaaatgggcaccagtatctatggaaagcctattttatttttaatattcatgttttatctttcctttaacaatactgctaaattaaggcccacccatactttatattacaaaactccattccttcacctttgttgcatgtcctctgtaaaagggtttacagaattgaaacgtgctctttacctaccttattttgacacagaataaattaagcataagtaaactactgtcatataacttctcatgtctggattatatgctttacattacaaagtacttccacatactcaatattttgcaagagggataccactagtattcagttggtcacatttggatagagctgccccactttttactaaaggttaacactgcgatataatgcctcctctaaaattcagtcacactcctcagtcactattacatacacaaaaaatattcacagaaatttccaaggtggttccctgactgaaaatcatgaattattttattttatattactcaaaatgcaatgtgataaaaaaatcaagtaagactagcagtaaaaaaacaaacaaaaaagacttatccaaagccaggtatctattttactgaaatgcatgcactagctatgtcttaaatcaaaaaaatctattatgttgcttgagaatctttgtctgcttaaacacattatcttttgcttatgaatggcatcataataatataataaatatctcttcatactaaagaagttaaatgtaaagctaacgagtatttcagttattttaaaacataaaatttgacttacaatcttgggagagacattttccccacttatgacttgccaggacttaagtattgtaagttcaaactggtgatgttgaaaggtgacatcataaagaagccaagagcacttggaattaaaggggtaaaacaaaaggagtcacttgtgtttttatgttctctaaaattctaagattaatatttactttcacttattactgactaaatctagctaggagttttaaaagtaatcaattgattttacactttaataaaatatttgttttatttttttcatgtaattgtaatttattgactgatatggaaaaaaggtaagtctaaacatttatctgtgaggatcagctgtaatcctaaattccctttcattcctgtaacttttgttaaatcaatgcataactttacatgtctttctctcatcttaaacgtattgttttctcatacatagaatattttaaacaaagctatatgctttttaaacttataaatatatgagttagtacatttttattaaactcataatcttaccccactaataaatgaatactagtactatatagagaggcatttaaacatgttgctcttatttagctctttttaaaatatcttagctattttttgtcttaagaaataattttattaaatataagcttctataaggggtaaactacagaaatattagtagtttgactcaaagtttctagctgatcttacacaatgataaattatagaggcattggagctgggatgggagcctttccataatttagatttctgtgatctgattacttcactatctgacttaatgagaatatctactgaagttttcctgaaaagtgatagtttaataagtaaagtataatgtctaattctataatattttgttgagcattttatagtctatagtggcttttgaaaatattaatctctaatgcattgactctatcatcatacattaaaatctaaataatgactgggcaacaggcaatacttgccttctgcattatcatctctttaattaatctcttattgtcattcttaattaaatgtgtatgatctagtaatatcttagccaatgatatttttataatgagcatgtgtcagtcttctattgctacatagcaaattattacaaattgaagacataaaacaatactcaatttttatctcataattttataattcaaaagcttaggcaggtttaactaggtcctctgcttagggtctcacaagactgaaatcaaattgtcagctgaactgtgtcttacctggagactcaaagaaagaatcagtgcctaagcacatttcagctggtggaatttaagtccttgtggcagtaattctgatatctctgttttcttccttgctgtcagctatgagctgctttctgtgcttagaaactgcctaagttccttctcaaatacatccccctacatcttcaaacctgaaatatttcatggagtcctcatagttaaatcagtcttatcttttttcagccttcctaaccactatcagttgaggaaaacctttgtttcctaaagggctcaaatgcttagattcaagcaacctagataatgtatttaacttaaggatcaattgtacttcataatgtagcatataatgggaatgctatctcctgttattcacaaattctgcccacactctgaagttgttgggagccttaaaattttgcctacaacatatcaaatattaagactaaaagtctactatagaatatgaggattaatagaaatatatcaaaatatactagccatatatttatatatatcagccatataaatatatatataatatctttagatattgctaatgtctatccagcatcagcactataaccatatattaatgtttttgtggttgtttttaagcttagaaatcatgtcttcaaacataaatattctactttataaatgtgtatatatacacatttttagtgttttaaagattatacagttatttgtatacattaactcattttttctataataacaatgtaaaggttaggggaggttgtccttgaacaagatatatttcctaagaatttgcaatacgttattaactcagaaacatggc

SEQ ID NO: 588286 - DNA, 4001 bp, Homo sapiens
tgcgctgtatcctcctgctgtccgacccatggactgaccccagctcacagtctcagtctcggccccagggagcgcaggtcagctcaaatccagacctggctcagctagggctgtggacacgctgcaagccctcgtgcagtctctgggcagacccgggacttgcaggccaggggaaagtgtggacgtcatgaggcagtggcatccctgtccttgcagtgtccacagtgactgtgtgtgtgtgttctcgggtccacataaaggggcagatgccctgtgtccagctacaaccccctcccaaaggagcctgcagcaaagaagaattgctgggaggaagatcaccctgctttattgcctgggccttaaggtaatcaggggtgtccctctccagccaggacctgggattccgtttcaggagctcgggctgaacggccaccttcctggtgggtctgagccccagtgcctggtgtgaaggggcagacgcccatgacaacagccaccccgcatgtcccggcatgtcccggcactgtgtgagccacatttgctgaagtctgggtcctggccctggcagggtgggctgggctaggagatgacacagcagcagcagctgtggcagcggcagaagggggggcagtggcagcagtggcagcaggggcagcagcagcagtggtgggcgatgtcatccccgcgccccgcgggcggagggccagcgtaggtcagtccggcctggcgctgactgctgctgtaggggttgccaggctgctgccaggcctgctggttctggatgggggcagccccctggttacccttggcgcccttgggccctgggacctcggtcggctgcaagaggtgggttggctctggggcacagggccccactggcaggggctgcatctccgaggatgaggaacaggtggaagccacctctaactgctgccccaggtcaggccgcaggtgagcccgggggatgctgatgtgggcatatgggttcttgacgaccatctcttgggggtccatggtccagcctgcaggggtgggcagagaagacagacatgaactcagtggagtgggatggctgcccacgagcctgcggcccaggaaagcccccaccaggagcagcgtgcctcgtccaagctcagcatccccaaggcatcagtgccggggtgccatcacctccaaatgtgtgtgcaaggctagtgtcatgggtgtgagccaagtgtgagcaagcagcaagggccggtgtctcccagctgccacccctgccagggatcctccccctcccctggtggcattggtcctgggatggagctgggaatggggtcggggaggctgagagatgggagagaagggggctgaccctgcagtgcccctgagttcagggcagtcccggcggccaagggcttacctgtggtggcaacacggcagtctgtcctctcggtcttctgagctctaggtcccagtgcctgagttgagcgactggcagccgccttttccctccttgggaggggcggggccatggggcggggctcagagatggggttcccaagatcccaagaggccccagcaactggagcacgacagctggcccagccctcgtcctcaggtgggtggcagcccaggcctgggctctgaggggcactgccaaaccagtgactcagcccctcacatccggggcatggcctgggccctaaagggcatctgcagcttgcctgagaggagggcaggaggtgagcctgaggtcacggctctggaaaggaagtggggtgaggccctcagattcccgggcctgcagtccccagccattgctcacacacctcaaagccccggcgaggcagggcttctaagcctctgagcctcttcttagcagagaccaagatgcttgagagccattggctcttggaggctttctgcttcttttctgagatggagtcttgctctgttgcccaggctggagtgcagctgcgcgatctcggctcactgcaacctctgcctcccgggttcaagcgattctcctgcttcagcctcccgagtagctgggattacaggcaaccaccaccacgcctggctaattttttgtatttttagtagaaacagggtttcaccatgttggccagactggtctccaactcctgacctcaggtgatccgcctgccttggcctcccaaaatgctgggattacaggcgtgagccaccgcgcccggccgatttttgagacagggtctcactctgccatccaggctggggtgcagtggcatgatctggctcactgcggcctcaacctcctgggctctagtgatcctcccacctcagcctcttgagtagctggaaggactacaggtgcaccaccacgccggctaattctttatagagatgtaggtctcactatgttgcctaggctcatctcaaactcctggactgaagtgatccgcctgcctccacctcccaaagtgctggattccaggcgtgagccagcgtgcccagtggcttttctgcttttttcactgataaaaaatgtttgatttgcacgttttgtcacaggtcttatcttacaatcagtgacacgggctttagacactactgacatttttagctcatttctcaaactgcagttaccctctggctggcgggcgtgggggccacacgcgcccccccagcgtccccaccttgggccccccgcctccagccgaacccaggctccatctgcaccggcgcaggcaggggtgcagcgggcactggcgagtgccgcggggacgacccacggcagtggggcccttggggcccaggggagcaccaggaagggcgggttccagtcagacgtggcctgtgtagggccagtcagaccggtcgggacatgagttcaggcaacccggccccgatttggggagaactgggtgctcctggggacccaaaacttgagaggccggcgacggaagtccactgcgcaggcgccggaagtcccgcccacctccctgcctgccacttgagtggcgcctatggcgcatgcgcaaacaaggcaggaaccggccgtggaaatattattgcccagaagcccacgcgctccggggtttcccgaaagacccggttcggatgtgaccaatactcggcttggggttctccagctctgaatggcgggtctgaaaaggcctggcctggggggcggggcctcgtggcgggggcgggatctcatcccctacggggtggggtctcgctgagggggcggggcctgcggcctggtgcttcctcgggcgcacgccgggtcggtgagcagagtctgcggcggagctgggctcccggccctccccaggcccaggctgcctcagttgccccaccatcttgccagggccccgtaaggacccctccagcagcgcccctgtcacccgcacacctctccctattgctcttctgagtgacactcgcccgaggccccacagaggggccaagccagaccctatgcgcagggctgctcctccagcctgttttgcccacgcgagctcccgcaccagcggcaccgtcccctctgggctcagcactctgcaggccctggggctctgcctagagcaggtgcggtctggccagtccagcggagagaggagctgaaggaggccaggatgtccagggccaggtgcggggccagagctggtcacagcgtggcagcggaggccctcgaagccctggtcccctgcctcacggtgaccagcaagcccgagggctccacaggcagaaggcggacccaggagggcagggaagccccgggtgaggaagcggagaggcccgggcctgcgcgctggagtgccaggggccaccctgtccgggcaggtgcggtcctcagggccgcctccaccccgcactgggctgccagcctgtccttcgcgcactcccaccggacccgtccgtccaccggcctcggccttctgatccgctccgcccgccccgctcttgccccttagagtcacagcgatctatctgagctacggcaccgggcacaggcggagctggaggactcg

SEQ ID NO: 588287 - DNA, 4001 bp, Homo sapiens
gacccctctccagctgggcctgggattgctcccagagagagcctgggctccactccatgcctgcctgtccctttcctaaggccccctctgtccctttcctcttcctcttgaatcccttacctccctgcctggccagcttccaggagatcagcaaccggcctcgtgacaggccaggacaaggagctgattgtgcatggggcctttccatgagggtggaggcagcctcagtttccagccttgcccagcccagaggctgctactagcaaatctggaggacagcaagtggggactgtgggttcctgagatatccctggctggggctggtccttcccaccccctcgcctgcctcttcaaaggtcagtgccctccctaggggagcatccagacatccaatgagtccatacgcatcccaatgccaagcttccagtgaacagctctggaggcaggcaggcctgtcccacaccctcaggctgtctgcccctggcctccccaaggaccgcatcactctgaatttagtctgggatcgtttgtctgtctcccattccagactgggagctcttccaggccaagggctgctctccctatttttttccctctctcctccctttgtattctcctcctccttccattcactaagcaccaactatttgttaggactgagttcctcattcctacacatccctgaccctgacacagggcttggcacatggaggtcactctgcatgcatcaactgaccccccgtcccctgggcccaaagatgccaggtctgtgggctgggccttgccaagcttccctgagggctgcagctccaaacgtggcaaagggcccctctccttggaaagggctgagctcctgcaggaggaaggaaatttggccttgaatctgtgccaggcagccaggcctggatggggtgggggaaagtccggagaaacaagcacttggttttcttagtagaactgtggtctcaggaggacctgaacccctggaaggctgacctgacccaagctgggatgaggtcgccctgcaattaccacctcttccgaggccaacaggacttctccctgctgagtcccaaaacctgctgccccacccccccatgcccagcctcggtgcctcggccacactcttgcactcttgcgtccctccttggttgtccagagacagccaggctgtgccgggcatcccagccaaatgtgagctctctggccaggctgagtagtgcaggagctgagttactgcgtcgctggagccccaggcctgcagaaaccaccacgaaggaacccttccgagtcttataaatccctcttccagactctgcatgggctctgtcccgagcaacttttcccccaataatgcatgcagagcttccagtggcctgggcagctctccggtggcagccactggggccctgtcacacggggagtgctttcagcatgagccctggcctttaattacaaggtatgttcctgttgcctcttccatctatatttatccgcaggatcgcactaattgaattccccacagcacagggcaggcctggcgaacagcgaggtaggcagacaggcaggggggctgcaaaacttccttcctttccttcttggccaggagcaaaacagaagcagctgagaaactctctctccctcccctggaccttgtcaatgcctggagtctgaggggctgcccgctccagggaccctccagccctgagtctcatagcccaacgcacccatgcccacccatgggtcccaagaccagacagtgcccagatgcctgactgcctccctgcttcaactcagattcctatagcagagaaaagtctgttgagcagagaggctgaaacccccaactctgcactttgctggcaccgtcttaccgtaggagtcgtcttggtccagaagggagtcgggctccatggcgtgtgggcccccagcccctggccccacctgatttatgaaccgaggctgtctccatgagcgtctgggttcctccttttgtattccatctggcggcttttccaactagatgactgggtattcctgcaagcaggcccctttccagccctcgccttcatacagtacatttaaagtagcagtaacctctttttcctccccccgcagcctggctggaaacattagaagggactgaggcagcgagatgtctaaaataggaagacgccgggacggttggcctggctgcccgtgatgctggctgcggggatctggcccggctgtgcagatggaaaagctaagaggtgaggctgagacgggcttagcatctggaagccggctctggggcccagggggtttgcaggaagcggggagcccagccccccaggggaggggttggggggtctgctctgtttacccccagtgcccaaaccccaagggcttctcccaggccctgctggaacctcccactcaaatctgttctacagacatttcccgcagtgtgggggatgcagaaattgactcatccatccattcagttagtcactaaatgttttttgagcatctagtctgcaccagacaccgtgcccggtgctgagtttgcagcagggagcgaggcacagtgcctggcttcttggagctcacaggaaagcaggtcattgcagcgcagtgtgtggtgcaagagctgcaggaacagagaaggggcgcctcacctggatggaagaggtggtcggggaaggcctcctggaggaatgggcacgtaagctggggcctaaaggacgagaaggagttagccaggtacagaaggagggagtgacctgtgcaatagccctgaggtgaaagggtgcgtggggcgttcagtgcccccccgaataagttccaggtggttggagtagagcaaatgatgcgaggctggtgagagatgggacgggggagccagggagagaggcaggagtgggttggacagagcctttggggatgactccaggcctgcctggaggagggtctgtgagaatgacatgatccggattgtcctctgggaaggcctccctggtgaccttgtaaaagaggggaagccaccaggggagagggagatgcaggctccacggccacagctgtaggaaccctgggtgctatttattaagcaggcaccagaggtgagcaccatttcaagtatttgcccacattgtctcatacattcctcactatggtcccttccaggagaaactctggttctcctattttacagacggggacaatgcagtttagagaggtgatgtgacttgaccaaggccacagttgtgagtgaccaccagggcaggtctggaccccagagagtgcacagccttggtgctgggatggtggggaggacaaagatgcatctcaatcaatctgcattcaatctgcatctcctaggcgggcgtggtggctcacacctgtaatcccagcactttgggaggctgaggcgtgcggatcacctgaggtcaggagttagagaccagcctggccaacatggtgaacccccatatctctactaaaaatacaaaaaattagcctggtgtggcgatgcgtgcctgtaattccagctacttgggaggctgaggcaggagaatcacttatatccgggaggcggaggttgcagtgagccaagatcgtgccactgcactccagcctgggcgacagagcgagagtccatctcaaaaaaaaaaaaaaaaaaaaaaaatctgcatcttcctctcccacaagcccacccaagccacagggcagtaccgtgggcttatgggagacagcttcatttgggctcaaccagggaaggctgccgagaggaggaggtgtttgaactgggcagagaaagaagagcagaatttgatgggccaagcagggaaaagtgagggcgtcccagttagagggaatggcacaagcaaaggcgtggaggcaagaaggtaacacacaatggaaatgacaggtgactgggaggaagtcagggctgataagcaggtttgggctagatcaagaaagggcctggagtgccagcctgggggtgtgggcgtgtt

SEQ ID NO: 588288 - DNA, 4001 bp, Homo sapiens
ctgaagcagaggctcagagaggtcaaacagcttgcctgaggtcacgattcacaggcacaagggtggaacaggacacctggcacttcggctctaacttcaaactctcttcactgcccgtcaatgcctcaggttttcaccaaacctacaaaaatcctatgaccaaatgcaccaacttttaagtaactacaggaagcctgggtcaccagaaatgtactgagccctgcctttgtcacctcctgggtggctgtctgtaaaacagtgaggacacctactggcaggcagtctcatccgcccccagccgtggcaatgaaggcggttaggaccaacctgcactgagacttggctgtaacaagcccaatccttcctctgactttttttcagaaatgggtacttgcccagtaaagacgctaccacaccaaagtgatctggcttctgacaactgtttcaaatattcaagcagagccaaaacacgctcctggcccagacacagtcttcccagtctcccacccgcctccaccccacccagtgggcctgggccccatggactagggagtggaagcaggaagggagaagaaaaaacaaagttctgctgaggagctggggcagagataccatggcccccaaaccccagtgcagccccacccagccagccaaaggttcggccactcagagcaaaggccaagctcctcagctcagaaaacttgtcagcagtccctggcatttcccagttctcaacggagcacaccacaggggacaccgcgcctgggggacagagcaactcacactgggcttcctcttattttaaaaactaaaaacagcaacagtgctcttcttggtgtcccgctttttcacaggtccctcctaaccgtttctacattctgggccggcagtggatgtctgcgtagaggggcagggtgctccggagtccctcctgggaccagctcctgtgacagtcactcactgagggtgtctgctgccgcccagctcattcaggtctccctgggctctggggctgcctccctcctggctttcccagcctctcttattctaagctccgctcaggccactcaccatccctcagcatagccaccaggctcgggaagccgagtggccgggcgagccttcctgctgtccgctgctcctggctggccccggccagcctagccccgccctgatcccagacatgccactccagccctgtccgctgggactaatcatggctagttcaacaaaggctatgttccaactctctgtaatgtgcttttaaagggccagtgtcctacttgggcctgctggggtcttaaaggtacaggtccctttttcctatacaggaaacaggaaagaaaaaaaaaacaaaaaacgaaactccaaaattcatgatcaggttagaggccctcggcttctgaggaagattttagacacaatgaacaatagtaaaaattcaaagtccacgaaggtcccaaagagctcaaaaacaaaacaaggaagctaaatctcaggaataagagatgagatagcagccctctttgggcactatgtgctgggcacagcactgggtactttgtggcccagtctcatttgttcctcaccactccacagacaggcattaccattgccccatctttcagatgaggaagctgagggtgcaagggctccccagctcgccaggacttcatgcaagtcagctgcaaagctgggccacaccccgtgaggtccatcccagccagagtattcctcccacctgctccctccacgaggccctgactgctccatcccacctggaccacaggccccaactgctccacatcctccagtgtctcttcttcatgatgaagaaagaagggggcaagatgaggagtctcacctgtcacaggtgccccaccaccaggctttcagtttgagcctcagaaccctgtggggtcgggtctatcttttccttcatcttccagatgagaagactggaaatcatggcttctgacacaacacgaaagaagaggaacactaggggaaggtgaaagcagagaaaagcgggcagtcagagggaggatgcggggaagaaaaggcaggtgcagggaaccaaggcagatgggggcaaccgtccttccaagcccaggactcaggcaagctggccgaggcccttccactgtccacaagagtggagcttctcctggggcaagggtgggcagggcctgcctagttactggaataggagtgggatggggagaggaagggaagagagactggactgtctgcgtctcagcacctggtctacggcaccctcagagaagcgtgggccattctggcacctggagtggctgggcccacagtaggtgctgtgtggctatcttctttttttgagatggagtttcacacttgttgcccaggctggagtgcaacggcgcaatctcagctcactacaacctctgcctcccgggttcaagtgattgtcttgcctcagcctcccgagtagctaggattacaggcatgggccaccacacctggctaattttgtatttttttagtagagacggggtttcaccatgttggtcaggctggtttcaaattcctgacctcaggtgatccacccaccttggcctcccaaagtgctgggattataggcatgagccaccgtgccctgcccagtgtggctatctttggtcagaaaagccaaggccaggaggcgtcttcaggtccaactccacaggggctgagtcattcaaggatttagcaccctcactctgtttctgtgatgcctggaagccaaataagtttcagaatgtgtagcctgatggtaaagaaaatgagctctgaagccaggctatgttcaaacccggactctgccacttgtaacctgtgtggtcttggacaggttaagtcacctccctaggcctctctgtttcctcctcaaaaatggacataatattatttacctcataggattgccgagaggatacagaacaaagccttgctgagagtgagcgcgtaacaaaagcctgctttcagctggggtgaaggaagctgccccaggatagctggaggcacaaacaggaaactagcctcttgggtagtgactgtggccaagtcatttctttctctcagcctgtttctttctataaaaggaccctcagtgatttccaggcaggatcacccctctgccaccttccagatgcctgctccgtcccataaggagacaaggacagaaggtgagaaacactgagaaaggctgggctgtggcccaaatcctttgaggcctgaaaacaacctgtctcggctacccaagcccagactaagcaagtctgctgggtgagtaggaggggcagagcaggagggaagcgagagcctaaagccacacaggctgtcaggaggcagcataagtggctttgcctctccgggaggggccctgcctccagacctctctgggtttgtcttccatgctcacgtgtggtcatggcatgtgatccggctgagctcaccttacctatggggagttctgcatcagccatagggccaccctacacgcctgttgcagaaacagcctccccaaaagctacaggctttgccgcaagcatccccaaggtttgacaaggttcaaggcttgcctcatcctatcttcctggagccgaatgcatctggtgcgcatgtggggagaggagggggtgtcgagcatcagaggaaacaggtgggtgggaggcagaaggaatgccttggagccctggcagaacatctggccactattcttgagaggtagtaggagacctgggtgccttaacctccacccttactacctcacccccaggattagtcagtaagaagaggcccaatttgggggttttgcaggcccaggctccaattctggtcgtgtcatttagcaactgtggaaccctggacaaatccttttactttcctgagtctcagtttcctcatgtataaaatgaggtaatacactatcccctgcagataacagatgtaaaaacactggttaaccaggaaaagcatttaac

SEQ ID NO: 588289 - DNA, 4001 bp, Homo sapiens
tcaggccacactatgcaaatcaaattaaaatttatttttttgcttttttcttccagtcccaaaggaaaactccaaataccactcatcttgctgaaaaccacagtaaagttatttaattccagttaaaccaaatatttcacccacacactcttaaactttaatcttaaacatatccatgaaatgtgatgtttgaagagctttccttatttactcaccagatcatcaatatacagagagctcttcctaagcacaggcccccatctatgttttcagtcgatactaaatatttagagaaatactctgttacagtaacttttaaaaaaattctacactatcatttgaatttttaaaaaaatttagttaagcttagtttccataattctcattaggcaatccaggatgtgggtgttttttaatttccttttcatggagaaaaaggaagctttgtatcaggacatcagatgtatatgggaaaatacatatttcaatgcacatataagtaaatacatattttgtttgtttaaagatccttttgcctactccactcacaatgtaaatacaccacagtcaaattccataaattcagttttaaatgtatgtatgaaaactaggttttctactaaagttgaccagagcccaaaacactctgtctaatacacagtcaaaggaaacagcaatcagcccttagatgccccgaaagaaactattctttgtttacctagaaactgaaagattttacactgagaatcacagctgctacagcaatggaggtatgctctgaatccagatagccatattagactctcattgatttgttaaaaatttaacattgtaaatgaaaccaaagcaaccaccaacaccaaccaggtaattaaattcctggttggaagaagtttcaaaatccaagcccaatgtcaacatctggcaagtctccatttaccacctaccaatacttgctcaaattacactgaaaatttagatagagggtaaagtactaagatttttaaaacctattaattagtttgtaccctccgtttaaatcacacataaaagctaactccaattgcaattataatcttagtgtttgtcctgttgtcacagaagggcaagggctgacaagagttagcacggacaattaaatctgattttgtccaggggactggatcaatatactgtgcatcataatctagccctgaactgctgcctctcctccacccccaggcccttggatcaggcggtttaccgctgggttagtaactcttttctctatgatttgcgcatctccagaaagggcgagggagacgcctgattcaaactgcatttgtttaccacccaatggccccatcgttatgcatttccacaatccaggagggtacgcttctggtaccccctttacctgccaagttcctcgccggtgtcgtagtaatcatccacgttttcctgcctgaacacggtcatgataaactgtcacgcctcaccaaagcccagggcacttcagctccgcttcccagaccatcaccaccgctcctgcgcctccgtagccccctcatgcatcagtctccagtccttttgaagaaaaaaaaaaggcaataataatagtaaaatggcaaccccaaaaggaagtagacctccccggcgctaagaccccgctcgctgaagaccgggtctccggagctgcccctcctcgcggggtggagaggagcaccctttgttaaagctgggcggccagggacgcccccgacccctcagccccgcgcgcgcgtggggccgggcaccacggcaccccgaggtcggcgtccccaaacgctgggcggtctgttgggatcagaaccggctccggaagtgactggcctccccgcctcccctttctctgcacacatgcccacccagctttcccacctccagggacgccgcggaagaatgaagccctcgcccagacggtacgcgcctcactgggagcaatctctctccagcctgcggcaacggtggcacccccgcgccacctctcggctcccgcgcctctcctaacaccgtggccaccctctccccttccccgagcgaggcagtccccagagccacattcctggcgactccctctccgttacccggccgacccggcgtgcggccgcccgggggagcaagggagggaagggagcggcccaccgaggcgcagcagttcgctccagatcctcgcgccccgacacaaagcgcctggtcgggccggcgccacctgttctcacccggcccgcggggctggggaagcctcccggctgcgatcgcacttctccccgaagccaagtttccctccgccttggccttcccagttgctcgaggcactgcccggacaaaccccaccgcgccctggctgggaaagcaaaagctggcgccgggggtcggggggaccggggagccgcgcctggctactcacccgggcgcctgggagctcccccggtccctccggagcgctgtcggaggccgaccataggcgccagcgccggagactagccggggcggcggcgggaacacagctagggagtgagtggggggcgcagatccctcccaggcgccggccccagaccctgccgctgcgagttgccgagtcccctccgcggagggaacaaagtccccggcgttggctcggtccggctgtcctcctcacactccgaagcagcctctcggctccttgccgccttttgggcggagggcggccggcaggcggccaatggggaccctgcaagcgggctggcggcgcggcccacccacctccgagctgccctgccaggccggcgctgcgggttctgcgcggcgctcgctgctcctcccagctccgcgctccgggctcgctggcgcgctctaccgcgcacaccccgcacacacccactcgccccacacccacgccggccggggagccagtgcgtccgcccggaacgcgggcgccccacctgtgacacattgctaagctgccctctgactgggttctagggaaacacggttcttccgtcccgagatgtgtactgggatcccagcttgtgccgggcacggtgcttggtatgggaaaatcacatagaacaaaacagatttttttaaatccctgccttccggaaacctgcattctggtgggacagatagataataaatatgtaagctaattaataaggtaattttggaggatcagtcctacgtttaccacgaaacaggttaatggaatagagaatggcaggaagggagcgtacctcattagactgggttcctctgccggactggtgttggagccgaggcttgaaggcaagaaggtttgcaatctgaagaaagggttgaggtctccgagacccaaagaagcaacagagacgcagagtttatttgcgctatcccatatgctattggctattgttgagctgaaatgtagctagtcccaaattaattgtgctgtaagtgtaaaatacacattagagtccaagacagtatggatatgagaatgaaaaatatctcatgaatatttttatattcattacactttcaaatgatagtattttggatacgttgggttaaacaaaatatattattaaaattaatttcacctgtttactttcttttttttgagacggagtctcactctgtcgccaggctggagtgtagtggagcgtggcaacctccacctccagggttcaagtgattctcctgcctcggcctccccagtagctaggactacagtcgcgcgtcaccatgcccagctaatttttgtatttttagtagagacggggtttcaccgtgtcgaccaggatggtctccatctcttgacctcgtgatccgcccgcctgggcctcccaaagtgctgggattacaggcgtgagccaccgcgcccggcctcacctgtttactttttaaaaggtggccactagaaaatataacagtacctatgttgcttgcatgagatttctgaggactgtgctggtctacacaaagatcccatatccactggagacctctatccactttctcta

SEQ ID NO: 588290 - DNA, 4001 bp, Homo sapiens
caacaccaaccaggtaattaaattcctggttggaagaagtttcaaaatccaagcccaatgtcaacatctggcaagtctccatttaccacctaccaatacttgctcaaattacactgaaaatttagatagagggtaaagtactaagatttttaaaacctattaattagtttgtaccctccgtttaaatcacacataaaagctaactccaattgcaattataatcttagtgtttgtcctgttgtcacagaagggcaagggctgacaagagttagcacggacaattaaatctgattttgtccaggggactggatcaatatactgtgcatcataatctagccctgaactgctgcctctcctccacccccaggcccttggatcaggcggtttaccgctgggttagtaactcttttctctatgatttgcgcatctccagaaagggcgagggagacgcctgattcaaactgcatttgtttaccacccaatggccccatcgttatgcatttccacaatccaggagggtacgcttctggtaccccctttacctgccaagttcctcgccggtgtcgtagtaatcatccacgttttcctgcctgaacacggtcatgataaactgtcacgcctcaccaaagcccagggcacttcagctccgcttcccagaccatcaccaccgctcctgcgcctccgtagccccctcatgcatcagtctccagtccttttgaagaaaaaaaaaaggcaataataatagtaaaatggcaaccccaaaaggaagtagacctccccggcgctaagaccccgctcgctgaagaccgggtctccggagctgcccctcctcgcggggtggagaggagcaccctttgttaaagctgggcggccagggacgcccccgacccctcagccccgcgcgcgcgtggggccgggcaccacggcaccccgaggtcggcgtccccaaacgctgggcggtctgttgggatcagaaccggctccggaagtgactggcctccccgcctcccctttctctgcacacatgcccacccagctttcccacctccagggacgccgcggaagaatgaagccctcgcccagacggtacgcgcctcactgggagcaatctctctccagcctgcggcaacggtggcacccccgcgccacctctcggctcccgcgcctctcctaacaccgtggccaccctctccccttccccgagcgaggcagtccccagagccacattcctggcgactccctctccgttacccggccgacccggcgtgcggccgcccgggggagcaagggagggaagggagcggcccaccgaggcgcagcagttcgctccagatcctcgcgccccgacacaaagcgcctggtcgggccggcgccacctgttctcacccggcccgcggggctggggaagcctcccggctgcgatcgcacttctccccgaagccaagtttccctccgccttggccttcccagttgctcgaggcactgcccggacaaaccccaccgcgccctggctgggaaagcaaaagctggcgccgggggtcggggggaccggggagccgcgcctggctactcacccgggcgcctgggagctcccccggtccctccggagcgctgtcggaggccgaccataggcgccagcgccggagactagccggggcggcggcgggaacacagctagggagtgagtggggggcgcagatccctcccaggcgccggccccagaccctgccgctgcgagttgccgagtcccctccgcggagggaacaaagtccccggcgttggctcggtccggctgtcctcctcacactccgaagcagcctctcggctccttgccgccttttgggcggagggcggccggcaggcggccaatggggaccctgcaagcgggctggcggcgcggcccacccacctccgagctgccctgccaggccggcgctgcgggttctgcgcggcgctcgctgctcctcccagctccgcgctccgggctcgctggcgcgctctaccgcgcacaccccgcacacacccactcgccccacacccacgccggccggggagccagtgcgtccgcccggaacgcgggcgccccacctgtgacacattgctaagctgccctctgactgggttctagggaaacacggttcttccgtcccgagatgtgtactgggatcccagcttgtgccgggcacggtgcttggtatgggaaaatcacatagaacaaaacagatttttttaaatccctgccttccggaaacctgcattctggtgggacagatagataataaatatgtaagctaattaataaggtaattttggaggatcagtcctacgtttaccacgaaacaggttaatggaatagagaatggcaggaagggagcgtacctcattagactgggttcctctgccggactggtgttggagccgaggcttgaaggcaagaaggtttgcaatctgaagaaagggttgaggtctccgagacccaaagaagcaacagagacgcagagtttatttgcgctatcccatatgctattggctattgttgagctgaaatgtagctagtcccaaattaattgtgctgtaagtgtaaaatacacattagagtccaagacagtatggatatgagaatgaaaaatatctcatgaatatttttatattcattacactttcaaatgatagtattttggatacgttgggttaaacaaaatatattattaaaattaatttcacctgtttactttcttttttttgagacggagtctcactctgtcgccaggctggagtgtagtggagcgtggcaacctccacctccagggttcaagtgattctcctgcctcggcctccccagtagctaggactacagtcgcgcgtcaccatgcccagctaatttttgtatttttagtagagacggggtttcaccgtgtcgaccaggatggtctccatctcttgacctcgtgatccgcccgcctgggcctcccaaagtgctgggattacaggcgtgagccaccgcgcccggcctcacctgtttactttttaaaaggtggccactagaaaatataacagtacctatgttgcttgcatgagatttctgaggactgtgctggtctacacaaagatcccatatccactggagacctctatccactttctctacttcccaccccttgctcccacctaatgtttgggtggagacgaagaagggttgattccccacatcccactgctggagaaccccaaacggtgaaaagctcctaaagggaaatctattttactgcctagaatgatgaaaactgacagatgaagagatttccgatccataccgttgttcaaatccccaggctttctaaactgagttggttcaaatctctgtggttcaacagaaattttcaactgtgaagattttggcctcttgaaaacaaggcaaaacaaaacaaaagaatacccctcaggccttatgtcaaatcctagtcttttttttttttttgagacgggttttcgctcttgtggcccagactggagtgcagttgtgaaatcttggctcactgcaaactccgcctccgcctcccgggttcaagcgattctcctgcctcaggctacccagtagctgggattacaggcatgtgactatgcccggctaattttgtatttttagtagagacgtggtttcaccatgttggtcaggctggtcttgaactcctgacctcaggtgatcctcccggctcggcctcccacagtgctgggattacaggcgtgagccactgcgcccagccaaatcctagtcttaaataacattgcattaatgacccacaggaagggcacacaggaatcaaggggaagtccccaaattgggagatggtattagcttaagcagtgggcttgataatacaaaagggtcttgagaggtgagaaatacagtcaaaaataacaacaacaacaaaaaaagagtgattcatctgggaaaatgcaaatgaatacatctgttgggagaaaaaatttaaaacacagat

SEQ ID NO: 588291 - DNA, 4001 bp, Homo sapiens
gattcaaactgcatttgtttaccacccaatggccccatcgttatgcatttccacaatccaggagggtacgcttctggtaccccctttacctgccaagttcctcgccggtgtcgtagtaatcatccacgttttcctgcctgaacacggtcatgataaactgtcacgcctcaccaaagcccagggcacttcagctccgcttcccagaccatcaccaccgctcctgcgcctccgtagccccctcatgcatcagtctccagtccttttgaagaaaaaaaaaaggcaataataatagtaaaatggcaaccccaaaaggaagtagacctccccggcgctaagaccccgctcgctgaagaccgggtctccggagctgcccctcctcgcggggtggagaggagcaccctttgttaaagctgggcggccagggacgcccccgacccctcagccccgcgcgcgcgtggggccgggcaccacggcaccccgaggtcggcgtccccaaacgctgggcggtctgttgggatcagaaccggctccggaagtgactggcctccccgcctcccctttctctgcacacatgcccacccagctttcccacctccagggacgccgcggaagaatgaagccctcgcccagacggtacgcgcctcactgggagcaatctctctccagcctgcggcaacggtggcacccccgcgccacctctcggctcccgcgcctctcctaacaccgtggccaccctctccccttccccgagcgaggcagtccccagagccacattcctggcgactccctctccgttacccggccgacccggcgtgcggccgcccgggggagcaagggagggaagggagcggcccaccgaggcgcagcagttcgctccagatcctcgcgccccgacacaaagcgcctggtcgggccggcgccacctgttctcacccggcccgcggggctggggaagcctcccggctgcgatcgcacttctccccgaagccaagtttccctccgccttggccttcccagttgctcgaggcactgcccggacaaaccccaccgcgccctggctgggaaagcaaaagctggcgccgggggtcggggggaccggggagccgcgcctggctactcacccgggcgcctgggagctcccccggtccctccggagcgctgtcggaggccgaccataggcgccagcgccggagactagccggggcggcggcgggaacacagctagggagtgagtggggggcgcagatccctcccaggcgccggccccagaccctgccgctgcgagttgccgagtcccctccgcggagggaacaaagtccccggcgttggctcggtccggctgtcctcctcacactccgaagcagcctctcggctccttgccgccttttgggcggagggcggccggcaggcggccaatggggaccctgcaagcgggctggcggcgcggcccacccacctccgagctgccctgccaggccggcgctgcgggttctgcgcggcgctcgctgctcctcccagctccgcgctccgggctcgctggcgcgctctaccgcgcacaccccgcacacacccactcgccccacacccacgccggccggggagccagtgcgtccgcccggaacgcgggcgccccacctgtgacacattgctaagctgccctctgactgggttctagggaaacacggttcttccgtcccgagatgtgtactgggatcccagcttgtgccgggcacggtgcttggtatgggaaaatcacatagaacaaaacagatttttttaaatccctgccttccggaaacctgcattctggtgggacagatagataataaatatgtaagctaattaataaggtaattttggaggatcagtcctacgtttaccacgaaacaggttaatggaatagagaatggcaggaagggagcgtacctcattagactgggttcctctgccggactggtgttggagccgaggcttgaaggcaagaaggtttgcaatctgaagaaagggttgaggtctccgagacccaaagaagcaacagagacgcagagtttatttgcgctatcccatatgctattggctattgttgagctgaaatgtagctagtcccaaattaattgtgctgtaagtgtaaaatacacattagagtccaagacagtatggatatgagaatgaaaaatatctcatgaatatttttatattcattacactttcaaatgatagtattttggatacgttgggttaaacaaaatatattattaaaattaatttcacctgtttactttcttttttttgagacggagtctcactctgtcgccaggctggagtgtagtggagcgtggcaacctccacctccagggttcaagtgattctcctgcctcggcctccccagtagctaggactacagtcgcgcgtcaccatgcccagctaatttttgtatttttagtagagacggggtttcaccgtgtcgaccaggatggtctccatctcttgacctcgtgatccgcccgcctgggcctcccaaagtgctgggattacaggcgtgagccaccgcgcccggcctcacctgtttactttttaaaaggtggccactagaaaatataacagtacctatgttgcttgcatgagatttctgaggactgtgctggtctacacaaagatcccatatccactggagacctctatccactttctctacttcccaccccttgctcccacctaatgtttgggtggagacgaagaagggttgattccccacatcccactgctggagaaccccaaacggtgaaaagctcctaaagggaaatctattttactgcctagaatgatgaaaactgacagatgaagagatttccgatccataccgttgttcaaatccccaggctttctaaactgagttggttcaaatctctgtggttcaacagaaattttcaactgtgaagattttggcctcttgaaaacaaggcaaaacaaaacaaaagaatacccctcaggccttatgtcaaatcctagtcttttttttttttttgagacgggttttcgctcttgtggcccagactggagtgcagttgtgaaatcttggctcactgcaaactccgcctccgcctcccgggttcaagcgattctcctgcctcaggctacccagtagctgggattacaggcatgtgactatgcccggctaattttgtatttttagtagagacgtggtttcaccatgttggtcaggctggtcttgaactcctgacctcaggtgatcctcccggctcggcctcccacagtgctgggattacaggcgtgagccactgcgcccagccaaatcctagtcttaaataacattgcattaatgacccacaggaagggcacacaggaatcaaggggaagtccccaaattgggagatggtattagcttaagcagtgggcttgataatacaaaagggtcttgagaggtgagaaatacagtcaaaaataacaacaacaacaaaaaaagagtgattcatctgggaaaatgcaaatgaatacatctgttgggagaaaaaatttaaaacacagatgtttgggataaacttggaaggtgtttatggatgactgccatatgggtaatatttattttctgcaaaataaaaaatatattgtccgaggcaattaaaaggactgaatctatttggcagctagaatgtcttaactaccctaatggacaatgatgttcaccggagattatctggagtagtgaaaaagagcatgaaatttggagtcacaaaattagatctagtattggtggaaccatttaacagcttaataaccttggatgagtcactaacccccgagctttttgtgtacaccaatttagacaagcattttagaaaggggaaatgtggtcatttaaaaacatattcacaaattctttgacactcccccaatcaagaggtggagtctaattcccctctcaataaatattcaccaaccctatctgcttgcttctaagaaaaggtagtggcagtggcaca

SEQ ID NO: 588292 - DNA, 4001 bp, Homo sapiens
tgcaaaagatactgcaaaactttccctagagaaaaaagccacacaatgcaaccccgctggggacaccgctggtttgccgagagactcattttaaacagaggcagaaagttcgcctgtgatatttcagctggaaatcaagaagatattagttgaacatattgcttagggaggaataataaggctgacatttgctttcgtaggaatttgttgtgcaaattaaccttgccagtgcacggaaaggcaaagtcacctggcttcctctggcttccctagcagccgggaaatgcaggcaggggggacgctgccccagagaggagcaaatgctcctgcactcagggtgcctcatggcagaggcttgcgaagaaccccaaactgtcagcgatggggttcagctgctcctccagacggctgacggctcagaatcagggctgtcccaggtctttcttggctggaacctgagccacagagtgtctttgtgcacaggaatctgtgcagccctatgggtcagagcagggcccttcccaggcagctccactcaccctacctgggtggccctaagcctcactagcgacacaggcaagtgcctcctggccgagtcttgggaattggagggggcaagctcagctccagaaacagcagccaccatctgccctcatgaattcacaacacccaaaaaggcagagagggactctccgccccaccagcccatggtgagaccaagatgcagagctggagccggccgctccgcacagacacagctcccccgctccagctcggcactcccagataaagcaggcacctcctgacttcagaaataaaacttttttgtcactcctttgtgtgtttctgtggagagagttgggtttcatccacaaagaagccctggtggccagtcccatgtggaaaggaaggctggagcaggacccattgtaggcggtgggctcgcccacttcggggaccccctgcagcttgtggaagggcctaaagtcccctccagtttgaagggaaacttttcccctttctccaccctgtgaaacaagagtggaggtaaatttggacggaaaggagtcaagagcccatcctaacagttttggctgagccctgtggggcttgttcaacacctatgggtaggggcagggtgtctgcacctgctcagttggtccacgggtacaagcacagtaggtcaggctggatcccatgggtgtgcaggcctcatgctgtgcccagccacgcgccaccacctggcccacatcagtgggcatgtgtgctctggggacgtggtactaggcattgtttacagggccgagggtcgtggggtctgtgctcatgcgcgtgtggggtgtggagcggcacgagtgtgtgtggtgtgtgcgtcctctgtgtatagttccattccttgggattactgggtcccatgatttggggcgggcagtcaaggaccatggaaagcatgtctttcctattttgtcctcaaactgagatccccatgatgcccaagctcggggtgcagacttggctcagagcagagtcaactcaaacactgacaggtgacagaagaactttctgggttaaggagggtgagtgcagaaagacggccagatggggtgccgggtcaggaagggtttggagagctggcagggaggagagactcaccgcaaaataggcagtgtccccatcggtccagagcaccacgagatctgcgttctcaagctcgccacggtcggacatcccaaacaggacgccagccttgagcctccgcaccaggagctggaaatggatggcctcctgggtgtagctgacattccatgagagctccagggacccctccgggtccagggggatgtgataggggagggggctctcacggggagccgagccctgcagtgcggccaccaggatgaccaggaagatggccactgctgtgctgtacatgaaggctgcctcccgcatgctggggccgggcaggctggcccagcgactgagggcgggcatggctggggtgagctctctggtcccacctggccatttatgccctggtcctgaatggggtgggtccaggcagcacgggtaatcacatttgtctagcggggaatccaattttccctcccacaagcttgcgccccaggccaagcactcagcctgctgccctcctctaattggcactaatgacacatggacgtcatcagtgggagttgaagtagacaggcggatgctgtcccttctgagatggctctgaagagctgtcccaaaagcagatgcaccctgcagccaagaggcctttcagacaccctctggccaggcaccagctgactgcctcacaggctgtctggcccagtccccagtgggatggggtctgcgtcgcctctacccacggatgagcagactgaggtccgaggagctgctccaggctgaccagtgaaggataggcccgtagccactgcaggcctggcctagcgagcagagccgtttgtacaatactagcaggtgggcccatttcaaaccaaaaataagacaatctccaaatagtccctgtgtttagacactctctccacggcctgctcttcccacttttgtctcctctcaatttttccacagcctccagctggtaccactgctgctccagaaggcgcgagagcatcatagggagtgggggacatgggcgtggggtgcattgctggggacagacggagctggagctgcacaggggataggcaggctgcagggtgcactgctgggggtgacagcctttaaggaaaagagggtgagtgacaggcctgctcccctgtctctgaagctcccaaacccacagcttcctcttgcccagagcagatctggcctgaatttgaagcctctcagggcagctggccgcagccctgcttctcccacacctgccacaggacctttgccatcatccacccgtgggcccgagggtcagtctcaccacggcacctctccctcctgtcctctcccacaagtagactgagggcagctgccttcaggacattctgcttgatccctccagctccaccccccaggctgggttgacagatctctccagctggactagaagctgtccctcctccccagcctcctccctcccttccttccttttccctcctgtttctcgtctctctggagaaacccagaatctagccttaggggcacattcatgtcataggctgacagcaacatttaggtccttaaatacccatgacagcaggtctggaggctgcttcagctctgagctctacgctgtagaaaggaatgactgtgtctttgcacgaacgtgaaatttggagaaagtgccagccttcccctggccctcgcaggcagtgctctctgccccacagtggccaggccatcctgcaaagccaagctcaggccatgagcccctccccactgattgcacccagaggggcaccgttcgcccccacccacagcccaggcaggtgaggtccaagtgcataatcacctgtgcaatagagtgtggcattggtgtgaaattgtctcccaggccaggggaaagacactcttgggagttctctggtgagccttgggaagggtctcagcctccgaaggcctggctttcccatcaggacatgccacctccgtcgcctgagagcacctcaccttcatgcctcagattagttccaaaacctcctcacctgtgccttgtaagcaggtgtctgctgcatcccggacattcactctcgggactggggagcggccacagcgagccggtgatacgaagagcctccggggtgggcaggcactggtgttcccagcacgggataacaaaagccagcagaggcagaggtgagggtcacgggctccacagcacacccagctcaggggtgagccctcccagcagcctggtggccacccaggtggctccagctagacaacaggctaaacgagcaccagctggggcccgcgttgtgggaaggggggcacctctctcccctctggggtattgaggccccaggcacccctcctgctcc

SEQ ID NO: 588293 - DNA, 4001 bp, Homo sapiens
attttttttcacctcctgtaacatgatatgctgcccttctacgacctttgacataccaatcatctccatctgaaatacttctatccctttcccaaccctatcttgactaatttatttcgtactcatttttattttcatttaggtgccacttcctcagggaatccgtgaacacagtgtccataacagattccttcaagactttatctcaattaacaaatatattttatgcattatttagtaaggctatctactatctagttgaaccattaagtcccaggctcaatgaaaacagtgccattagctggttttgctcagcatggttactcctgcatttggaacatagcaagtgctcaacaaatatacgccgaatgagagaatgaatgaatgaacaactgagtaaacaactagcaaccgagaggcttggtggggtaagaattacattaactatgtcacctcatggtggaactgtgcacattttttcttttgatggcggacttgtgtactgacaagacaaagttttaaatagatacgattttggaaagttccctttaaagcaaagccatacaataaatatttaatcagccaagaaaaaggctgtagtctagcctggggacttcacaaatgacccaaatcatgagagccacgtctctacagtgtcttagtactgtatcttccttgagcaaaggaacgcacttgccccatcatggcaagttcaggtacagagtgcaaggaatctacagctttcctaccccgacacaggtttaggtaggaaaacgcgagcctaggatgatggggagaaagcgggcatttattcaaaatgtatttactgagcacctactgtgtaccagaaagccctagttgtgggctggctctgacaggtccgctgtgtagcttcgggcatttctccttcacagagcccaagtcctgaaggcgagcaagtggggccccgcctgcctgcctcaaaaagctgggctggggattccaagggcgagaatgcgcttcagaaagtgccaggaggcacgaaggccagcggccccaaacggcctcgctaacctcggcccgggcgcggggagcgagcccaggacggccgtccgctggcagcagagccgggcggaggcgggcgcccgccctccgaggggccgcgcttacccgtcgggcgagtactcgaggttgaagacggcgccgtgggtgcgggtgctgaggtacaccgagtccgcggggtggatggaaccgtagaggctagtcatggtgcgaaaattgtcccgcgccgggtccacgaacagcccgcggcccaggctgcgctctttcagccacccgaacagcctagcgccagggccgcccaggcccgcgccgaggccgtgtcggccccggctcttggccctgcagtctggcccgggccgccggcacggaggggagggaggtgacggctctcccggggcggaggcagttgaggactccggagctccaggcagccctagctctccggagcgcggggccggggacagcgatggggcgccggggcggcgagggcttcgggcgggtggagggggatgggtcgcatcagccccgggatgtagtggcgagggcggcccggtggctgctgcctgcccctcgtggggcgtcggctcctcagccccggctccggccgatccgtcccctccagggctatggggcccaaagggaaacatgatcaacgcccccgccccccgctccgggccactgccccgccggccgacacctcagtgcccctgttcagctgccacttccggcgtgcagcggcctaaccccaccggctggaaacccgcgccgcccctcggccaccgtccgccggggaccgggaaagctgagacaccgccgggtttggggcgccgcagtcccgggaacggaggtagggagcgagtagttacctgtgtgagcgactgagcatctgggcacctgatctgggtggcagagtcggtctgtagttgtcagtgaccggtggccgcgtgcctggggatgagtggcctgaccagtcagtcctgtgaggctgagtatgtactggtgtctccactttacactgggatcagcgagggattaagaattagtgcattacgtgcaggccacacacaataggtgacatgccactctttttttttttttttttttccgagatggagtctcgcgctgtcgcccaggctggagtgcagtggcgcgatctcggctcactgcaacctccgtctcccgggttcaagcaattctctgccccagcctcccgagcagctgggattacaggcgcccaccaccacgcccggctaattttttgtattttttagtagagatagggtttcaccatcttggcctggctggtcttgaacctcgtgatccacccgcctcggcctcccgaagtgctgggattacaggcatgagccaccgcgcctggccagcatgcccaactcttaaaggcacaacaagttcagggtgaccacaggcagcttcttccaaaacctatttgtcacaaggcaaaggagagactgagaggaaacaggtttggatgtgctacccaaggaatggctgagatagccagtctgtgtatctgggcttaaatgaaagatggcaaataggtgatagttacttttctgggtcaacttgactgggctaacagatgcccagatagcctggaaaaccattatttctgtgtgtgcctgtgagggtgtttccaggacagattagcatttgaatcaatagaagatctgccctcaccattgtggacaggcatcatcctattcattaaagactgaaaaggaacaaaaaggcagaagggtgatttaactttctcttaagttggtacatccatctcctgcccttagacatcaaaactcggttctgcgggctttggacttggggactcatcgtcagttttcaggccttcagtcttggaccgggagttataccattagctcctctgattctcacaccttcagactcagactgaattacaccaccagatttcctggttctccagcttgcagactgcagatcatgggactcctctacaatgatatgaaccaattcccatattaaatgttctcttatatctatatctcctattggttctacttctctggagaccccctggatgggtccaatctactgtagcagcctacttgcctggcattcacactcttcatgtgtatgccagcacgtatattctactgaacccatcctagaagtcctaggctgtcgaattttgtagctgttacttagctttccttgcctactagccggggtaggacaactatttgagtaaccaggctatagattagccactggtccatgaggctgccagaccaaaagtctttgcccatacagactcatgctcttgggaatttgaattgggaaatcagaagtgaggcagttggccatgatggttgggattgaaaagtcataaggcagagtgaggccgctggagtcctgagcaaaccaaaggagtaagagaaatcatgagaaagcagcagccatgagagaacagacttgggatagacggtgagaaagaaagttgatggtaggaggagatacagatacataaaaagagacagactcagaacaggttagacttgttcttggcagagtccccctagggtcttcctgcagagtcccttgaggtaccagaatgatggctgctcaatttcagtttcagtttcctgtgggatgatcacttgatttcacaatacctgaaccaggacttatgcactgacaaaaagaatcaagggccagacacagtggctcacacctgtaatctcagtgctttgggaggccaaggtaggaggatcttttttttttttttcagggtctcactctgttgaccaggatggagtacagtaatacagtcatggctcactgcagcctcaacctcccaagctcaagcagcaggaagatcttttgagggtaaggagtttgagaccagcctgggcaacatcatgaaactctgtctctctatgaaaaataacaaaatcattccggtg

SEQ ID NO: 588294 - DNA, 4001 bp, Homo sapiens
ttctcctctcaccagttttccaccttattcaggtgtgcatccactgctacatgctccaaccaattgctgttgagaccccagagaccccagcaccacgtgtgattaggaagcgcttccatcattgaaatggaatagagtctacttgctcacagtaactcctgtttctattcctttgctccttccttagcaacttcaggtctttcttcagtaaaattttttgctttgtaaacctattttttttcacctcctgtaacatgatatgctgcccttctacgacctttgacataccaatcatctccatctgaaatacttctatccctttcccaaccctatcttgactaatttatttcgtactcatttttattttcatttaggtgccacttcctcagggaatccgtgaacacagtgtccataacagattccttcaagactttatctcaattaacaaatatattttatgcattatttagtaaggctatctactatctagttgaaccattaagtcccaggctcaatgaaaacagtgccattagctggttttgctcagcatggttactcctgcatttggaacatagcaagtgctcaacaaatatacgccgaatgagagaatgaatgaatgaacaactgagtaaacaactagcaaccgagaggcttggtggggtaagaattacattaactatgtcacctcatggtggaactgtgcacattttttcttttgatggcggacttgtgtactgacaagacaaagttttaaatagatacgattttggaaagttccctttaaagcaaagccatacaataaatatttaatcagccaagaaaaaggctgtagtctagcctggggacttcacaaatgacccaaatcatgagagccacgtctctacagtgtcttagtactgtatcttccttgagcaaaggaacgcacttgccccatcatggcaagttcaggtacagagtgcaaggaatctacagctttcctaccccgacacaggtttaggtaggaaaacgcgagcctaggatgatggggagaaagcgggcatttattcaaaatgtatttactgagcacctactgtgtaccagaaagccctagttgtgggctggctctgacaggtccgctgtgtagcttcgggcatttctccttcacagagcccaagtcctgaaggcgagcaagtggggccccgcctgcctgcctcaaaaagctgggctggggattccaagggcgagaatgcgcttcagaaagtgccaggaggcacgaaggccagcggccccaaacggcctcgctaacctcggcccgggcgcggggagcgagcccaggacggccgtccgctggcagcagagccgggcggaggcgggcgcccgccctccgaggggccgcgcttacccgtcgggcgagtactcgaggttgaagacggcgccgtgggtgcgggtgctgaggtacaccgagtccgcggggtggatggaaccgtagaggctagtcatggtgcgaaaattgtcccgcgccgggtccacgaacagcccgcggcccaggctgcgctctttcagccacccgaacagcctagcgccagggccgcccaggcccgcgccgaggccgtgtcggccccggctcttggccctgcagtctggcccgggccgccggcacggaggggagggaggtgacggctctcccggggcggaggcagttgaggactccggagctccaggcagccctagctctccggagcgcggggccggggacagcgatggggcgccggggcggcgagggcttcgggcgggtggagggggatgggtcgcatcagccccgggatgtagtggcgagggcggcccggtggctgctgcctgcccctcgtggggcgtcggctcctcagccccggctccggccgatccgtcccctccagggctatggggcccaaagggaaacatgatcaacgcccccgccccccgctccgggccactgccccgccggccgacacctcagtgcccctgttcagctgccacttccggcgtgcagcggcctaaccccaccggctggaaacccgcgccgcccctcggccaccgtccgccggggaccgggaaagctgagacaccgccgggtttggggcgccgcagtcccgggaacggaggtagggagcgagtagttacctgtgtgagcgactgagcatctgggcacctgatctgggtggcagagtcggtctgtagttgtcagtgaccggtggccgcgtgcctggggatgagtggcctgaccagtcagtcctgtgaggctgagtatgtactggtgtctccactttacactgggatcagcgagggattaagaattagtgcattacgtgcaggccacacacaataggtgacatgccactctttttttttttttttttttccgagatggagtctcgcgctgtcgcccaggctggagtgcagtggcgcgatctcggctcactgcaacctccgtctcccgggttcaagcaattctctgccccagcctcccgagcagctgggattacaggcgcccaccaccacgcccggctaattttttgtattttttagtagagatagggtttcaccatcttggcctggctggtcttgaacctcgtgatccacccgcctcggcctcccgaagtgctgggattacaggcatgagccaccgcgcctggccagcatgcccaactcttaaaggcacaacaagttcagggtgaccacaggcagcttcttccaaaacctatttgtcacaaggcaaaggagagactgagaggaaacaggtttggatgtgctacccaaggaatggctgagatagccagtctgtgtatctgggcttaaatgaaagatggcaaataggtgatagttacttttctgggtcaacttgactgggctaacagatgcccagatagcctggaaaaccattatttctgtgtgtgcctgtgagggtgtttccaggacagattagcatttgaatcaatagaagatctgccctcaccattgtggacaggcatcatcctattcattaaagactgaaaaggaacaaaaaggcagaagggtgatttaactttctcttaagttggtacatccatctcctgcccttagacatcaaaactcggttctgcgggctttggacttggggactcatcgtcagttttcaggccttcagtcttggaccgggagttataccattagctcctctgattctcacaccttcagactcagactgaattacaccaccagatttcctggttctccagcttgcagactgcagatcatgggactcctctacaatgatatgaaccaattcccatattaaatgttctcttatatctatatctcctattggttctacttctctggagaccccctggatgggtccaatctactgtagcagcctacttgcctggcattcacactcttcatgtgtatgccagcacgtatattctactgaacccatcctagaagtcctaggctgtcgaattttgtagctgttacttagctttccttgcctactagccggggtaggacaactatttgagtaaccaggctatagattagccactggtccatgaggctgccagaccaaaagtctttgcccatacagactcatgctcttgggaatttgaattgggaaatcagaagtgaggcagttggccatgatggttgggattgaaaagtcataaggcagagtgaggccgctggagtcctgagcaaaccaaaggagtaagagaaatcatgagaaagcagcagccatgagagaacagacttgggatagacggtgagaaagaaagttgatggtaggaggagatacagatacataaaaagagacagactcagaacaggttagacttgttcttggcagagtccccctagggtcttcctgcagagtcccttgaggtaccagaatgatggctgctcaatttcagtttcagtttcctgtgggatgatcacttgatttcacaatacctgaaccaggacttatgcactgacaaaaagaatcaagggccagacacagtggctcacac

SEQ ID NO: 588295 - DNA, 4001 bp, Homo sapiens
ctctagaagcagcacatccagagagggcctgaagaaatacactcctttgaggacttatcagaaaagaaatgtatgagtgaaaaaaggaacacgaaaagaggaagaagtcaccaacgggaaagaatggaaaggagagtaaggcaagtccctcctaaaagaaacagacgggaaaactagcagaggttctagagcaagtggagcaatatatccacgacctaggagagaggtcacatccccccaggcacttaccgtgttgcattttgtgccacacaccacttgcctatgattcaaccactgagatgcaaacactttattaagggtcccaaggtgaaactctctctccttcaggagactgggaagttgctgtgctgcataaccatgcaacactcgagagtagctggtttcattctgtagcctgacttcccggttcttcaagtagtatactaaggatctcttcacaggaggaagtcttttccttttgtgaagcgagtgatcccagccaaactgtggaaacaacattagaaatcagggctttggctactcttcttcagaacagatcctactgtattacagaaatcaccaactcataactcatactgcagaatttacaaacaacacaaatacaaacacaagagaacaagaatctcaatccagaaagtcgtttaactcttccaacattaaaaagatgttgctcacagtcaaacttaccaatgtgaattacaagggctgaaagtcaagggaatgaatgcagaatagaacagactaaaaggtttactagacattttaggagtgaaagattgaaggaaatgagaggtagagtgattcccataccgacatgggctgcatctctacccagcccccttctccctctcagtctgtactcccactggagcacggaagatacagtccaaggagccagacctggctcccaggtcttccagggatgcatcatcaatgaccgttcctctgtcatcatgcccgcgctccaggcagttgcagaattcgaaaaatcaaccgccaacggggtagtaggcccccgggaaatcagaggccatatctatgtccaagaaggccttcccctccaaagggggcggcatagagatgatacctgggaactgttgtttcttttggggtccaaacgccgaaaggcccagctcagggttgggtatacatatagggagactacttccttcttccaggagggacgcaatcatcccagcttcctagggcccatggaaggtagagttcactctaccagagtttgtttccgattcccttaacttcggtttccccttcctccaaagccaagattctggtttcttttcaagccctatccacgaatgcaggcctcccgcggattatgtcccattcctgagttcccctttggctcctcaccgccctggcctatctgccctccagttaacgagggtccagtcctgaccctataggccctgaacccattcctgttttgcctctgactgcagaccctggaccccgattcccgtcgcaggatctgcggaccctaagcccatcttggttcctcagcctcaccacccaggtgccggcctctcaaccctcacctgcgggccctgagcgtcgctcccagctcccggcgaggcgggcgctttccgcttcctgctaactactttccgggccatagtgggcagcgccgccgcggccccgcagccacatggggcgggggaagcgaaggatagcaggacggcgggtcatatactgggccccggggccgcgcaccttagtgcgcccggcccggaaaatggcccggacccggagcggcagcagaaaaaagataggcggaaagaaaggaaagagagaggaaggacttgagccgggaaagggaaggggaagcgagaatgagcggctttccgacggcagagcctgcaaggacggcgagcggctagaaccaaaacaccccctcccccttgctcgcgcgccgtcacccttgcgcagccgcacttcggatagcgtcgccacggaaacaccgccggaacgagatgggcgggatctaggggttggaagatagttctctggtgtttcccggccgccgccaggccattttcaacggttgtttggctactgctggatggaagtggacgagctggggccaagggaatctggcttctggccgccgacctccgaccccagcccgcctatccgcaggcacccggaagtgaggaccaccagtgctgctgggggaaggaatcctccctagtgcaggccttaacccggttacctcccatctggcaccaaacgtttccctgaatctgtcacaaaccgtgccctggctccaagggctggacaggggggtgggggggtggggggcaggaaccgctcccaccctcgaggtgaagtccagtcaggaagtcagggcagtgtggccagactttcccaccactgagaacctgcccagcacaaccaacccaggccgccctacgagtctctggctaccctcttcccaccgctgggtagccctgaggctccattctccgctctgtctcctcctgatcctttctcctgtccgaaatgcttcagcccctcagtcagtttcagctcctcagtcaccttccccttacggtgcaacttcaccattccctttagatttccatgacctgccatctaaaccacatggtcttttgtgctttatgaagtagtcatcacgctgtaaacttatctgtagctgcctgcctcactcttggattcaggttgcgtctccattagggcaggtcgggaattctgaactacaggaaagagagtggtcatttttggcttgccagtccagttagagctggcattggcctccaaacaagggggcttcatcaggatcacccttgccaacatttttggaagatcctgaaggaatatgactgccagccttcgctttcctcaagcaaacaaaccctctgaggaagcaggatgctcttgcttggggctgattggcctcaggctgtggtgcccagttacctgctggtcacttcaggcttcaggcctcaggcctcatacctccaaggagctctgttggaccatctcaagttctgtcaacaaggagatttggatttgttttccaagccgaatcaaagaccagattgaagcagggtctcctgccatcccaagtcggcactaccactaacccctaatgtcttgcgaaaggcagctccatcttatttggtcaggcctgtccctttagagatatgcacatagtgagtgggtcaggagtgggtcagctttcttttttgagtctgttctaattctgtcttgccccgcaatgctctggatgacccaagagcccctgggcaagagtctggaatcctttgagaatctctaggctcagattgggctgtcagtgccaagaggggcacactgggcactgctgcagtctctttctcaaagttcctttacttcatcttcacaacctaggaaccatccccaaatgtaccttatagcagagctcgcgatttcttttctttttttttttttgagatggagtctcactctgtagcctaggctggagtgcagtggcacgatctcggctcactgcaacctctgcctcctgggttcaagtgattctcctacctcagcctcctgagtagctcagattacaggtgctcgccacgttgcccagctaatttttttttttcttttttgagacggagtctcgctctgtcgcccaggatggagtgcagtggtgcgatctcggctcactgcaggctccgcctcctgggttcacgccattctcctggctcagcttcccgaatagctgagactacaggcgcccgccaccacgcctggctaattttttgtatttttagtagagacggggtttcaccatgttagccaggatggttgcccactaatttttgtatttttagtagagacggggtttcaccatgttagccaggatggttgcccactaatttttgtattttcagtagagatggggtttcgccatgttggccaggctggtctcaaaatcctgacctcag

SEQ ID NO: 588296 - DNA, 4001 bp, Homo sapiens
ccaattgaattgggtgtaggtaaatgtcctcataatctttctatccccaaagggctattccagtgacctaatgaactgaagggctagggccaggtaccaggaagctgaggggtgggatgtcgggcaggcaggcacatcatggaagcacttactctttttgtagagaatcttcaccctctccctcttgctggaaatgttccccaaagccacctgcaccttgaccaggccgtcagccacctgtaagggaagtggtggttaattccaagatatactacctggctcaaggcttggaaaagttaaagaaccctcattctcccagactctcaaacctgaatcccagtaatctaggttggcctcccttctctaatattaaaggagatgcagccccaccttccaggaatccttaaagtggagagagagaatcatgtactccttggggagtttcaagtctgatggggaagataacgaactattttagagtctatggaatatagagtatacacaatatattttctggttcctaagtcctgggtttgggcatgagaaacacaagcatcctcattcaagccttcatgacctctagattggctggcctacctctagccctatcccctccacatcaaatttggtgtgggagatggaagagtccaaacaactgggatcccaatgatggtgcaatcactgaattagggaatacagaagagaatcaggttaggggagagaaagagtacagttaagggcatacagattgagtttgaaatgactattggatatccaagtggaaaagtccagtagacaactagacataaaagtctggttctcagaacagaaatctggaccagagatatacatttgagacatattgacatgtaaatagtaattgacaccatggaagcgagtgagcctacctaaagtttaggggtagaatgtaaagaatcccaatattaaagggtcaaatagaggaggagactaaggaagtgactgcactcacccagtttttagggtagaggatgaggaatgccaggggggaggcaaataacactgagaagcagccgtaagaggtagaaggaaaaccaggagggtcagcgtcatagatcccaaaggaagagaatgtttgagaagttagttctgaaatgggagcacagtctgctagtgacaactaattcctcatttagtgtacaaacagacatcattaccttggacgcacttagctccaggacatgcctgacacgccatcagaagttcttcaataaaagatcttcccatagtagaaaggggaggagagggcacctgagcttcgtagttgtcaaaattctgtcactggtataaagcagtgctagtccacatctgaatacccagtacccagtctcttcccttcctaatcctggtcctttcagacctcacttctcaccctttggcgttttccttatccacctctgctctgcctccccaggggtcccatggacctcttcctgcacaattcatttagcaattaattatgcagggctctatgacgggccttcctatcgtggacttcagctcttattgaaactctcattagtcagcttctcgtgtcaggtctccccaactatagctcgcgagggcaagggcggagtctcagctacagtaggtacggagcccactctcaggctggcttaaccacccgcagagccccctatgacagtggaccccgatggtccaatcagctctgggaggtcccggacctttgttatttcaaaggccgggctgcggagaacaggactggagcggttgcatcccgagggccaggacagtggaccgctcttgctctgctccagaaagggactaccggaccagactactcaccttccgtgagccgcgcgccccgcccggcccgtacacccagcgctccagctcttccactcgggcctgtagccgctgcaagtcagtcagacccgccatcgctactaccgacccacctcggccaggaaacagccagagggcgggacgtcagtccaaataagaaggctagccaatccgagtgcacgagcggccctttatgcaggaagtgacgccatgattcagcccttcagtgccggaagttactcctcggagctgtcaaaagctgattaccttggcaacggctctgtcccatccctcccctggcttccagtgcctggttgtcaagataacctttgcttttcgggtaccaaagagctttccccacgccattccctgagtttgcacgtgttccaggataggtccattcccatagatacatcattaggaggctccgtgagttaccataaacttttggagtcttctaaggttcagttgattaagtaacttgcccaaggccacccagcactatagggacagaaacaggacttgaactcaggctgtctgattcaagagacggagctcttctattctcacgaaactttgctattctgccttaacctctgaaagcccctggcccaaggcagcctatgttccacatcattcctccccacctcccatacccaaacaagaaaggaggcatcagagagggagggaccgcagctttattgtctagatgtgacctgagggatgtctctttcacagtaccccaacccaacctttcacttggctcctgaagagaagcagggctgactcaaaagggtagggtcctagagatgacattgacagagggaacacatgaggagatgatggggttactggaggaagaaccctttggtaggtgctgctggaattggccagggaggaggtgccctccctttacaatgaggtaggtgtaacatcaaaagaaactttggttttaagtccacatggcatgggaggtgtcgtcccctcccagggctgggtcccagagtgggcagccagaaagaatcaaagcagggggtctcctcccccctcagcaatggggctgggactcttagtttcaagtaggacctctcagggcaagatgctggaagggggccctgtggagggtgggggtgcagggttggttggaccctgggaagctggcacaggctggcggcgggcaaagaggacacctggcaaaggggtgaggagatggtagagggcaaaaacaagcaggagggggtagggtatggaaacagaagaggggaacaaaagtaagtgttctggttgctagaacactacacacgtacccctgccacaaaccaatgaggacaagctccttgggtcagtaagagactccattgctaatgtagatacctcaaacaggtaaacaaggaatatttatgctgatacataggcccaagacaaggcagacatcccctggtactcatgccagagaggtcatgccttggatcccatgccatgtagacaccccctttaacccatgccagtctagcaatcccctgaactccatgttactcatgcaagtttagatatccctgaacttcatgctagtagaggaagtctaaaatccccatgccagcctaaatacccctgaccccatgccagtgtagacagcctgcagtacccataccagtgtagaccaccccgttgatctctagggccatgttgatactgctgatgccactgcctgccagattaagaggcccatccagccgctcttctgtccaggagggggcagaggaatcacattttggagaatcagacttctgacttattaatagaatttcccccctccatccccgtagacagcccccattccacttcagccccacacctatactcacacagttgtctacagaggaatctgtctgccccgtctctaacacctatcaggtgatgggtcaatcctccctcagtgtacagtcccgaagccccctcacaacaagcccctcctcacccctcaggggaaccttgccacggggcaggaaactggggggcatgcaaggtcgaggtgggtccataggccccatcagcacagctctcttctctgggggctcctctggtgccaatttctcccgtgtaggtcccagtgccaggcccacaggcagtgccagacaagggtttggaattccact

SEQ ID NO: 588297 - DNA, 4001 bp, Homo sapiens
gccagtcctcattcctgaaacaaacgaaccttcctcatggcgaccaaaagagttaaactcaaaaatatctgaagagacttattctgagccaagtatgagtgaccatggcccatgatccagccctcgagaggtcctgagaacatgtgcccaaggtggtcggggtgcagcttttttttttttttttgagacggagtctcgttctgttgcccaggctggagtgcaatggcatgatctcggctcactgcaagctccgcctcctgggttcacgccattctcctgcctcagcctcccgagtagctgggactacaggcgcccaccaccacgcccagctaattttttgtatttttagtagagacgggggtttcatcttgttagccaggatggtctcgatctcctgacctcgtgatccgcctgcctcggcctcccaaagtgctgggattacaggcgtgagccaccgcgcccggccgcggcttggttttatacattctagagaggcatgagacatcaaatacatttcagaaatacactggttttgtccagaaaggtgggacaactcaaagcgggggcttccaggctataggtaaatttaaacattttctagttgacggttgagtttgtctaaacacctgggatggatacaaagaaaatgctcaggttaagataaaagattgtggagaccaaggttcttttcaagtctttagtggctgcccttagagacaacagacaagtgtttcctattcagatctttgaaaggtggtagactcttaatctctttaggattgggagggcctggaagaaaaagatctagctatgttaatagagattctttgcagatgcaaatgtccaccccgcccgccccccccaaagaacagctttgcaaagccatttcaaaatgtggcaaagaaacatgtttaggggtaatattttaactttcttctttgtcacataatgttaggccagagccagtttggaaagtaagtcacgatatatagggttaaatgaaagccatctgatgagaatttatggtttgtagggcatgactcttcccagacaggaatgtgggcaagataaaaaaaaaaatcagagcttagtccgcactcagtcgaggaaactggcttagagaagttaagctttggcctgggacttgcgccggaacttcaggtcctaccttccacgggaaacagcctctaattccttcctttacttttctaggcgcaggagccagctccccgcccctccacaccgctccactccccgcttccaggcgcatccctgcgggtggtgttccggttagagacacgtgtttcggcgcaacttgtcccgaagctgcccggtgtctttctcccgcttaactccgtgaatgactcgaaacccgactccaaggcacggctgcagctcgcggcgcgcccacagccgggccgcgggtggggacggagctgaagccgggtcagaactcacccgactcgcctgggctgggggacgtctggagaacgtcctggggttgtcgaagagcgaaccgtcggcggctgccatggtctgcgtgggtgacgcgtggtgcagcagcgagcccggtgcgcagactgctgggcccgggaccccacgtgggacgcgcgaggaccctgcgccaccgccccttccgggtccggaacggctccagctgtacggactcgtcccgaggggagccggggacggcggcaccgggcgggtagggacaagactaccgcgcgtgcccccgcctggtggcagcccctctctgcgtccctcgcggcctggcaaaattacattcggccgagagttcacgctggggaagctctctgaatgcctctgagaagcgagatccggcgccatctcaccgacgagcctcccctttaccgccccgtgcgtttcctcagcactttaggaactaaagcctgtctgggtagctccctaacaggctctggagctcaatccctgggcagggaaaagggggtcctcggggctccccgctcgctgtcctttttctggacaggcagttccttggccacctggtagggccgcgttgcctggcaacggcggggtccttcttggctcggcggcgctcggggcctgaggggagaaaaccgccgcggagggcgctgggggtggcggcggcggtccgggaggtggtcgcgcgactgcgtggagcgccagggcgtccgacctctgcacctgagagaagatgaacacggccgaccaggcccgggtggggcccgcggacgacgggcctgcgccgtctggggaggaggagggagaggggggcggcgaggcgggcgggaaggagccagcagcggacgcggccccggggcccagcgctgcattccgcctcatggtgactcggcgggagccggccgtgaagctgcagtatgcggtgagcggcctggaaccgctggcttggtccgaggaccaccgcgtgtctgtgtccacggcccgcagcatcgctgtgctggagctcatctgcgacgtgcacaacccgggccaggacctggttatccaccgcacctcggtgcccgcaccgctcaacagctgtctcctcaaagtaagtcatcccccgccatccctggggtcttcccctgtccccctctcgcggccgcatcatccgtcccaggggaatccgatcccacactctgtccggggatttccctcttcgcaccgagcgctggggatttattaagcagccagggttaccacagcttaaaaaaaaaaaaagaaaagctctgcagctgtctgcaccctgtttccccaggtcacccgccgccgcaaacacaggtacacacccagggggcttcccggagttgagtcccaggaacccctccttcgcccctccgtcgggcccgcacatggagcgggttactcgatggtgctttctgagactccaccccctgtagatccaacccggggcctgcctctgtcgttgctgctattgtttggggccgactttccgaggttcttggctggctttgtctactgtgtgtgtcctcctctcgcgcctctttagcttcagaaaagaaaaactggtcccatccattgtcttaattgtttcagtgactttattatgaatggtcctcgcctctccttgggcaaacgggtaaatactggatctcggggtttgtactttagtttttctttactagctaaacatctttgggatgttgaatgaaaataaagattcgaaacaactacctatcttaaacttcaagcgcaaggtcaagtagtaagccatagcgttccttttagttgcttagaggtgtaaaaactttccatatatccttgatagaggtgtacgcttacatgtgaactgtcagtgtatattcatacattcaatagatatttgaataccattctgcttggtgctgccccatgttctggaaataaagcagtgtacaaaacagaacccctgccctcatgaagcttacattctttggcaagtcaagcacaaatgataaggtcctgtcaggtagtgataagcactgtaaagatgtgtatccgcacatagagaacatgtttatgtgttcgtaaactcttattttggaaaaccattgaaaatatgagtcattagctataggtagggtgcagataaccctcatcactttgtagcatacttaattcaagtttcaaacatctttctgttgttagattgttagtcagcttgtatgactaagcttcctctaagatcttcttgaagaagatatgaacacatttgttcaagtgtaaacaaatcagatagacagatgcaaccctatgaaattgagaaatacaaaaggagggaggcagaagaaaggtgatttaaaaggtgtatcttctgctgtaaaggaatttaactgtttccaaggatgttcatccgcacagcaactcaaggaaagtatgtatgtcagtatagtagacatcgaataccttagcagagagaatgtaaagaaaggagggagtagtaaggggagagacttatggggcaggtcatctggtggtgaatctgcagcagtcctaaa

SEQ ID NO: 588298 - DNA, 4001 bp, Homo sapiens
gtgtatcaaatcaatatatgagtgcatgaaaaaatggaattcacaccagttgttagtgtttcttccaagtacttcttcaggtgccaagctacactggtcactagaatgccattccacaacctttcttttagttttgtagagcaattagcattcaagttagttgccggtcttaacgccatttccaaaaactgcaataacatcaggaaagactggcacttggagacttttaggattcccaggccccctctcatcgacttttttttgtttttcggttttttttttttttttttttttttttttggagacaagagtctcacgatgtcacccaggctgagtgcagtggtgcgatctcaccataacctctgcctccctggttcaagcgattttcattcctcagcctcctgagtagctgggactacaggagtgcaccactacgcctggctaattttgtatttttcggtagagacggggtttcaccatattggccaagctggtctcgaactcctgaccttgtgatccacccgcctaggcctcccaaagtgctggctgcagggagccgaaggcccttgggatgtgaccaactcagcattccgctggaggctatatgatcaaacagcaaactgtttatcatgaatgcagcacctgggcaaactcacactgccttgccaccaaatggtttgctgagcgcctcactccctggcgccaggctccttgaaattatttattgagaaatctagcacctattgttcaaagaatgcagtcttgcaagcctgctgtgaatcaagcagccagccaacaagcacctccccttctcgctatctcttttgcctaataagaagggctgtgtaaagctcagggcccttgtccactagaggcaaggtgccccctgaccccttcttccagatatactcttttgtctcttgtcttttattcccgcgttcgcccctctttgttcagtcccctaggtccgtgcgggttacatagtggcaccccgaacagcaacagcatcgggtgctctacagctgggattacagcgtgagggaccacgcccggcctcatcgatatcttttaagtaccacctcctttcacctctttcccagaagcctctgctcatctccagcacaaagtaattcgatacaaatttacaaaatggtcattacccaggatcacctgtctccgaagttagatggaaacacctgtattaaagcctaaagctattcggtctggaaaagtccggctcctctccagcttccacttctttaggcgtgcaaataagattcggcagagtaagcatcaacttcctttaagctcagaccgcactttgtgctcagtactgtaattatctgccctttgtgtcccatcccttggactgtaatgtatactaaggaagagcccttatcttatttctcaatctctgtcagtacccagccaagcacacagtagactttaatattagtgaaaataaatgaaacaaaatttcttccccagctttgaacctaaatagatgagcacccttaagcaagtcacttcacctcgctggaactcagtttccccacctaggcctccgagggctcctcaaactctggcaacctctagcctaaaatgctgcggagatcttaccacaaacctggggagtctggcaggctctctgcattgattaaaagaagggaacgaagcaagagaaaaacaagtcctcaattgttttccgccgagaaggcgccgctggagacactcaccctccctaaaccagggggccatgtagctcaggatgtaggtagggtccagggtcttccggatataatcctggaaggcttgcaggctgcgtcgctgctcggtggtcatgccggcctctgcttgcagctagctacgttccccgcaggctgtgcctcactagctttaaagccgggtaggaggagggcgtggcgagcggggaaagcagggattttccgaggaaatgaggccggacgcgaggcggagctgcataggaactttaataactaaagggaaaatcgaaagtgcaactagcggcgggcggggttcgcggaggctgttttgcctcgggctagtttcgtttccctccgcaccgaggaagcccgggaacggagaggacccctaggaattgcttttatttttatgatcttatattttgttttgcttttatagcgctaacgtttagacacagtaaaatgcacacaatctgagtgtgcaattcgatgagttttgtaaagtgtacacctgtgtacccagttctcccacgtcggctgggtgccagggtaagtctatgtttagctttataggaaaccgccacctgttgtccaaaatgactgattacatccagtttacattcccacccgcagtaggagagctccagtagatagacacattggtcagcctttcttttttttttttaattttaacttccatcttggtcggtgtgaaatggtatattattgtggttttaattttaatttcccatataattaatggtgggcacatttgcatgtgcttactgggtcattcatatatcttttgtgaagcatctgctccaatcttttgcctgactttggagttttttggtttatggatttacaggagttatttattcaggatacaaaattgttaaatatatgtattcgaaatatcttcttccagtctgtggcttaccatttcattttcttaaaggtgtcttttgaggagcagacacttatattgatgcaattttcaggtttttcttctgtttgttgttttttgtgtcctctttaataaatctttgcctaccccaaggtcatgaaaatattgtttccttttagatttatatttttagcctttacttctgggtctattactatctcaaaataattttgttgtggcgtgagatggggggtccaggttcactttttccatatttctaattgtttcagcaccgtttgttgaaaacttttccttttggcattggatagccttgggacctttgtaaaaaaaccaagtccattgaatgtatatgtgtctatttctgactcttgttatattctacttcctactactttgacaataccattgtctctaggttactttagatttcaactaagtctcaaaatcaagtactactaagttctccaaatttgtttttcactgtgaagatattagctatttgagattctttgcattccttttttttttttttttttaatttcttttttgagacaaggtctcactctgtctcccaggctggagtgcagtggtgcaaacaggggtcactgcaaccttgaatccctgtgcatttccatatgaaataagaatcaacttgtcaattaccccttccttcccccaaaaaaagtttatggggattttgatcaagattgcattgaacctacagataaacttggggagaagtgacatcttaacaatattgagtcttctaatccataagcatggtatgccttttcatttacttaggtctataatttctctcagcagtattttagttttgtttcattttattttacagacggagtctcactatgttgcccaagctggagtgcagtggctattcacaggcacaattatagtgtgctacagccttgaactcttgggctcaagggatccacctggactcaagcaatcctcctacctcagccatccagagtagctgggactacaggcacgggccatcacacctggctattctgaactattttatgttatttgatgctactgtcaatggaattgtttttaagatttcattttcaaattgtctgttgctacggtatagaaatacaaatgattggctgggtgtggtggctcacacctgtaatcccagcactttgggaggctgaggtgggtggatcacctgaggtcaggagttcgagaccagcctggccaacatggtgaaacctcatctctactaaaaatacaaaaaatagccgggcgtggtggtgggcgcctgtaatcccatctactcgggaggctgaggcaggagaatcgcttgaacccaggaagcg

SEQ ID NO: 588299 - DNA, 4001 bp, Homo sapiens
taagggtctttcagaatccccttgttacttagctcaaaatcggtgctacatgcatataaattcaccctactgcttgtccccagatgaataagatttaattaacacttaacattttggtacttgctcactttggtgggagtatggaggagtttctcttcctgttgaacacaccatgctcacctggaaatgtccttgatgacaacttccctcattgattgcaaaatattttaatacttttgagcttaagcttagataaactggaatcccagtgttctaaaagataggtttgggatcagtcaggtctaaatgaaatctcagttttaccaattaccagttgtgtggttctggaagcattacttaatctctgagacccaatttcgttagctataaataaagataatatatataccccacagagttaaaatattaaatatcatcatgtacattaaattgtccaacacaggtgctcatgaaattcattcatccattcaataaataggtatcaagcacctccaatgtataaggaggtattctaggaactgatgatgcagttttaaactaaacaatatttctgccttcgtggagccatttctttcagttaaaaaaatgctatgaagcaaaagaatgcagaataataggatggacagcaatagtaatggtgttgctagaaataaacactagatcctttttccctgtgttcacacagttctcctctttttgaatcccaaactctcctgcccactgaccacaggtctccagggaggatgaataaagggttagattctgttgaattgagtcatctgacatcatttaaataaagttgtggacaccaatagaagagtacatggtcatcaacaggacggatagagttgggtgtcgctttggagacccttggagatgcacagctatgctcggtctccaggcttgtcatagttgaaactacagaggcgattcttggagaaggacatttccccccaaagaggcagtcctcaataatgccatctttgttgcagcagaacatcggcaaccttgttctgagctgagtccaagttgaggggaaagaggggaacagccagctgtgaaaagatcaatttgtttccaatccattctttcttatggttagagaggctggctccccacactggctgggtctgtcagggacagatgccaagtagggcacagactgaagaaacaccccctgttcccactgaagcaggagcattcagcctctgctctgagtaagcctcagagtctatggcattagccatcccctagttaggttgctttggggagacacaagttggggcagatgagagggacgccccaagtctaattcaaaactacaattattcaaaccctccatttatttatgtttgtaaatacccagtgttggcaggttgtgggaaagcaggggttaccatataccatagctgagagtgtaaattggtataacctcttaagaaaaccatttggcagaatctatggaaattgaaagtgcatagaccctatgttacagacagtctacttctaggaatttatccttcagataaattctcagaagtgcacccagatgaatgcacaaggaggatgtttattacagcattgtttgtcacagaaaaagtccagaatcaactgaacattatgttgtagagtaaaagaatgagccacacatagaaagaggtctgagagaaaaaggaggaaggaatattcagtttggtatgcatggtaaaaatctatttattatacataaagttaacccctgcatcaacatgtatgttttacatcctgttggatctctgctaatacctctgtctgttcctacccctatcccaagattcaataatacaaggcaagaagactcctgtacggccctgtggatgtgcaagatgctaagaatgagtggatattacagatagatgtaaaagtaggaaccttgccagcctctattacctttcctcagtagatctgtcttcctgggccagggtgaggtagaaacaatagctagatgagtaatcagtggcttgtatggcttggcatttttcctgagctccctttggagagggaactaagaccatactcagtattttcaggttttcagtctcttcataattgacggcccattccctcctcttatcaaattgcacagagatcaaatgtgaaggagcctgaaagaaaggacagcgtgtattgctcaattaagaatttgctcccttccagctctaaaacatccccaaattttccagttgcaaatgttaccaaatttacaatgaccaccaaatgttgaataaaacatatgtaattctacccatcctggcaataattcactgtggagttttggtcaagcttcctgctctcagtcagcctcagttttccctgtggttcatgtgataaggactatgtacctaggggggcaagagcagatcacctgtgcccctctctccctgcttcctctgacaggcatagctaatcaatcacaacatgctttcctacagatctcagatgattcctctgactacttcttgacacagaattgtaagcaatcacaaatatttaatccaaattgatgtaaaagtcaacatttaattgtcctctccatactagatgatatctgaagttcattccagatttaacattctgtttccacaattcaaggattcatttgaacgccagctcgttcatgaagtcaacctagattgctgaagaacaagttaatttttcctgtttctgacttatggagacagagctatataagtcgatatgaacttgacttctggtttctttgcattgttatctcattgtcacctgtataacaatgctgcctccatggggaaatttaatttaagtatagaaagtacatcccatataataattttcagactgtgatgcatagtacccccagagttactcaaagattttccatgggctctagttggcagagataaggaaattttcagattctcagctttcatttgcactctttctcaggaatctgaagagagtccctttttcgtaaatgcttttctctcactttacaaatggaattcatacctctcactcatctcgagttgctttggggtataaaaatttctgggggaccaaacaaaggtacaactcaaaattctttcgagaaaaagtgttgagaaagtgaatgactaatgaccttgcagcaaatcattctgcaagtcagatgactttcaatgctttagttacaacaaaactgaaggggaacctaattaaaatgtcacctgagaaagtattaaaaatcctatttgatgattgatctttatgtgatttttggcatacaacctggtaagaagttataacactgctataagaaaagtttttcttttcccatctacttatttttgtgaataggtttctcagtgcttacaaccaaaaaatgaaaagtaaataaaatttatgaaataccatctcacgttagcaataatgaatattcctcagcagacatatggcctaattttttaaaaagttcacctcattcagagaagcatttctaataaaaccttatgtttcacatcacatttagcaaaattttaataagtgtatggtagattgatcagttgtatacatctaataattgttatgataatttaatccagaagaaattgggttttgttagcatcttatatttacagaacattaaagaaattttaatatgaatttatatacatgttttgtttcagaataatataacaacatgatcagtgaaagaatttccagtataaaaaaatatactacattaggaaacatttctatagagcaaatgaaatggaaataaacatttaaggaaaacaaaagaactatgtaagttttcaactgttagggaagattctacttgtatatttttaaatggatgaatggtggtatcaaattaaagtggaatttcaatccattaaatctatttataatagttagttttattttaaatgactatatattcaatatactttacattatatccctcacaactatttaaactt

SEQ ID NO: 588300 - DNA, 4001 bp, Homo sapiens
agtgctcagaattagcgatgggttccacaaaacacatttgagaaatgtatttgtcaacctgctaccttggagagcaacagagagatttgatggctagccatctgaacttttacttgctggattttaatactggttctgacactcactgcttcatgtcaggcaagtttctgaacttttctgtaacaagaagggtaagtgtcctcacgcatactctgcaactctaagttggcttctggaaagtgtttctaagtgctattgaaatccaagtttacaactcttacttggaagcaggagctaaacttgagtgcctctttaatcccaatgtttcacaaacgacatctttttacctcccaagcctctcaagctcttgtttggagcatgcttctaacttttttctcatttccacaaaaataaagatttaacagagtgttcatgcgactcttccattttcattaccataagcaaacttttctagtttcattcagcagatgtctcaaggctgctgcagcgcatctcatacatattttgtaaatgagaagcctaaccacacgggggactgcaaggctgggcaagggtcacactgcacgggcatcacctggacatgagatgcaatgtttgaataattattagtttcacccttaaggcccttctcctttcaaacttccctagtacaattctcaaaatgctgaaataaacacattccacaaactttcttgtaagagggtttaaagtgtcctaggaaagttgttttacagaaaagcctatgctgtcaactttgctttttaatgcccttaaacaattctattagtcacagaggaaaaagtgaacatttgttagtaattagagataaaacatctccagttctggggcagaggaagggagaggccacaagaggacctggctgggaggggagatagagtcgaaagccacacacccaaattggaccgcttaagagttgcactttccaaagtcaacttctaagtctacaaggacagcaacaatgtttcagtggattctgaagttacatgtatcaacaatttccccggaaagctaaccctccaccgggaactccaggtgaatgaatgagtgagggaattcgccagattgagttacaaagcctttccaacgattatcaagagcaggtgctcggttacaacacagaggtatcctccttcacagcctttggaccttgctgcgtggagattttcacagataagaggggggaaatagagagacaggccttcctccccggccatccacaccttaggtggccacaccatgagcggcccctccctctaagaacctcacgcgacttctgtgggggccgcaggcctcaagcggccaggctgcaacctctccggacctgccaactttcaggggcgccccaaacatgcccaaacatggggaggtgcttccggggctttcccactccccttccccacagttgaaggaccattttcaggggctctccgtaaacccggggagggggccgccctgtaatctcagctgttccgacccccaggtgaggaggggacacctgacccccggcgccctgccaccccgcgcgcaccccgcccccgcgcctccctggatcgccatagcaaccgtccccctccccgcgtgccggcgtcacgcggggcgcccctctggtctcggcaacaagtcccccgcgcggcccgcggcctgcagccctggcccggcctcgccgccccgcgcccggcccggctccgcccggcccggccgcactcacttgatcctggagcccatggtccccaggcctcctcatgggcccgcgggccccgctcggcgctgcgctgcccgcccgcccgcggccgaccggcctccctctggcgctctccccgccccttcctcccttccctcaggctggggcccgcccgctcgaggctcgctccctcgccgccgccgccgcctccaggggttaatgtactcgctccagcccggcgaacgccatggtcgccggcgcgcgtgcccggcgcgcgccgccccctccgcctctcaccaccgcccctcccgcccgcgctgccgccgccgctgcccgctggggctgctgggaagtgtagtccgctcgcgggggcggggccgtggccggtgggggcggggcgggagcgcggtcacccgcacgtctcccagggcgcgggccccggaggactctggcgttccgttgcaggcccttacacatctgcaccccactgcgccccgctggaaacctccactcacagccgccctgaagagaccctaatcctctcatggagaccccaagccctcccgatgaaaccgccaccaatcctcccattggaggcctcccacccagcctctctaacggagagctaatcccccgcccaggcctccatgaaaacacgttttccctttaacatcccgcaccttccagtaagttccgtgcagaacctcttctccatcacaccgtccacttccccatctgaaggcctttcctcttcctttccccttagagcttgaaggagaccccacatacctacaggaaagccacctgggggcttcgtggacccacgtggtggctcagctctgccctcccgctgaggacctctgcctccctttatcagccgttttgggaactccaacatcgaagcctcctgttaacacaacagtccctgatagagattaactcaatgcaaatgaaaggatttgagagccgagatcaccagcctgctacctacccctgctcccccttgggattcacttccatgaacacctcaatttcatcccctctagggccagagggatcataaaggaagcaataatcacagctaccattagccaccctttaatgagcgggtgagtgccctttctgcatcagacacagtatttccgtacatcattagtgccaatcctcacaataatcctgtgttcatctccctaatttacaaagaggaaactgagccacattcccaaggtcacataactagcaacgagtgaagaagccaagattagtgtccagactgaatcattccagacacctgtgacatagtcatgctttaaggtggcacctttggccacaagtccaaagacatttttaatattaggctttttttcctttttttttttttttttccaattttctgtcccgaaatgccattcatcacttctgccattttagttcttataaatgcatggagtgcctccccaccctacccccaccccatagcctctacgtaactggtcctgcgtcctagctcccggccaggatgggaggaaagaaagccagaagataagtcgtagaagacttcttctgttggagtcaccttctgaataaagatagtttctcccttttgcctctgcctttaggttgttgaagtcaaagggtaaactttttaaaatgaaaaccaaaaaaaaagtgaaaatgtccaaactgtcattttgaatttaaagtcttatgcacccagacaccaataccgacttgtaaacacccccaggagcaaagctctgctagacaggcaggagctctgtggtgtttattcacctatgaaacttctccaaggaacagttgctatcaagatcttccctggaatgggagccagttcaaaagctctgagcaggagactataaataaaacaaagttattggtggagggcaaagctggctgcttttcaaaggaggttgtagccatcctggccacaaatatgtctgggtgcctgctgggtggggtgtgtgtgtgtgtgtgtgtgtgtgtgtgtgtgtgtgtgtgtgttggagagggaggtagaaggtggggattatgtgtctgctcaggtggcctcagagacagcagggtggtctgaggagagagcactggactgggagttaggaacgtggcttctaattctggcttcagcattgactggcagattttatgcaaatgattagacaagtgtatgttttagtttcctcccccgtaaaatgggcagagagagtgatgagaagcttccatcataagagcgagtgtaacataggagcaaagagcacag

SEQ ID NO: 588301 - DNA, 4001 bp, Homo sapiens
aataatctcccaaatttggcaccaggaattgttacagcctacacaccactacagttccttgtaatttaaaacatttgcgttttaagaatagtctccacactccaactatgctgccaatttcttcagctaaaagcttaagtttatactacaaaatactgtatttactctcgacaatagaatgcactcatttacaaagcatacaggactaaattactccaatatgcaacttcaaaatttctccaatatacaacgacaacatttctaacatcatagcttttctattacccaaatcagtaagtctaaatagtagtactgtacactgcacgaggtactattggccaaagtcaagtcgcatatgatcagttcactacaacaggttatacaaaagatcagacccctaatctcaataaactattttgcaaaatggtcaacggagataccaatgcggaggaaagtgtggattgagtggcagaaaaccctttgccactactgaaaaaaaaaacaagtcaaagcaagcctatatgacaggcagatcatgttcatgaatacaaatctaacttcattgccgacttcccagtctcacagcaagacggcagtttaccaactctttaacagtaatacaaagaacaggacagaaaatatagtttcttttttgcatgctatagtgatcaagaataaaggatacctttaatgttcaaagatgaaaacttccttttgcaactaatattgctcttatcgcgtgtacacagaaaaatcatacaacgctctgcatttctgatagagtaatacacactatcacatcaaatcaagtatttatccagaacttagcgccttagcactaacgttctcccctctcattatacacagaccggaagggaaaacctattcctacgtaaattagggcctaggaagaacgcctcaacacgggtttgcacacaattaagcaggctcagtgggtcaatttctcaggctacaacgcttgacagtatctcggaggcacaaagagacagctgagggttcactactggaaatgacactttccctcaaatttgcacaagtacccgcggtaactaccctaaattttcccgtgtgacaaacatacataaggggagaaggaggcggtactatttaaaaactgggtaattccttattagtgcagataaaagacggtcttcgagagggaaaaggtctatcaagcagaaaaggggaggaaaaaaaaaaagacgtgacagcattcttaaaacagaaaaagttacagctctttacaggagtcagccttaggacttcattccttggttttgtgtttagtcactccagagttaaaaggatactgccctcctagaaagtcatccccgacaaagaagccctgaggatcggccaccgtaagacagagaaggaaatgtcttcaattcaccagagacacctgcccaggtccccctcctccccgttgtccccgacacttctcagtcccccgactcctctcgagactgcccgccacccctggctctagctctccgctctctcagcctcgaccccctctgggaagccccgatcctgctccctccgcaccccggcccccaccaaagcggccgtcgccccggcggtcccccgggcccagacccctcgcgcttgtacgcaaacgattctcatgggcccggcgggcgacgcggggaggctcttcaggggcagcctttccccgactgcatcccgcaggatccggggactccccgcccccggaaaccgcggagaaactaggccacgaacgccagccgcggccactctccgcctcctcggcgaccccccgcgggccagccactcggaactcagccctccgggctctacctgtcccgcgccctcccagccttgcagcgcaggccccgcgagggcacggcgcaggcttcctccgccaaaggccccgcgccgcagcctcacctgctgcctgctcctctgtcagcgcagccccgacacggcttcttcctggggcaagaaagcaccggattcgcggactgggcgcgctcggcagggcagggcgggggactagctccagcggccgccgccgcctcagtccggtctgcgcctgcgccgcctcgcgggcagggtctccgaggggcgccgcctacagccaggggcgatggccggagcgctggcccgcgcgggtgcctccgcgctgtgagccgtcggacagtgcgggcggcgcgtcgcctaggagctgcccgcggcgcagccgtcccaagacctgaccgccatgtttctgttccctttttctcccccgccttccgcccctttccacaaaacagcactttcttttccccctccctctccctttcctcctgcgggggcgggtggaaaagggcggggggtgggagggagaagacgcagggaggaggggggcggtgcggtgctcaggcccctcccccggggagggccgaggccctgcagccaccgctcccctcccccgcccgacccctgtgcgacccccgcggggcgcggggtctgagccttgcgggcctccgatcccctcctcagcgttcgcgcggccgagcctgcagaaacagagctggggagaaagcgctctggaggccgctgtgcaccccttcctgcagggctcagactggcggtgtgatgtgggtttattgccttggcctgaggcaggtggcggctgcttctctcggagttttcaaagacagggaaagtgatgccgagtggctgaaggtcactgaggacagtgccgggagatacgtgaagattccttcccagggaaggaatctggaattcccacgcatgagtagagggctctagagagacccgcgcgctggcccttcccgaaaccccttggctccagtgcaccatgtgagtccctggccgcgctcggtgtctctccttcggcccagatttggggatgggaattcctaatggagaaatcgctcatttgcatagtcagtaccctcacgcctcctaagtgtagcctcattatcgacacagacgcctgcagagtcgtttctctataatgcaaattttgcaggatatttttgaacaacgtttttgagttatcatagtaaatgaaaaagcaattactagttatttaggaagaaggaaatggtttgaagtagagataacttttttacctctggggggaaaaaaaggcgaatgacttcagattccatggcaggtcaaaatcagaactggtaagatttctgcatatctggtgagtatccacataaataatcattttcctgaaaattacactctccttatttaatctgtatttttgcataaaaatgtgagattatacctgggtcataaatgcactgctgtccatttatttctgaagtttattgcatagccatggataatttgagttttatattcaatagcagaaactatttttctaaccacgtaagcagtcagaattgatttcagaagaaatgcgcagcaataaaagttaaggcttatttaataacagtttggggccaatttggtccccctggaaactatctttgacattgacaatccgaagagcaaaagtttaagaaaggatctaatacttcaaaatttagcttgtgggccggacgcggtggttcacgtctgtaatcccagcactttgggaggctgaggcgggcggatcacctgaggtcgagagttccagaccagcctgaccaacatggagaaacactgtctctactaaaaatacaaaattagccgggcgtggtggtgcatgcctgtaatcccagctactcgggaggctaaggcaggagaatggcttgaacctgggaggcggaggttgcagagagccgagattgcgccattgcactccagcctgggcaacaagagcaaaactctgcctcagaaaaaaaaaaaaaaagaaaaaaaagaaaagaaacagtgaaacaaaatttagcttgtgggcttcttttccttctttcccaaagtctaaattaattagcagttttaaagcaatataaacgagatttctttctttatttacatatatattttttaat

SEQ ID NO: 588302 - DNA, 4001 bp, Homo sapiens
gtctacttttttattattattagtttggctcctgttcaagatattttttcaaaaatcaaacatttcaacataattgcaaatagtccatggcttaccttatctggacctgtcactgctgattttgcaaatgggtttcaagagaggggtggaagccccaatggatataggatcaaatcctcactgaactgcttcaggtaacaatggatgcttgatttatcagaaagagaagtggaaaaaactttgctcgacccactctttaaaaagctgcaactttcctttattcataaattattaggtaacttgattcctaaaatttaatttaatttaatttttattacacacacacacacacacacacacacacacacacactgaatctctccgtttgggaagctcagaggatctcctccccctcaccccaccttccatcgcaggaaaaaaaatattgttaagactgaaaacacatcttctactaaatgcaatgtggtatcctagaataaaataaggacataggcagaaaaactggtgaaatttgaatgaagtctgaagtccagttaacagtaatgtacttttaccataaaatccccgacatggtgactcgcagcactgcagtttacaaagaacggctccccgtggagaaatcctggttaagggcagtctgtgcctagtagaaaagctggggcctctttcagctttcagttaaggggcttttcgctcttaattttgtggaaatgtgtcaacagttctccaggtgttcttttaaactgtccctgaaactacacgaggagtgccatggcctcagggaagaagttccgcctcctccattttaaaattccacccaccaaagaaaagtctgtcctcttttcctcctggggttaatgtaacacaaagcagccatcattttgcctgttgcttctgaagggtccaaagggtccatgtcaggcaggttatgtgtcccgccatggctagaagtggggtgaccctggggcaagagctcattttgccaatgtagccacctctgttgggaaaatgacagtcaagagacagagctgctcagctcacacaggctcctgcaccacaggctgccacacttaaaggacagctctgctcctatcaacctctcccttgccagcaagggtttattctcaggcttcaaaaactatgacatggagagtttaggttttactctggaagcagcaagagtaaacaaacaagctaaaggctggtgctgctctgagtcacagtttaacagcaccatggtgttactgagggagattcagagagaagatctggagcgggctcaatgaaatggtggtgggggaaggcgggggtggcaggcggggagcactgctggtaaactgaaactcacagccaagcagcttgacctttatggcacagctgagtctggggtgcaaattgaagggacagtctgcgttttgaatgcccaaggtaactgacagcctttccaaagcatatcaccttatcaccttgtgaccgttaagttacccaagtctttttaaattgccactaaaactgaatccacatttacaaatgatcatttgcctcaagtatctttagtgcataaatttatcatctgggaactccagaccatttaaggccaaggctaatggactacttctttataaatatatggaatgctaaacaaagggaaaagattgatagagggggaagaggaattgttgcatggaaactcacaacgagctttgcccactgcaccctgatgcagtataaaccgatcggcctttttccagaagctacaaagaagtttctgaaagcctcaagggcttcctccaaaggggttgatgggctgggaagcaaatgagggaagccaacatcaggtgcacagccagggagacggctcaagactcacctggacacaggccactgaacggcactcaggaggaagtagtcgtgggcctctgctgcctaggagtttcccagcagccagcaggccctcagctggagttcaaaacacctgcgctggcggggagtgggggtttacagaacagtccaaccccctgagaagcatttctctgcagaagcagagcatgtgtcccttttcccccaaactcttcacttcttgtacgcaaaggaggtcgggggaggggggaagggggaaaaatgcctgcaaaggatccatgaatccaccctggacccaacactatccatcatactccaactggttttcagtagccctgggctgtagatcagtaagcacacacactcctttaaaaagcatgattaaatccctggaagcctgttgtcatgaggttatatttctcaattaacaaatggcagaaaggacaaacactctcaggggctagggaatttattttttacattcaggcaggagtctcatttccaaaaaggttagggaccgcttatttggtccagtggccccattttccaagtggagaacaagaggtcctgagagggcaagtgacttgcttcaggatacacaacctggtccaaaaacagcagcgtcaagccagtgcactgtggatcacacaaacggcctcctcaggccacttaagagctaacaaaactgtttcagggaaaaacaaaaaacaaaaaaccacagaatggcagtagcaaaggccacctaattatgccaagcagagattttatctcttttaatgctcataagaatccacagccctattcacacattgtaaccacacatttgctcaagtatttgttactatcacctgcactagcttttaagcctcacaaaggcaagggccatgtctgtgcagaactacgttcccagtgcctgagagctatttgctctgtaagctatacattcctgttttaaagtattaaaaaaaaaaaaaaagcccagaaaggccaagtgattcatctaaggacacacagcatggagttactgaaaaagctgtgccactctgtccatactctgccccagactctctccaaaccacagccttaccttgacggcctccgcgtgggtcacccgggccagggatttgtcgttgacgcgcagaatctggtccccgacccgcagtccttccttctcagctagagagcctggttccaccagagacacgtagatgcccacgccgtgctccgagcccccacggatgctgaagcccaagccctcgtgggccttggcacgccgcaaactcaccaggcgcacctcccctggccccgcgctgtcggggccgccccaggcgggctgcctgtagggggtggtggcgggcaggtagaggccctcggccgtgtattggtcgaagagcagctggtcggagcgcgggatgaccagacgaagcatgggcagcaggcgccgcttgaccggactgtccagcagcacgcgcagggtgcgcaccaggtcgaagacgttgcggcgcgcgtggtaagcgttcaggcagtgggtgaactgctcccgctccgcctcgctcagcagcgcggtcagcgcttggtgcagctggcgcacgttggcagacagtaaccgcagccccgcgcccccgccgccgcccgccccggccgccgagcccagcgagccggtggaggacgagctcaccgacaggccgtccagcggcgcgttcatctccacgccgaggcccggccgggctctgagcgcgcggggtgtgggcggtgccgctgtcctcgcgggtactggcgcgacagctggatccccgggagcgcggagacgacggctggagcctgggtttggggagcacgggtacagtggctggatcctagggggtcgcggagaccgctgctagagtcccggaggcgcgaagacggcgggggtcgcgaacctggaatccgggggacgcggagacgtcggcgggttcctgagagacacaagagttggctgctggagcccggaggtggcggagactgctgctggagtccggggggcgcggggtcagcagctacattctggagggcacggagacgacgggtggctggagtttgggggcgccgcaaagctgacctgactgccccgtcacaccatg

SEQ ID NO: 588303 - DNA, 4001 bp, Homo sapiens
acactcctttaaaaagcatgattaaatccctggaagcctgttgtcatgaggttatatttctcaattaacaaatggcagaaaggacaaacactctcaggggctagggaatttattttttacattcaggcaggagtctcatttccaaaaaggttagggaccgcttatttggtccagtggccccattttccaagtggagaacaagaggtcctgagagggcaagtgacttgcttcaggatacacaacctggtccaaaaacagcagcgtcaagccagtgcactgtggatcacacaaacggcctcctcaggccacttaagagctaacaaaactgtttcagggaaaaacaaaaaacaaaaaaccacagaatggcagtagcaaaggccacctaattatgccaagcagagattttatctcttttaatgctcataagaatccacagccctattcacacattgtaaccacacatttgctcaagtatttgttactatcacctgcactagcttttaagcctcacaaaggcaagggccatgtctgtgcagaactacgttcccagtgcctgagagctatttgctctgtaagctatacattcctgttttaaagtattaaaaaaaaaaaaaaagcccagaaaggccaagtgattcatctaaggacacacagcatggagttactgaaaaagctgtgccactctgtccatactctgccccagactctctccaaaccacagccttaccttgacggcctccgcgtgggtcacccgggccagggatttgtcgttgacgcgcagaatctggtccccgacccgcagtccttccttctcagctagagagcctggttccaccagagacacgtagatgcccacgccgtgctccgagcccccacggatgctgaagcccaagccctcgtgggccttggcacgccgcaaactcaccaggcgcacctcccctggccccgcgctgtcggggccgccccaggcgggctgcctgtagggggtggtggcgggcaggtagaggccctcggccgtgtattggtcgaagagcagctggtcggagcgcgggatgaccagacgaagcatgggcagcaggcgccgcttgaccggactgtccagcagcacgcgcagggtgcgcaccaggtcgaagacgttgcggcgcgcgtggtaagcgttcaggcagtgggtgaactgctcccgctccgcctcgctcagcagcgcggtcagcgcttggtgcagctggcgcacgttggcagacagtaaccgcagccccgcgcccccgccgccgcccgccccggccgccgagcccagcgagccggtggaggacgagctcaccgacaggccgtccagcggcgcgttcatctccacgccgaggcccggccgggctctgagcgcgcggggtgtgggcggtgccgctgtcctcgcgggtactggcgcgacagctggatccccgggagcgcggagacgacggctggagcctgggtttggggagcacgggtacagtggctggatcctagggggtcgcggagaccgctgctagagtcccggaggcgcgaagacggcgggggtcgcgaacctggaatccgggggacgcggagacgtcggcgggttcctgagagacacaagagttggctgctggagcccggaggtggcggagactgctgctggagtccggggggcgcggggtcagcagctacattctggagggcacggagacgacgggtggctggagtttgggggcgccgcaaagctgacctgactgccccgtcacaccatgcccggggctcccccagccgggcgcccgttcctctagggctgggggaccccaaagtcagaagttggggcggagggcgctctagtcccagagcactccggggagtggcagccggtgaagcggcgcgggcgtccgacaaggggtgcggggcatgtccggggcagccccgggatgcagccgcccggggagcctccgcgcctctgcgccgcccggccgcaagcccggactttgcgaactgttgagccacccgggccgagtcttccagcgagttccgacgccgtctcgttgccagcccggcccgggccccgccccctcgtccctcctcctgcccgccccctccccacgggctcctcaggaaatgacgtcccgcccggtgcgcctggccgttgcctggagacggggtgaaacagtccagccccagggaagaaaggggtgaacgcggcggtaggggtgggaggagcccccgcgtcccctaccccgccggcagagccgggagcggggctcagaaacagcgctcttcggcggtcgcagcgagtgccgacaccaggatcgctttggagtaattagccggctagctaattcacaattcggggggaaatcgtcaagttttttgtttgtttgatttttgcttccaaaatactgggcacttcagtctcggttttcttccttacaatgtggcgctcccctcctgcacgcgccctgacatgacaaattccagggtttatgtggacggtcgttggccacctactgtgtgcgagagacgaatacaagcatagactgctgtctgccggagtcaactccgtggcagggatggatcaggctggaccccttcccagtctccattgcaagggaaaagccactttcagaaatattatataaagtgtacaccccacgctcgcgcacacacgtacaaatgagcgcatataaaactggtgaaatctgagtaaggtgggtggattttatcaatgtcaatgtcctggttgccatcgtgtcaacatcgggggaaactgggtgaagggtacatggcatgtctatgtattatttcttagaactgcatttggatctacaatctcaaaatagaaattaaaaatatacatatttgaagtggcttggagaaaaatctcttctatgctctcccatccctaggcaaaatgggaagatacacccaggtgtgccctggagtcggtcgtcacccacccaatcccccaaataagatttaagtaaaatcctgtgcttttattctaatggggagcttcatagtgctacacacacacacacacacatacacacacacaccctacctcacacacatcccttccaacctgagctgcctctcctaagctactcttctatgtatttttcgtaaaagtcttccagaatttccattgcagagccagctgacatctatccagggtagggcaagatggaggattacctggaggatttggtttgtggtggacccagaaggatagatcattcatttatttatttatttatttatttatttatttatttatttatttggtcgcttttcattcaacgtttttgaagcatctgctctgtgctgggtcatgtgctgggtgctggagacccaggggagaaagatcaaataaatagagttaaaaaccagtgtgatacctgttgtaatggcgagggagcccaggtttaggagaggagaatatggtaaggactttactgaagaggcgacacctgaatgaagaacctgtaaggaaaacggactttctcctctagacaatggggaagagtggaaaggttttcaacactgctgacttaatgcattgaggctaggaatggaagctgtgttttccctaaagatcttcaattctttacttccctaaaacagacataggttaaattaatgcccaataaacatatttaacagtgtgtctgaggaagattttttaaaaaatagccaattaggctacctttggccatctgtcttaaagctctaatcttagcagttaatggtgtctatccttattcctcctttgtaactgttgttgaagcctttcatgcaactagaccaagatgtttaaggaaaaaaaatcaatcttctccaccccaaaaatgtattaatgacatacctcaaaatgccaccaagcagggcttaattgtatgcagttcaggtttcctgctaatgtgtttcatgctcagctctcacttagtttgttttaattataattactgtgattggtttgataaatgcatcccaggagctaagat

SEQ ID NO: 588304 - DNA, 4001 bp, Homo sapiens
aaatgtatggcatttgtcacagggaaatgatgattttgcataaataaataggttaattttcaacatatcaactctggtctccaaattagaagaagaatgaacaatactttttattatcacagatacactctctttttgacaaaagcaccccagttgttttttaaaaggttttaatttttcagtaagatatgcagtatttaccactgaaataatacatttccaatacagtaaaagtcatgtgtggtgtataggatacgaacaacatacaataaataatttttttaaaaaaaaggtctcctccactcttctcatgaggaaactgctttgctgagaatgctgggttgttagacacaagctgaaaagtgacttccacaacttggcattcaatctgtatgttttctgagtcgcctcttaggaacaattctattaaagctgtaacaaagaaagattctggaggtttctacaataaccatgaacacatacttcccatctgcagggatcactgaagtgtgagcagcagttctgtgccttggtatagacagcaataccccctcctttctccttcctttccctgtgcttgcccgggactattaccaaattaaatgccatatgttaaatgggatgaaaatgtttccttgccactgtatcttttatttctataaaatgaactatgtgtcttcctgtccccagcccacaaagcctcctgcatttccagagatagataaaattgtggacaattttcaatttcagacaacaaccaagaagaaaaaaaagtatgattcccctacaaatttgttaaatttattctaattttatcctccccttttctctccctccccctccacctcctcaaatccaaatgtcactggaaatggagcacattgtgactgatttgaaatgtaaaatgctccagacttttagcgttacctggaaaatcttcctcaaaaataatatttttgaaaatttttagtttgaagcagaaaagttctgatatgctggactagcttctcacatctgaagggatccatttaaaagataacgagggcaaatatgtaaaataaattcctagggaaggcaagctgtgtctctgcacagtaggaagaaactgaattccaccacaatgttgtattccagcattcaatggatgtaacagatgattcacagagcttctagtttaaaagtctcccaaacccacatagaatgtgaattggagttttaaagaggaaaaacagcatttttcaagagagaaggagagaggcaggttcccacaacgccagaagccagcactgcttttcaggcgagcctgggagctgtcagcagtcattgtcatctgatgggaaaccacagtcttacaactaaggactggatgcagccccttgcccatcttctgctcttacaacaaggaagcggaaaggagcacatgtagatatcatgaaacacattctttaagaagacaaacaaaagatttagacaggtctcggccaagcgcatgaagtgaaggagtcgaggatgaaagcatgccgaaccaaacggcagtccctagcgtgcttggcttttttctcactttagaccacatcttcttactcttttcctaaatccattaaacttccacattaacagaaacacctgcacagtagaattttccaaaacggtaaatcctgttttggaaggaatccctaataatacgtaagatacagatttttaaaaaagaacatgttttagacaaggacagcatgatgctcaccctccctaacaaggatacagaaatgcagatttcttcccctcttaccaactccagtacacgctgactcgccctccctgagagcggtaatccctttccaggggctggcaaacaatcatgccaaagccgcccgtgccccaatgcggacgcagcgaagccacggcagaagggggaaatcggttacctggggaagaacacaactccgctcagagcttcttcagagctccactcgcgcaggacagggcagcgcagggtgtgtggatgcggctcctcccggaggcaggcgcagcgcactccctcccgccgccgtgacgatgctgtcagctgctcgcccgccgtgcgccctgcaccgcccaccggccgtgctccctgcgcccagcgccctcgcgctccacccgctcgcagcccctgcacctgcgctggcctgagccgctccggcctggcactgtcaccgccgctgcacgctcctcctactctcttcaatctctgccttctcagatgtgccaactgctgcagaggctgctgctcctgcttaaatggcgcctgttcgcctccaaagagcttttaggtgccacctactgcatgctcttggaatagatggcgaggactggaattttctgataatttaatgaattaaaataattccattgaaagggaaccagattcttttgttcgcattgcgaactataatcgctactaaccatatagactttttttttccatttccagattttaacttttaaaaaccgactcatttaaaggcagacgaaatgccctgccccataccatagccaaccacacagtgtagattaatatattctaatttaataggatcctatgacaacaccgccattggcaagcttggattagaattgctttttcactgagtggtttcacattagcatttcaagcaaatgaccacgtttatttcctgacattgataaacaattttgtcaaagacgcgttgattaaaaaacaggtgaatcagcaagaaaaaatattaatggctaacaattctgtgcaggcatttttaaaagtgcttgagcataacattgatccatgttaagtttaaactacagactgaaggaagatttcttctcttggttatattactcattcttttgtaataccaaatatgctaaaagacttgagcaaaattaatattctgtagttctttacatttgatttttgttgtagaatcctatttatctgttttaatcccgtcttcactttctaaataattaaaacatgttaacctttgaagttcatttccatagtaaaattctgccctgctattcacaggaaatatgctttttaaaaatcatacttaaaaactacgcattttacaacttatagtcaagaaaacttattttattccccagttcatcctaattctggccttgatcctacagccattggaatataaaaataaaaatacactctttttactaaagtcatttaaggctacttcaacaaacctgcccctacactaatgatgtctaaaagcagagtggtcaccctgtcctccacagtctcctcttcattgcaaaggaatatatggccactcagaaacccatcccagaggaggctccaaatatgatgacagtggattctgagcactgcctgatgcagtttctgggtcctgaaacaaccttccagttttataagtcaggatgttgttttccatgacaaccaaaatgtaggttatcaggttaaatgacaaaatggaatttaagaactaaacaaaggagggtaaaaagattaaataagcaaaaatccagtgctagtatggaagcagggagagcaaatcaggagctgataaagagagccagttctatgctgaatatcccacaatgcagaagaagcctgccttttgccacatgccatcattatttgttctgagaatgtgaagcagaggcccaaaggcctcatttaaacaaggagcaactcacttaatatgatgtctctggcccctttggcactccccacaatccctagactttcatcagccagaaggagcagattgctcccaaattcctcttttaacttccccttaacttacatccttctaagagcctgacccatttgcttctaggctaggggctcctgacatctgcctgcacattagaatcagcaggggagctataaatacattttaaaacaaggtccaatttccagtccagctcatgccacaactggcacaggacctccgtggatgggatgcaaacatccatatatttcaacgtgtttatgtgaagtt

SEQ ID NO: 588305 - DNA, 4001 bp, Homo sapiens
aaataacctgtcttaaaaagatgaaacaacttttaactggaaataacgtggattactgccttccaaaaatccttttagaatactaaagacattaactttccgttaaaatgttaaattaccagcctacttacgaaccttcaaaaaaacaaaaccacagacggaccaaatctcaaaccctggcgcgcttttttccacctgcgcatattctttaaaattcttaagcgtgctttaaaacatcttcaaagtaatttgcactttaatcttcggtcgagaatgcaaattttaaaatgctaataaaatttccagagctctcaaaatggctgaggcgctcagcctccatccacggagggcgaagacaaaaagcgccccaggcgcgcagggaaaccgcgcaacgctgtgtccattgcagcgacttttccagaaaaacaaacaaggctttccgacaggttacccgcgtaagcagcagccggccgagcctccctttcccgctaacctagcagccagcgctgccgccctccaagatcctttctaatttaagtgcaactcagcaaggagggagagtcagagattctggggacgctcgaggaaatcgaaccccgaaaccctctgctcccaaggcgcggtcggagatttttgggaccccaaagcggagagaattccttaattctctgctagaagagcggggctagagatccctgggattcccttggagtcgaaccctcccctctagcctcacctcggagggcgggagcgaagatcctgaagactcctctagcgcaataaaccctcccaattctgttggaacgcgggctctgggatcgcggggaagcccagaggggcgaaccccggaattccctgccctgagagcgggatcagggatctcagggacccgggagcagagggaacccccgcaactccgccgaaacacagggtgagagatcgtggggaaccccgagccgagcgaagcccgcaactctgcccggcgggcgggatcagacgcgtctccggcgctcccagaccggcgatgtagcgtggccgggagcccaggaccccaagcgccgccgctgtcggcaagtaccgccgcatctctccacaacccaggacccgcatggcaacggccatgctggggggacttcattcaagaaactcgggccccgccgggagcggtggcccacgcctgtaatcccagcactttgggaggccgaggcgggtggatcacctgaggtcaggagctcgagaccggcctgaccaatatggtgaaacccccgtctctactaaaaatacaaaaattagccgggcatggtggtgtgcgcctgtagtcccagctacttgggaggctgaggcaggagaattgcttgaacccgggaagcggaggttgcagtgagccaagatcgcgccactacactgcagcctgggcaaccgagcgagactccatctaaaaaaaaaaaaaaaaaaaaaaactaaggctgaacccgggctcccgcacgcccgcacccacctgcgcggccatcacgcgctgcctctcggcgatcaggttgcacttcttgcactggcagtcgcgccacatgcagaagcgcttgtggcccttgagcggcgaggcgtagccgtggttcctgcagcgtgcgcacttgggcagccgcggggacttcttgctcccggcacccaggtccgacgccccggagccggagccgcctcctctgctgctgcccccggcgctcgagccgctggccgcccccactagcgccccagacgctttgccaaagcccccggctctgccctgcggcggtaccccgggggcgtgaggggcttccgacggtgtagagggcttgctgaatgcctcgtcgttgggcatggtgcccctaggagaagtgcgagcactctggccccctctctcgcctggagactgctgcgagggatgaacccgacggacagcgacgctccggaggaggaggcgcaggagacgtgtgcgctgcagccggaggcgcagctggagtggcgaggtctgggcacgccacgcccggagtggtggggggttgtgccttttcttttggcgcgcgcgcgactcagaactttcggatacttttcagaacattcccgggactgcctgggagggagcgtggccacgcccaccgccccccgactccagccaccgctctccagctgcttgcaaacttgcaccggctgcaagcatccagggctttgctgcagggtccctgcaagcgcaccgagagatacagagcggcctgggaatcgcgtggcacccctcgccccgctctcggaggcgccaagacccggttgccaaagcacggtgcaccgaggaagctgggctccccaggtcaagaccagagccgtgcttgcatgcttagaggaggtgcaaaccaccctatggggtcttctagctccctttcccccagagagacgcaccagatttgatagagccgaccttggcagcagccaagtcagaaaaaaattttttttctcgcttaagagaattaaatatgaggtggaaggcctgagaaatttatagggtaaatcagagttgccctatatacggcaaagaagatcctcagtgttggggcacaagcacttcaaaaatctcaaaggttggaactttctgttctccgtttatcccttcctgcacctgtcttcatttgctcacaacacttctacctccttcgctccaaataactttacgatctactgttgcagcccgtgttcccgttcacttcaggtgcatatagcttcttgtctgtgaggctgtttaaacttagactctgcaggcacgggaaactcaaacttaaaaagaaacatatgtattaaaaaaaactgaggttgtggggggtggttacacagatgtagaaatgtatcaaaactcattctacacttcatatcttgcattttacagtatgtcattatacctctacacacacacacacacacacacacacacacacacacacacacacccctggctcgatcatcttacagcctgtcccagggttctcatcctgaactcccgccccagccatgcctgtgtcctctctgcacctgcacaacaaatgtatccctaaggcctgctgagcagttcttcctacacacccacgtgcccccctaaggccagcccttcacctcaagtctgaatctctgcggtagctcccagctgctatctccatgtcttagtcttccggtatattctatacacacagcagggggccccagcagtactttgctattgttttccatgttaacaagttaaagaccccggagtggctcttaatgcactttgaatgctccttattttccaccagcactggtactcaccttcaggatcctgggccgcctccagacctaggggattatttctccaaagaggcatggtcaccctgttcaacttctcatcaaaatggttgtactgtggccacctctttcagcagtttggtgttttcagcactgagttctgaaatcctcgaatctgcctttggagctctaattctgaggcctctctcacaggccctttccctcagtctgaaatttctccattagtattctctgtctgaaaattacttccaaaagaagcttctagctttacacagcacctcataccctacctgtgaaaccagtgaagctctactcctgacaggagctaggatgcaacaatctattccatcctggaaacttataaatgataaccacttaaatcttccattaaaacaatcttccattaaaacacgcatgtcaattgctgttatccaatatttatgttctttttccagatttatattttatttatttaatttttagagatagagtcttgctctgttgcctgggctagagtgcagtggcacagtcatagctcactgtagcctccagtttctgggctaaagggatcctcctgcctcagccttccaagtagctgggactagaagcatgtgctaccacgccaaatttttttttttttttgaaatggagtctcgcactgtcacccaggctggagtgcagtg

SEQ ID NO: 588306 - DNA, 4001 bp, Homo sapiens
agacaaaaacatttcccaagttccccagagatgcctgctttttccctcccgaccctgctcgccagtgcaagcagaaaagcgttcttaccatccttcctagggagtgccaggcaccgcaaggccctgggcgcggggggtgtggacggccgccccgctcccctccaactcccccacctccactgtggcctgagacgcccgggccgggcgggtacgcacctcggtggcctgctgcctccggagcgccacctgggcggccatgacgcgctgccgctccaccaccagcaggcagttggcgcactggcagtcgcgccagcgacagaagcgcttgtggcccttcaggcaggacaccacgccgtggttgcggcagcgcgcgcacttgggcgtgcggctcagcttgcgcggctccgcgccgccgcccgcgggagtgcagcgctctcggggaccggtgccggcgggtgaggcctgaggcgcgagcggcggcctcggctgcggtcccccccgctgctccggctggccgggcatcccgggggacgcgcctgcctcctcgccgtcgccctcttcttccgcgtcttcgtccaccccgtcgtcatcttcgtcgtcctcgcagtccccgtccgccggcggcgggctgggcccggggggcgtggaccgcggcgccccgcagacgtcctcttccagctccaggctctcgacatcgatctcccagtccccggccgcggagccagcctgcgggtcggccatggcgctcggggcttcgctggggcctgagcctggcggccctcactctggggaaacacaaagaaatccaaagacccaccggccgccgtcagggaccatccctgagcctccggcccaaagctcctggtctgcccgcctccggccgcttgagtcatcctgttctcattacatgtccctcacttccaggccacacgtgcctttcctgtatctccagggcccccagggatccacaacccaacaaaggttttattttattaattctaagtgctctgtgagtacctgacctttaaccgtggccctctctggctttacacgggctttccggacaagtccctgggtaactcacttatcacacacacacaaaatattgtgtccaaataggcagccccaggccacttgtcggatttccccatactcaactagtatggccatgatgcatataaaactatccgtggaagaacagttttcctttgattacaagtggcccttcagactcactgaagtaccactctatgcttcccaaatgcctctcatcagcctacaccaccacaaggacccctccttgggcttgaagaggtcctctcacccccctccccaaaatactcaactgaaaaccaaaattttgttgtcattagcgtcccataagggcaaagagcacaatacagacgcccgtccagccttaatagtacctgaggtgcacagggctgagccgcgtgggctctctgtacttaggccttggtttatatatttaaggtaaggcatccaagtcacacagaaaaggtgaaagatgattcacgccctttgccctccctgacaccccgagcggcatcacagcactcaccaaaactttgaggcccgggctggtagcccagttaaaagatatccagctttaggatctggcgctagggctgctggctgtgcatgcaaacagaaatcggggtcgctaccctcaaacacgagatcgggagctgatagctggaggcccggaacgaacccactggatggtggagggggagggagaaggtaggtggagggaaggagggaggaagccagtcaagtcctcagcgacctagcccagcacatcccgaactctgcaaagttctgctcggtcttctgcagcctcgggcgcctcaccttgctgaggccgctttcggcttcctctgacccaggctgggcgggaaaggtcgggccgcccccgcctggctcagatcgctggctcacccggcgggcgcgcgcagttgcattcagcgcagcgccactggcttcagtctgcagactgcgctccccttcctagtactgtccgctcaggccccggagctttacgtcctctgattggccggttgtcaggcggtgtgaatactgattggccgaggcacgctggcagggagccctccgcctcccgcggtctacactcttctctctgaagcgctccgccagagtccgcctaccgggccttcggtgcagccggctcgcctgtccagaatctaaacccgaggtatgacggtgcctgcaagagagaagtcaccatttatctcgcggactgggaaacaagcagagatacattcttaggaatgcgttgtccacaagagaaggtaataaacgacgaggaagagatcagaaagaccagtattggcctctatcagcatcacaagcatttctgcgactcaatcaatcattaatccaaactgggcgtaaaaatgatgcctctctttcggggcgtacagcgacatccttctttctcctgcaagagtacatcaatggttacctggcaccgaaactcctagttagcatacaaatagcctgttgatatttctgtgtctagtgccacctattctcgaagtgccaaatagctcctcattaaccttcaccgagcccgtgtggcaggtggccaagtcgactacaagtcacttacatttttctgttatatcagttgctattacagttaatgtagggaagatcagaaatgcatgctattaagagaattaggtaaatccattcacactaagcatgcatttaaacaaagttatttttaaaaagatgactactttttagtgtgcgtagttgtatttatagactttctaacgactccctcaaaaaatcctttacaaaatgtttaacgataaaaaattttcaacatattaaaagaaggaattagtcttctaattcaacgctgcattctatttcttgaactcaattaaaaataatatgggcgcttttctaactgcatctgtaaataatcaagacctctcgagtaggatctgtttaggagactacaaaattgggtatcattgcactgagtacatagtaggcccgcaacaaatatttgttgaagggtgggaattcctgacgtaatcccaacgttacttttgtccgagtttgtcagaatgttaaaagttaacctggatcagagaagtgggaacaaaggcagcttaggaactaccgcgaccagccagaagcactattctcaaaccttcagtgatgttgtaaagttcctccccggtgaccaggcactgggattcccatttgtacgggtgcttcttcccagagcctcttgcgaagcccaatgaaggaagtagagaaacagtcctgcttattcccatcggcttttcggtagctctggcgactcagagggtgacttgggagcggtgcgcgctccgacaagcgacagggaggtcatacagacttttacttcctctcccttgacaccaccttgtaacgccaggttctttttgcacattttttatacccagtcatcaaagcacatttccttcacctgcactggagcgtttaaattcttgacagcaacagaaatatgttcctatccccgtttttccaacgacgaaactgaggttcagagaggagccctggatcacccagtagtctcgggaagagcaatggaccttgtcgacctctgttctgaagtcccagaaattttgcagagcccctcactcccagcaagaaagactcgccatgggtttgcttttttaaattttattcccctgcaccccttctgatgtgagtacctgggactactcccagcagccctcctgtaacagggcccagcacgtttttatcaaatcactctgttttttcagcgtcttcccctgctagctacatttcagcctttgcaaacaggcttctgccccgcgacgtgtatgcaaactacaaacccccaccaccgctggccgtgtgtgcatgcggttggcaggctgggcttttattttatttattgcttttaaggttaggggtggtggtaaggagat

SEQ ID NO: 588307 - DNA, 4001 bp, Homo sapiens
acatttcccaagttccccagagatgcctgctttttccctcccgaccctgctcgccagtgcaagcagaaaagcgttcttaccatccttcctagggagtgccaggcaccgcaaggccctgggcgcggggggtgtggacggccgccccgctcccctccaactcccccacctccactgtggcctgagacgcccgggccgggcgggtacgcacctcggtggcctgctgcctccggagcgccacctgggcggccatgacgcgctgccgctccaccaccagcaggcagttggcgcactggcagtcgcgccagcgacagaagcgcttgtggcccttcaggcaggacaccacgccgtggttgcggcagcgcgcgcacttgggcgtgcggctcagcttgcgcggctccgcgccgccgcccgcgggagtgcagcgctctcggggaccggtgccggcgggtgaggcctgaggcgcgagcggcggcctcggctgcggtcccccccgctgctccggctggccgggcatcccgggggacgcgcctgcctcctcgccgtcgccctcttcttccgcgtcttcgtccaccccgtcgtcatcttcgtcgtcctcgcagtccccgtccgccggcggcgggctgggcccggggggcgtggaccgcggcgccccgcagacgtcctcttccagctccaggctctcgacatcgatctcccagtccccggccgcggagccagcctgcgggtcggccatggcgctcggggcttcgctggggcctgagcctggcggccctcactctggggaaacacaaagaaatccaaagacccaccggccgccgtcagggaccatccctgagcctccggcccaaagctcctggtctgcccgcctccggccgcttgagtcatcctgttctcattacatgtccctcacttccaggccacacgtgcctttcctgtatctccagggcccccagggatccacaacccaacaaaggttttattttattaattctaagtgctctgtgagtacctgacctttaaccgtggccctctctggctttacacgggctttccggacaagtccctgggtaactcacttatcacacacacacaaaatattgtgtccaaataggcagccccaggccacttgtcggatttccccatactcaactagtatggccatgatgcatataaaactatccgtggaagaacagttttcctttgattacaagtggcccttcagactcactgaagtaccactctatgcttcccaaatgcctctcatcagcctacaccaccacaaggacccctccttgggcttgaagaggtcctctcacccccctccccaaaatactcaactgaaaaccaaaattttgttgtcattagcgtcccataagggcaaagagcacaatacagacgcccgtccagccttaatagtacctgaggtgcacagggctgagccgcgtgggctctctgtacttaggccttggtttatatatttaaggtaaggcatccaagtcacacagaaaaggtgaaagatgattcacgccctttgccctccctgacaccccgagcggcatcacagcactcaccaaaactttgaggcccgggctggtagcccagttaaaagatatccagctttaggatctggcgctagggctgctggctgtgcatgcaaacagaaatcggggtcgctaccctcaaacacgagatcgggagctgatagctggaggcccggaacgaacccactggatggtggagggggagggagaaggtaggtggagggaaggagggaggaagccagtcaagtcctcagcgacctagcccagcacatcccgaactctgcaaagttctgctcggtcttctgcagcctcgggcgcctcaccttgctgaggccgctttcggcttcctctgacccaggctgggcgggaaaggtcgggccgcccccgcctggctcagatcgctggctcacccggcgggcgcgcgcagttgcattcagcgcagcgccactggcttcagtctgcagactgcgctccccttcctagtactgtccgctcaggccccggagctttacgtcctctgattggccggttgtcaggcggtgtgaatactgattggccgaggcacgctggcagggagccctccgcctcccgcggtctacactcttctctctgaagcgctccgccagagtccgcctaccgggccttcggtgcagccggctcgcctgtccagaatctaaacccgaggtatgacggtgcctgcaagagagaagtcaccatttatctcgcggactgggaaacaagcagagatacattcttaggaatgcgttgtccacaagagaaggtaataaacgacgaggaagagatcagaaagaccagtattggcctctatcagcatcacaagcatttctgcgactcaatcaatcattaatccaaactgggcgtaaaaatgatgcctctctttcggggcgtacagcgacatccttctttctcctgcaagagtacatcaatggttacctggcaccgaaactcctagttagcatacaaatagcctgttgatatttctgtgtctagtgccacctattctcgaagtgccaaatagctcctcattaaccttcaccgagcccgtgtggcaggtggccaagtcgactacaagtcacttacatttttctgttatatcagttgctattacagttaatgtagggaagatcagaaatgcatgctattaagagaattaggtaaatccattcacactaagcatgcatttaaacaaagttatttttaaaaagatgactactttttagtgtgcgtagttgtatttatagactttctaacgactccctcaaaaaatcctttacaaaatgtttaacgataaaaaattttcaacatattaaaagaaggaattagtcttctaattcaacgctgcattctatttcttgaactcaattaaaaataatatgggcgcttttctaactgcatctgtaaataatcaagacctctcgagtaggatctgtttaggagactacaaaattgggtatcattgcactgagtacatagtaggcccgcaacaaatatttgttgaagggtgggaattcctgacgtaatcccaacgttacttttgtccgagtttgtcagaatgttaaaagttaacctggatcagagaagtgggaacaaaggcagcttaggaactaccgcgaccagccagaagcactattctcaaaccttcagtgatgttgtaaagttcctccccggtgaccaggcactgggattcccatttgtacgggtgcttcttcccagagcctcttgcgaagcccaatgaaggaagtagagaaacagtcctgcttattcccatcggcttttcggtagctctggcgactcagagggtgacttgggagcggtgcgcgctccgacaagcgacagggaggtcatacagacttttacttcctctcccttgacaccaccttgtaacgccaggttctttttgcacattttttatacccagtcatcaaagcacatttccttcacctgcactggagcgtttaaattcttgacagcaacagaaatatgttcctatccccgtttttccaacgacgaaactgaggttcagagaggagccctggatcacccagtagtctcgggaagagcaatggaccttgtcgacctctgttctgaagtcccagaaattttgcagagcccctcactcccagcaagaaagactcgccatgggtttgcttttttaaattttattcccctgcaccccttctgatgtgagtacctgggactactcccagcagccctcctgtaacagggcccagcacgtttttatcaaatcactctgttttttcagcgtcttcccctgctagctacatttcagcctttgcaaacaggcttctgccccgcgacgtgtatgcaaactacaaacccccaccaccgctggccgtgtgtgcatgcggttggcaggctgggcttttattttatttattgcttttaaggttaggggtggtggtaaggagatgaaatcat

SEQ ID NO: 588308 - DNA, 4001 bp, Homo sapiens
gtgttctagatatctcaaacgtccaggtgacagctgaagcaccgagcgcatgcgtgctgcgtggttctttttctccatcatcaccagtacagcagtgacgagcctggagctgcacgccgtgctgtggatcaaccactctccccccaagcccccgccctcaacaccacgaaaatgcactttaaaatgcaaaaaaataaaaacattgattttctcgcgatgttccaaatgggcctaaacactttcaaggcctctctgcctgctttttaagacaaaaacatttcccaagttccccagagatgcctgctttttccctcccgaccctgctcgccagtgcaagcagaaaagcgttcttaccatccttcctagggagtgccaggcaccgcaaggccctgggcgcggggggtgtggacggccgccccgctcccctccaactcccccacctccactgtggcctgagacgcccgggccgggcgggtacgcacctcggtggcctgctgcctccggagcgccacctgggcggccatgacgcgctgccgctccaccaccagcaggcagttggcgcactggcagtcgcgccagcgacagaagcgcttgtggcccttcaggcaggacaccacgccgtggttgcggcagcgcgcgcacttgggcgtgcggctcagcttgcgcggctccgcgccgccgcccgcgggagtgcagcgctctcggggaccggtgccggcgggtgaggcctgaggcgcgagcggcggcctcggctgcggtcccccccgctgctccggctggccgggcatcccgggggacgcgcctgcctcctcgccgtcgccctcttcttccgcgtcttcgtccaccccgtcgtcatcttcgtcgtcctcgcagtccccgtccgccggcggcgggctgggcccggggggcgtggaccgcggcgccccgcagacgtcctcttccagctccaggctctcgacatcgatctcccagtccccggccgcggagccagcctgcgggtcggccatggcgctcggggcttcgctggggcctgagcctggcggccctcactctggggaaacacaaagaaatccaaagacccaccggccgccgtcagggaccatccctgagcctccggcccaaagctcctggtctgcccgcctccggccgcttgagtcatcctgttctcattacatgtccctcacttccaggccacacgtgcctttcctgtatctccagggcccccagggatccacaacccaacaaaggttttattttattaattctaagtgctctgtgagtacctgacctttaaccgtggccctctctggctttacacgggctttccggacaagtccctgggtaactcacttatcacacacacacaaaatattgtgtccaaataggcagccccaggccacttgtcggatttccccatactcaactagtatggccatgatgcatataaaactatccgtggaagaacagttttcctttgattacaagtggcccttcagactcactgaagtaccactctatgcttcccaaatgcctctcatcagcctacaccaccacaaggacccctccttgggcttgaagaggtcctctcacccccctccccaaaatactcaactgaaaaccaaaattttgttgtcattagcgtcccataagggcaaagagcacaatacagacgcccgtccagccttaatagtacctgaggtgcacagggctgagccgcgtgggctctctgtacttaggccttggtttatatatttaaggtaaggcatccaagtcacacagaaaaggtgaaagatgattcacgccctttgccctccctgacaccccgagcggcatcacagcactcaccaaaactttgaggcccgggctggtagcccagttaaaagatatccagctttaggatctggcgctagggctgctggctgtgcatgcaaacagaaatcggggtcgctaccctcaaacacgagatcgggagctgatagctggaggcccggaacgaacccactggatggtggagggggagggagaaggtaggtggagggaaggagggaggaagccagtcaagtcctcagcgacctagcccagcacatcccgaactctgcaaagttctgctcggtcttctgcagcctcgggcgcctcaccttgctgaggccgctttcggcttcctctgacccaggctgggcgggaaaggtcgggccgcccccgcctggctcagatcgctggctcacccggcgggcgcgcgcagttgcattcagcgcagcgccactggcttcagtctgcagactgcgctccccttcctagtactgtccgctcaggccccggagctttacgtcctctgattggccggttgtcaggcggtgtgaatactgattggccgaggcacgctggcagggagccctccgcctcccgcggtctacactcttctctctgaagcgctccgccagagtccgcctaccgggccttcggtgcagccggctcgcctgtccagaatctaaacccgaggtatgacggtgcctgcaagagagaagtcaccatttatctcgcggactgggaaacaagcagagatacattcttaggaatgcgttgtccacaagagaaggtaataaacgacgaggaagagatcagaaagaccagtattggcctctatcagcatcacaagcatttctgcgactcaatcaatcattaatccaaactgggcgtaaaaatgatgcctctctttcggggcgtacagcgacatccttctttctcctgcaagagtacatcaatggttacctggcaccgaaactcctagttagcatacaaatagcctgttgatatttctgtgtctagtgccacctattctcgaagtgccaaatagctcctcattaaccttcaccgagcccgtgtggcaggtggccaagtcgactacaagtcacttacatttttctgttatatcagttgctattacagttaatgtagggaagatcagaaatgcatgctattaagagaattaggtaaatccattcacactaagcatgcatttaaacaaagttatttttaaaaagatgactactttttagtgtgcgtagttgtatttatagactttctaacgactccctcaaaaaatcctttacaaaatgtttaacgataaaaaattttcaacatattaaaagaaggaattagtcttctaattcaacgctgcattctatttcttgaactcaattaaaaataatatgggcgcttttctaactgcatctgtaaataatcaagacctctcgagtaggatctgtttaggagactacaaaattgggtatcattgcactgagtacatagtaggcccgcaacaaatatttgttgaagggtgggaattcctgacgtaatcccaacgttacttttgtccgagtttgtcagaatgttaaaagttaacctggatcagagaagtgggaacaaaggcagcttaggaactaccgcgaccagccagaagcactattctcaaaccttcagtgatgttgtaaagttcctccccggtgaccaggcactgggattcccatttgtacgggtgcttcttcccagagcctcttgcgaagcccaatgaaggaagtagagaaacagtcctgcttattcccatcggcttttcggtagctctggcgactcagagggtgacttgggagcggtgcgcgctccgacaagcgacagggaggtcatacagacttttacttcctctcccttgacaccaccttgtaacgccaggttctttttgcacattttttatacccagtcatcaaagcacatttccttcacctgcactggagcgtttaaattcttgacagcaacagaaatatgttcctatccccgtttttccaacgacgaaactgaggttcagagaggagccctggatcacccagtagtctcgggaagagcaatggaccttgtcgacctctgttctgaagtcccagaaattttgcagagcccctcactcccagcaagaaagactcgccatgggtttgcttttttaaattttattc

SEQ ID NO: 588309 - DNA, 4001 bp, Homo sapiens
tgttatttgttcaaacctatgggagaaaaataataaaacctttttctcctccctcctcttcgtctgtgacaaatccataaatataaaaagatgagacagacaaaagagagacaactggcgatcatttctgagaaacgtttatatgctaacttggattaaatatccacaaaatccaagttcggcaaactctcttcaggctttaaaattcccagctctactgtcacacaggctgttctcagagcttcaggcctggaaagcatggcggaaagacagggcagcagaactccacctgccagtcacccgttgactcaccatgaaacaggtgagtccgcctcacttcctcagctccacaggatccagacaaagcagtcctgggctcctgaaagcctttctccgaagctaggggtaccgtctttagggagttggcaggtcagtgtaggtaccagttttgccacagttctacttacaggagggctctggaccttcccactcctaattccagcatgcccccttccgggagaaggtgggctgtgttcctttgcacatttgccccagttaaggagaaacaccaaacacatatccactgaattccaagagccatcaaaagagctcttgagctgggcagaaccgcaagctagaaattccccaggaagagagagactaagagactcaactcaggcctgccaagctcaggaggcctggatggaaacggatgggtggtgggggatcagattttttgtattcctttaaaccacgaagacagctgagggcagcctggggaacagtgttaaaggatctaggaggttctgcaaaggagtgaattctgggcgcatcagattcttttcccgctatcagctcacaagcctttccggacccttttactatcattgctaaatggaacttatttcaccagttacaagagtctggaggccacggagcaaagctagaaaggccagggttctgagagttggatacttgtcctcactcaaattttcctgggccctgggcagggccgggccggccgagaagcacagccagctcgactcagccgagtgttggccttggctccttccctacacctacctacccattccaacccccaaatggcaaggacctctaaagcctgcagccaggaaaatccgaccccaccgtagtgagtgtgcgcacgtgggttttaattttgtcctgtctcaactccgttgtctccctgctcaatctgacacgttccgaacccttcaacctgggaaggcacctggcgatactgacgcacagtcccgtcgtttggctgcccggaggcgccttccctgcgggcgcgagtgccactcgcgctgggtccagactcagccggcttctcccgggagaggaagccccggcctggcggagagtaggaaggaaagccccgacaggcccacgtcccaaaactttgcctccagtcctcccaagtggagctgcagctggcactccgaagttgcccccgcgcccggccaaactcccgcacctcagacgctcttacctggcttggcgagctgcgcctgcagagccccgggctgcggctcggcagtccaacgcagcgcggcggccgcggccaactcggcagcagggcgcggcggctgcggctgcgacggctgagaggctggcggcggctgcggggcggcgacggcgtcccccggcggcgggggccctggcagagcgcgcagcgagtcggggatgaggctctccaagctctcgttggcctgctgccggcgcagcgccacctgcgcagccatgacccgctgccgctcgatgatgaggatgcacttctcgcaggtgcagtccttgaagcggcagtaacgcttgtggcccttgagccaggacaggacgccatggttgcggcagcgcgcgcacttgggcgtgcgctgcaggggcgcccgtggcggctgcgacaccgggccgcccatgtacaggtagggggagccgtagccgttcatgccccgggctcccgaatgagttggcagcctggctgcgggagagggccagggagcgctggacggcggggctgcgaggcccgctcaggggcggcctccgggcgacgcggcccttggtcccgcagccccggtggtcgtgtgtgctccggggcggccggaggtgccgcagtcgtctctccagctcccttcgcgctcacagctcggcctcccagctcacgcccagccaacgccgacgcgggcctctgccttgggcgcgcagccgggtcggcacgtcctccttcgcggaggcgctgcggcggctgcaaggagccggcgacagctctgattaaggtctgagccagctcttctgcagctccctcgtgagccggccggacccaacacctccgccgccctcccccaacccctcctccttcccaccgccacccccgcccctggggtccctgtctccttgcactccccgccccacgccttcctcctcctttgcgcccctcgggtgcctgcacttcaccttccttgccacctgcagccaggccactctcgcgggggcgctcgcggccccctcctccaagccctctccgctaccccagcccgcggctggagactgcggcgctccagaacgcggcggtgctcgcggggcggagaaggggaggaccagcgggagtgagggtgggggtgcctgtaagcgagtgaggtggccgctccgcttctctctcttctcctccctccagtccagatctggccgcgtttttccgagcccaaggccgcttttatcccgacatttggccgcagaagctcagctccgggagaactcgaacctacgggagtgttgcggttgcaccccggacctgggtggagtttaggataggggagtgaagtgatgttggtttaggaaagttaggctcttttcgtaatttccttttagaacgtatttttttctcttttgttgctttagaagaaaatggttttggagatctgccggcccaaggatgacaagccattttgcaggcgaattttacttttctaccctcctgtccatgttttaatataaaacagtatcctgaaaggtcagggacgtacgtgctcctgtaaaggatttgttaagcgccgggtataaactttcaaggggcagacacagaagccacattggcgcccccaaagttaccgatatcctcttccctcgctcccagcagctactggaagcaaacggaggtcttgcgccagccactcagttcaaatccccacggattctgtgattcagttatggatatgggatggggccactttttcacctccttaacccatagaccccagtcatagatgtcttgggggagagggtccttcacaagatgacagcagaaaactttgtttagattatttgcgtgttcccattctcccaggagtagcgggcttggcctagtgcagactatcgctatatatgcacaaagaaggccctccaccctcgcacctccccactgcccatcagcaaacaagcaaaaaccaaaaaacaaacaaacaaacaaaacaagtggatacactgcagggcagcacaatagctctatgcgaagcggggcagttccagagccttcggtggatgcgcttctgagagcgtgcaccaagcccatctcctggtggggaatcaaatgctagatgagagcgtaggcaagtccgctgcaatgtccgacccctcatgggcacagaggcccttgtcccctcggggaggccgcttttctctgtactgccctggaagtaagcaagcaacctgaaaactttcctctggtgtttgccatgaattcaagggaagcacctccaggcgttctagcagccaaccctctgcccagaaggctgatttgcggagaggagggttgaaaaccgaaccccagttgtgtgtttcccttgaagcccttagctgttcccgtttcatacgcgtccgggaggtggggatcgcgggacactgacctggtagagtgtggacaagaagctctagcattcgagtgctaaccctgggaggccatcctccaaagccgcgtggggtaggga

SEQ ID NO: 588310 - DNA, 4001 bp, Homo sapiens
acatgcaaacacaaaattcactctgaactgaatgcctcatttcaattcacagaatttttcgaatgtactgtgtgagtagaacttcaagcagccattgagcgaaaaaatctgttgagatctgcaattttcataattcaaggaaggtttctaattaatagtttactgtatagctatcatacaatttcatataatacagctttataagttttgtataagtttttgacttatacaaaaaaaaaatcacaatgatattttcactgcttagtaggccctgtggagggctatgaagttcactaaaatatatctcctaacgcaggaaatgaaggcaactgactcgcagtcaaaaaataagagaaaaataatgaaaactccttggataaaaaacctctaatattgaactttgaaattcttacctatggttttacaaattacattttgcgaaaacaatttagagtgaagaaacaaagaaagacgatggtttggtagatttcagtctcttccccacatcaagcttgcaacaaatgtttgccccaacatgtagtaaagaactgcatccccaactatcagagtttcccacgcaaaatcagctctggttttacagctgaaaacagtccagagcagggaggatcacctgagcctggggaggttgaggctgcagtgagctgtaatggcgccactgcactccagcctgggcaacagagtgagatcctgtctggaaagagtacagagcagactcaaacacagcacctcttacgaagcttttcgctcaatgcctgcttgaagttctactcacacagtgaaagtcaaatcaacttccgagtaaataactctactcctagggtgaattgctcatttgttaccacccatgcttcattttttcattatctcatcctatcacctgagggaacaacagtaaattcctccaaagtgaaggcgatggggtctctcacactctcattaatgtccatattgctgagcagttccccaaaacttaaagtgtttcttttaaacaactattcctgcccgcctatggacacggtggcttgtttcagagtttctttccagaacaaccattccttgagcaaagagtaaatcaaagaccaactcaccttgtttttcctcaggataatcttgctggaaaacttcgaaagcgggggtcgcggaaccactggcctgtctcaaggcacccagtcccagcgcagcccccgccgcagggccgcccgtggactgtggattctcggctctgccgccgcccccggatgcccgaccaccggggggccaggagagccccgagcacaggagcctctgtagcccccgggcttcgctctcctcctgcgcctgctgcctgcgcagcgccacctgggcggccatgacgcgctggcgctcggcgatcagggtgcacttggcacacgcgcagtcccgccagcggcagaagcgcttgtggcccttgagcgctgacaccacaccatggttacgacagcgggcgcacttgggcgtccgcgggtagccgcagcccaccgcgcctaccccgctctccagcccgggagccggcgggcagcctccgcttcccgaggtggcggcagcggcggcggcggccgcggccgctgctcgcagaaagaggctgggcggccgcaggaacgctgggggaacctgcatccccgatggtaccggcaacgccggggacgggggcggaggggcagccaccactagcccaggggccaagtgaggtcggccgctaacgcctcggtctctgctgccacactgtgaccgctccattcccgagaaatttctggccgggagtcccaagtggaaagtgcgctgaccgcagctaaccctgctgggaggctggggaagccggggcaggacgcgccgtggtcctactgagctccacccgcgcacggacaaaagttttacactctttccactcggaaggagttgggacgaccgcgtcctggagctggagacgctgagaggtgcagctgtcccgtgagcctggcagagaccccgggcgctaagttaatgcctttgtgcctccagccaagaaggcaaggctagagaggctaccccgcccacccaggctcccggcccagcgcggaagccgggggagggcccggggcggggagtggggaccttctgggaggagggcggcggggaatccgtccaatgggctgcaaatgtctcctcccccaaaaaaagcccgtttctacttgcttccctaggagttctcgacgtctatttttgtaaactagcctttgcagcctccccttttactgcccttttgaaattaagcagagtttgaatttctccttttcccacttccacgcttctcctaagaaagtctgaagatttggattttgagttctcctttcgggttcccagatgaagtcttcatgtctgcagcagtttggccaatgttagtgggatcccagcttgatagactacgaatttgttacccaccagaaagatgccttattttaaatgggtcttaggacagcatcaaaacaatggataaataactaagggaagtgattcacattcagattcttttcatgcattctatttatttacacatgcgaatttgggttgtgtgtactctattttaaaatactgctactttaaaaaagttatcaaactcttctctgcgcctatttataggcagcgattgtgttaaagctgtttcaaaaatacttatgtctattgtaaagtattggggaaagtcgtttagatcattatttaaatatgctgtcatgaatgcattcttcacatatgaatttaatgcctttaattataagaaaagaccataaggcgtttaagtcaaaagagcatctgagatagaaaattcatgaatgtttattcttaatggaaggtagcgtcagcactctgccagctcttcaagatggtatccaactaccttggacaagttattcattttccatccctaagatagcaattaataatgatatttttaccattccacctgttcacattcagagcagatattgctgatctatctggcctttctcctaccaacctactcaacaccatcaccaccactaccatcctctcatacaaacatcctatcgtagaagttttccacccttcctaagaactggaactacctagggaacttttaaaagagatggacactccaatctacgtaatgtattctgattctttttgtctgtgtcttaaactctgaaggtgaaaattacatacaatgtttagaactaccactcaaggaattcctaacctctgggggttctatgatatccaacctttctcacaactctttatctttgttcaagctactcctgcctaaaatgtactgatgccctaactgtggactcacatccgtcctttgagagatgagtttttagttctaaatggatcattaaaatacaatgaattacctaacgagaaagcaattttcttttctattctttttaggagcttcaggttacataatgggaatgttcagcttaatgcaaatatgtcttttaaatttttaaaataccttttaattgtgtttttcaataacaacaacaaagagcagcaagtaaaatgtttacctagagtttagcgatatttttctgtttttatttgatttttaaagttatcttataattatggaaagtgatattggttttcctccaaggaagtaaaaatagtttttaaataaatgtatttaagttaaatatttgtcaatttaaatgaagaattatgcagataatgcatacatcgccaaaaaattgaggtctggaaaacattgtcttggtggttttggagtcaaaaagtgttgctctcaaattctggatccacttttagtaagttactttatctcactctgtcctcaattttctcatttgtaaaatgagaataatcatatggttacttgaggattaaacgagataacttacctaaatcataatgtatataataaaatgcatattttactgttcctaacacctaggttctcgatatatattacttttcttaataaa

SEQ ID NO: 588311 - DNA, 4001 bp, Homo sapiens
aggtggaggttgcagtgaacctagattgcgccactgcactccaccctgggtgacaagagtgaaactccgtctcaaaaataaaaaatacaaaaataaaaaataaataaaagcaaactgcctgtaaatatagggtcaggaggctcaaacacagtacatgaacttcaacgtaaagcccaaccccaacataaaattagggcatgttcatatgggactagcagcttccccaaggctgcagagacctaagaaagtcaggtccatctgctacagaagcccaggtaaaagaggcagaggagcaaaggctaacatggaggtggccagaccaaaatatgcaaagtcataagtagcatggagattggctctctaaacctcaatgtacctagacttgagtggggtaaatctggaataaatatatagaagtcctgctttccagagctagaaactacacattagcctgagtggtaattcataaagggtttggaaaaagttcctgaaggactgagttgcttcaccacagaagactccttgggaaactgggactgccttgccttccgtggtgatgctgaggaagaaagcagaactctgtgctcagtgggttaagtgggggatgactcgggtttcctgtgagaagggatgacatctgtccaggtggtaataagagcataatgttcacatagctgaatgaatcataggagtggaccaggggctcgcagggaagagagagatatgaggctctagaaatagttggggcagagtgtttgggttgtgcactgtgggggtgaggacagggatgagaaaagggcctctctcctcttcctctttgcctgccctttctctcctcataaatctcccagcacagaaaataaaatcacactcctgcacatagcctgtcctgtattctgtttagttctcttgcacaccctctgtgggctcccaaacagcaagagctgtgttcccacctagcctggagctaggcacacagcaaagggttggataaagaatgcctttgaggctgggcgccgtggctcacgcctgtaatcccagcacttcggaaggtcaaggtaggaggatcgcttgagctcaggagttagagacgggcctgggcaacatggggaaaccccgtctctaccaaaaacacaaaatttagccgggcgtggtggcctatgcctttggttccagctattcgtcaggctgaagtgggagaatcgcttgcacccaggaggcagaggttacagagagctgagatggcgccactgcattctagcctgggctacagggcgagcctctgtctcaaaaaaaaaaaaagaaagaaagaaagaaaaagaaaaagaaaaattcctttgggacaagaatgtgagaacaaggaggaagggactcgtgggaatggggatggggaagttaaggagaatagactggtcagaatgagtccatggggtaaagtgaagtgaagagatgggaatggtggataaaaggagagaggtaagaaacggtggattggggtagtatgggagaggaggccgggattagtgggaaagagtaggacagagtcagaggtcagtgggagcacttaccagaggtcacgggggtgagaaggctggggtcaacagagaaaagatcaaggatcagtaggagaggtatgattagtggtcactggcgacgacgaaggtcagaggtcatcagaaggaaggtgtgcgtacgttacctgcttatgaggctgtttatggggagccttcgcagaagcaggaatcatctcaacccctggagagcctacaaaacgctccctcgtctgaagacaaaaagtttgtccgtctccttgaccacacacaagaaatctggactctcttccacttcagttaccagtcgcaacggttctttagggacagccgtcgttgtgggtccccgtgcccttgcaggatagaatccaactccctgacgcggttacccagcaaccgaccagcagccaaggcgcaggcgcttcggcgcgcccagccggcccggaaaggaggcggggttgggcgcgcggcgagcgagtctccactaagccccgccccctcaggaatcacagctgggcggccgcgcgcattcggaactcccgcatgtgggtggggctggggtccccaggcaccgcctcctcatgaataatgcaagatccgggcggtgtcccggacccggaagtggagttgccgagtcaccgcagtggctgagctgctgacaggaggcggcagcggagtaggaggcgaggcaagacctgcggctcggcccggccacagccgcggtagtgctaggcaagcccacggagtcacgccggcctcagccagtctgcgaacctctcgcccccgcccacccctgcatccgcccggcccctgcccgcccgagtggtccggggaggcctagtctgcaccacccgccgggctcctggggccgccgccccgcgcggtcctgtcggcgtccgcggccgcgcccggcccctggcccgctcgcccgccggcaccatgatggaggagatcgaccggttccaggtgcccaccgcgcactcggagatgcagccgctggtgagggggcgggcggcgggcaggccaaggccggagggggcgtcgcttgagggggagggagggaatcaggccggggggatcgtgcggaggggcgccatcggatggggcaaagagatccctgaaaacgtattgccgggggacggggacttgcaggacaagaaaaccgtgggagaatatgctggatgagagcaaagggacctgtaagggcggagggcaccgtcggtggaagcagggcaccgtcggatggaacggagggggcacaaaggtgcacaccgctagtggaggcccatagcagggactggcgagggaactgccatggggcaccgccggcggcaggcccaggggtctgggatgggaggtggggaggcgtttagtcctagaggcctgtgatgcttagggcgggggagccgtcaggctaagagagattgggaatcagcttttagaagaggaggggcttgcccgcctgtccgctggatatacggacaggaacgctgggccggggcgagggacccagtgggggaaggtggttggtgcagaacctgggaattccgttctccggtggggagcgcaggcagaccaggctgggggcatctaaaccgggaaggagagtgcgcggcgaccagatggggaatcggggtgcagatgagagtgctcgggaaccgacgggagaggaagtggggtcgcgctggagctgcctgtgcgcactggttgggaagagcccccatcatcttaggcctacgtgcctgaagtccttgctgggcgcggatcctgccgcctgtccgcggtcccggagtcagggaggaatgatgtcatcgctgctggcgcggagggaatggaagggggagggcaactcgggtgcaccgaggctaggcctaagggagaccatgcttgctggccaccgcccagggggctccctgacctcgcttgtctgtcaggcaaccgggtgggagacgtggaggcctagccagctcgtatagtgaggggggaagagagggaatgtctaggctgtgttcgctttatccccctggagcctgagctggaattggaaggaggcaaggtgggctacaaatccgaaagtgtggatgccccatttctctgagctgtgctggctggagcagagctgagttctccaagttctgaagttctgcttctgtgttaggcagggtggccagaaacaggtctacccttgggcctataaccccctggctgacagatgtgctttgtagcttcctgggcgagtaacctacccattacagcagccaagatgggcctcggcagggacccatcaccacctttttgtcacaccttttgagggatggtagagagaatcattagtggccacttagcaggagacaaaggctttttccccctttcatgactgcttagacagttctaagagccaaaacaaagaagttttacagaagcatacaatattaaaccggagagaggtgt

SEQ ID NO: 588312 - DNA, 4001 bp, Homo sapiens
ggctctccagcctgggcaataagagggaaactccgtctcaagaaaaaaaaaaaaaaaaccacaacaaaaaaacacgacaccataaatcagaggcaatttgtggtcagtttgcaacattataccaacatgtaaacaagcatttaaaatgggtgatttctcaaagatctgctctgaccaacagctaactttagttagctgcacaaagactagattcttcttacctctcctttctctctgcatccttcctcctcctccaaaaaacatatcaaagatgtccatgggggagccaaaaccgccacctgctccaccctctttaattgcctgttctcctcctttgtcatataattcccttttctttgcatcagagagaacttcgtaagcttgagaaatctgtttaaactgtttgagaaaagaggagtgaatttcattttttaaaaaacaagtgttacctagctacattacacttgatcttagctaaaaaggccgagaagtgatcatagttactatattagatactcgatttcaggccataatagaaatactatacgtctggcaaagaactattcagatacgtttaagagtagatactattcaccttctctccttcatttgggttcttatcaggatggtacttcaaagccagtttcctataagcctttttcaattcttcctgagtagcattgggtttgacccccaaaacatcgtagtaagttgtttctttcaccatcttctactgcctgaaataagaaaatgcaactttaaccggctttcaactggtagcttttaataaaaaagagagctaaggccgagcaatctctttgcaaaatccgattataagaacaccaccttccctaaatttcaccaaaaaggtaacaattcctgcgataattcagctataaactcgaacagacaaaacaaataatcattatcgggaaataatctgagagccgccttctagcagctggttccaattttcctacaccaaagcttccatactaatataacacaactattatctggattcttcccgtttgccctagaggcggtgacagttgtaaccaaaagaagcactgatatgttcagtctaccggtcattacactatcactgtctttggcaaatctgataaactccatatactctccagaaaaagacgtctgggcacacagtggtgggggggagtggtttatagaacaggttactggctccacacagcaagccctccaccgcccacggcttacagcttctccagccgaatccctctcgcccctcaggctggcagagtttacctgccaggtttccccttgcacttggcgctgaccgatttccttcctttctccctcccaccctggacccaagtggcggtggggaaagcccagccctcaacaaacaaagggaggggaaacagagaaagcgaaaccaaaagccgcagtctccgcccggctccccccgcagcccctcgcccctgcctccctgtgcgcgtgcgcagggtcgccaaccccactccccccccccaccccgagcgagcacggacggggaggggggccgcgggggcgcgcacggaggggcagccgaagacagtagctccttggagatcccaggctggggaaggagggaggtctaggaaaggtctcgggcccattcactgtgcgtgccggggatgggttgccagggcaccacaccagccctccaaaagggaaatcgtgggcccaggaactgacagcggtcctacccacgcggccaactgcctcccgaccgcggctccatcggtttcccggcgccaatggcgccagccaggggactaggggcagcgcgagggctcaaactcaccggtgcgggctgaggccggtgtgtgagggagcgggaaggagcgccgagctgtgcgcagccggggtagttaccgctcctccgcctctcaccgagcgttctggaaagttccgcccggcgcgccgcagccgtcctcttttgtagccgaacccgggcgcgtcacccgccggaagtcccgcccttctcggccgctgccaccgccccgccgttacctgggcaacggcgcgggggcgcacgggtcgggaggagctgcgccgaaaggccttgtgggtgttggtgctagcgcggcttcccggcgctcgtggaatcttctggagcccttttctccactcagcgagcctgagagtgcggaagtctccggctggtggggcatggcccaggagcactgcaagtcctagggttcccaaacctgtggggtggccgcctgggcccgcgagggcgggaagggctcgagtacagtgacccagcgggagctgtgtgtgaacgggaaagctcttggaacagtcttgcccccccccccccccctcttacgggcgcctcttctctttttgggaacgtggcgagcaaaaaatgcttgagccaggtgggtctagtccccagaccaatagcataggccttgggtcttgctgtttttcacgcgtggtccaaggcggcataattaatcaaattgtgaagttgttaaggctttttgtgcaagtccaggcccctagacacatgttatctgccctggacctcgctgattcgtgcagattgagctcagtgtgtctgggactgagctaaacagtgagacgtttggaccgtctttgatgtacagagggccgtggactcctctggtcaggttttcacccagtttggctacagagtagccgcaagagtgtctgactaaaacaatttgtttaattatttgacctcacttttaaatcctacgggtcagggaacctggatgtacaatctgcaacgtaagacctcggacttgaaaatggtaccacgggggcttaatgggaattggggtccgcttctttatccagggacacagcaggtatgtcagtatctagcaccaagaaagatggagtttgccacgctcggtggctcacgtgtgtaatcccagcactttgggacgccagcgtgggctgattgcgtgagctcagaagtttgataccagcccaagcaacatggtgaaaccccgtctcgatttaaaacaaaaacagaactggagatgcagagttgaaaagccccagttagactttagtgagaagccaaacaagtcaacagactgccagagaaaccatgaggtagaagtcagtaggggagagcctcctatattaacctgatagatcagagagaatttctttgggaaagtggcaattgagctgagttttgaaaatgggaggagagcagtggacaaagcacaggggaaggctatactaaggtgtggaagaatatgatgtttttaggaaattgcaactaattggatatagccatagctaagggagctagaatagccggaggtgaggcttcaaagctagttagggcatgcctttgtctgttggtatatatgctacgctaagaattttgaactttatccttggaagcatcctcatgctgcctcttcagccttttctctttcattaattttaactgtgcattccagtcacagaactatccgcagtttcccatatacgccttttcacctttgtatgcttttgcattggctgacagacacctgatttttttcaatcttaggtgttgccttctcaagtatcacctctggtataaagttttttgtttaaaccaaccgttaataaacgtctaatattaccaggcagtgtactagggctttgtaatacaaaaatcacgtaagtcaggccgggcgccgtgcctcacacctgtaatcccagcactttgggaggccaaggtggcggatcacctgagatccggagttctagaccagcctggccaacttggtgaaacccttctctactaaaaatagaaacaattagccaggtatggtggcacgtgcctgtagtcccaccttctcaggaggctgtggcaggagaatcgcttgaacctgggaggcggaggttgcagtgagcagagatggtgccgctatactccagcctggttgacagagcaagactctgtcgagtctcagaaaaaaaaaaaaatcacataagtc

SEQ ID NO: 588313 - DNA, 4001 bp, Homo sapiens
gccgtctgagagggagcgggggggggtggtctgccatttctgcctcaacccacaccttctttcccctgggactgggaaagaaccctagcacaccaagagggtgcccctagagaacgagagcagcttccaggcagagggccagtggaacggctcaccaaccacccacctccttttggtgtccctgcattacctccacacccggccagcttcctccctggtacccacctgctagctgctctaggcccatacatctcttgcctccgcagacacagggcaagctctttcaggatctgcctcctttttctctttctgctttcctccctccttcccttcccccctacccacaggccacgtgttggaatgacaaaggagccccatggcatggcactgcctttgatggagaagaatgaggaggatgttaaggtagaggcaggaaggaaaaatggggagaaaatggcgagggggactgttgaggtacagggaggggagatggctgatacagaaaatgaggtactgatggagggggatgagtgacagatggaaatggctgaggtggaaaatgggttaatgatgggttgaaagggaggaatgtggagagttgaaataatggaggaaatgtctgtggaaaatggatacctgaagggtttgagaaaaggaatgataaggggtgcaattcattcaaatatgtgggtgaggccggaggggggttcctgtatgtcacagaggggatgaggatgagttggaggaagcaggaaggcaatggaggggatggccgcgtggagggtttgactgggtatgggtgtgagtgcccttctccggagggacttaccgaaactttacaaacccattcagcgtccacgctcgaagttttaagggctccagctgaattttaaacatcaagctggctaagaagtcttctccccaggagtgtgggaagctccggaaagctcctcgggcctgcagtgggggtgctgctgggggtgggcaggagagcactgtgcgcttaaacatgcccagccaagcccctcacctctgatcgctccaccggagccggcctgaagtgctgcagctctggaagccacctccttggactctcagaggcgcgtgcccagcaaggcctgtctggcgcagcaggtgccggacctgatccccaaatgtggagagtgaagggagaagacccgcggccacctgctctcaggtgcagcagtgtctggctggctgtgagcggctgtatggcagcgtgtcagtgaggctgggagtgcaagcgtgtgtttgtgagtggcagcgtgtatacctgtgacaggtgtgattgtgagggcccgagaggcagtgagctcctgtcgcctctcactggggaggacccgaccccaatccccaagaacctactcaatgaagtcactgacgggagtctcctccctcgcagatgggcggggcagagcggagctcggccgggacaaaaggcgcggcgaggagaggaggggagggggctcgggcgggggagggtggtcggtgatgtcacccgcgctggctggctggtctgctcacagatgcctccgccccacagaacccaatctggtccggtccgactcgaccctcccctcccctcccctccccgactcagacgctggctgccccctgtgacagccaagccctggtctaggactccgagcaccctgcagaccccggggccccgcatccccaaggcagcagagcctacgggccctcagtgtcccaaccccccaacaccaggagccctggcttcacgacgccccgctcccgggacccccgagtcctggcttggcgccctcaccggtgaggagctgcgggcgccgccgtggtccgtgagacagccgctgccccctcccccggctccggctccgccgcctccacccgggacaggagtcgcctgcccgccggccgccgatagcgggaccgggagcccgcccccacggctccgcctccgcgccgcccattgaaccgtcttcctgtcactcagctcagcctccactgtgattgggcagttttcaacaagcggcttggtgatagccgcccatcctccgcccctgtcacccggccacacgcgcacacattccaggcagtgattggtgtggatctgattggcgccctctgggatcactcaaccacgcctctttgccatcttgtcgtgccattggtgaaaaagacagagggcggcaacctcgctcgccctttgattttattggttcgtgcctgagactcagacccgagcccgggggcaaactatattagtccaatctccgggttgagaaggtgggacgtactggccactgctcgaatcccaggagaaccttctggaacccttgcgacgtcaaaggcagccttaaaggaaaactgtacccaccagttggccgtgcggccgtgcattctttcctttcttcattggggggcaagagggagagaacagtgcactctgggaggtgtagtccctggaccggggccaaaaggtcagcacttcttactcgcctttcagccaacggtgtaaccacctcaagctgacctcatttagctttaccttatcctgaccccgcggtggcctgatgtgacctaacggaatctctaacagaccccacggatgccgggtttcagagccccccggacctctcccccgagggaaacggatggctctgcccaggccggtgcctccaggaatctcccccgcccaccctctgtacagcccctcatcctcgcgcccctcttcagcgaccccgcggtctccatttcagtccctcttctaatcagtctctcatcctgcttccccctggagtgcctgtgttttagccctttccttcttggccctagatgatctcctgtcttccttcccgcagtgatcccttttgtcttattcttggttctttctttacaccccgatctcctatcctagctctcccctttcatctttcatctcactccccaagatccccttccttaacaccctcagaatctctagtctcccccaccccccattaagtcattagatctcagccccagtgtccccgatgcagggagcaggcggggctgcggaggcggtcgccagcggaagccgccactccagcagacacggtgcctggcgcccacgtcactgtctcccaggcccatctgtgctcgagggagcgggggtggggagggagtaatttgggggtgaagtgggggaggggagtgctggggggttgatgatgatagaagggtcaggccggaagctcccctttacttctttctttcctattttccagagacagagtttggacacccatgaggtcttgctagaaactgcagcttgagtacctgggccaagagcagagcaaggcggggggggggtgccagggtcctggagtcatgtctgtagattcttcactacctaccttcatgccaggagtcactatggggctcccaagggtaaaggggcatgaggtgtgaaggaagaaagagacttggggtgaaaggaggatggaaaggaagtggggttgggggccaggaggggagcagagatgggtgatgaatgtggggaaatgagcatgaggaatttgaggaaatggggttgagggggggaggtagggagagggggtggtgagaggatggtgagatggggtgagggggatgaggaggggaggggcatggggcagatgagccatagggtgggagtaaggagggcagaggaaaggagggctggggaggggagggaaggcagggtgggggataaggaaagaagggctggggaggggcaggaaggcagggtgagggatgaggaaagaaggggtgagtaatgaaaggatgaggcacagagatggggtgaggaggagtgaggaagggggaggggagggaggagggatggacatctctgtgtgacacagagatgggtaaggtggggtgaggggccctgcaccgctgctggctcctcagatctgggggctctcactcttccacctccacacctgtggggcccaggctgtgggtggctctacttc

SEQ ID NO: 588314 - DNA, 4001 bp, Homo sapiens
tcagacccatattcctctgagtcccttttaaggtgggtgcaggagcatttgttataagagaaacgtacaacccgaattcttccattccagtctccctctatcggtgtgtctgtggtggatatcaggggaagggggactttcctgtagctagagctctctgggggatggccagaagccattctcagcccttctgagacttggccaacccctgccaaagccaggagaaccagagtctttctagcaatgtcctaggctggcagccacagctgagacctgcctttctgcctctgactgcttcacagcagggaggtgtacagggtgtccttccaggagtgaggcctgtaaccgggtaagggggaggcgcccaaggccctaggtgggcagggacaatggccctcactgctgcccccacaggccctgctgcaggtggctgggttgactcatggttctgggagtcacctttctctgacgaagaaaaggctccacaaaggcgggtactcccccattgccccccaccagcatgtcacgtctgtgggggagatggggtggggggtggggttgggagaggcagagaagaaagagcacctcgttgggggggggggcaaccgttttcggaaatggcagcaaaagccgtctgagagggagcgggggggggtggtctgccatttctgcctcaacccacaccttctttcccctgggactgggaaagaaccctagcacaccaagagggtgcccctagagaacgagagcagcttccaggcagagggccagtggaacggctcaccaaccacccacctccttttggtgtccctgcattacctccacacccggccagcttcctccctggtacccacctgctagctgctctaggcccatacatctcttgcctccgcagacacagggcaagctctttcaggatctgcctcctttttctctttctgctttcctccctccttcccttcccccctacccacaggccacgtgttggaatgacaaaggagccccatggcatggcactgcctttgatggagaagaatgaggaggatgttaaggtagaggcaggaaggaaaaatggggagaaaatggcgagggggactgttgaggtacagggaggggagatggctgatacagaaaatgaggtactgatggagggggatgagtgacagatggaaatggctgaggtggaaaatgggttaatgatgggttgaaagggaggaatgtggagagttgaaataatggaggaaatgtctgtggaaaatggatacctgaagggtttgagaaaaggaatgataaggggtgcaattcattcaaatatgtgggtgaggccggaggggggttcctgtatgtcacagaggggatgaggatgagttggaggaagcaggaaggcaatggaggggatggccgcgtggagggtttgactgggtatgggtgtgagtgcccttctccggagggacttaccgaaactttacaaacccattcagcgtccacgctcgaagttttaagggctccagctgaattttaaacatcaagctggctaagaagtcttctccccaggagtgtgggaagctccggaaagctcctcgggcctgcagtgggggtgctgctgggggtgggcaggagagcactgtgcgcttaaacatgcccagccaagcccctcacctctgatcgctccaccggagccggcctgaagtgctgcagctctggaagccacctccttggactctcagaggcgcgtgcccagcaaggcctgtctggcgcagcaggtgccggacctgatccccaaatgtggagagtgaagggagaagacccgcggccacctgctctcaggtgcagcagtgtctggctggctgtgagcggctgtatggcagcgtgtcagtgaggctgggagtgcaagcgtgtgtttgtgagtggcagcgtgtatacctgtgacaggtgtgattgtgagggcccgagaggcagtgagctcctgtcgcctctcactggggaggacccgaccccaatccccaagaacctactcaatgaagtcactgacgggagtctcctccctcgcagatgggcggggcagagcggagctcggccgggacaaaaggcgcggcgaggagaggaggggagggggctcgggcgggggagggtggtcggtgatgtcacccgcgctggctggctggtctgctcacagatgcctccgccccacagaacccaatctggtccggtccgactcgaccctcccctcccctcccctccccgactcagacgctggctgccccctgtgacagccaagccctggtctaggactccgagcaccctgcagaccccggggccccgcatccccaaggcagcagagcctacgggccctcagtgtcccaaccccccaacaccaggagccctggcttcacgacgccccgctcccgggacccccgagtcctggcttggcgccctcaccggtgaggagctgcgggcgccgccgtggtccgtgagacagccgctgccccctcccccggctccggctccgccgcctccacccgggacaggagtcgcctgcccgccggccgccgatagcgggaccgggagcccgcccccacggctccgcctccgcgccgcccattgaaccgtcttcctgtcactcagctcagcctccactgtgattgggcagttttcaacaagcggcttggtgatagccgcccatcctccgcccctgtcacccggccacacgcgcacacattccaggcagtgattggtgtggatctgattggcgccctctgggatcactcaaccacgcctctttgccatcttgtcgtgccattggtgaaaaagacagagggcggcaacctcgctcgccctttgattttattggttcgtgcctgagactcagacccgagcccgggggcaaactatattagtccaatctccgggttgagaaggtgggacgtactggccactgctcgaatcccaggagaaccttctggaacccttgcgacgtcaaaggcagccttaaaggaaaactgtacccaccagttggccgtgcggccgtgcattctttcctttcttcattggggggcaagagggagagaacagtgcactctgggaggtgtagtccctggaccggggccaaaaggtcagcacttcttactcgcctttcagccaacggtgtaaccacctcaagctgacctcatttagctttaccttatcctgaccccgcggtggcctgatgtgacctaacggaatctctaacagaccccacggatgccgggtttcagagccccccggacctctcccccgagggaaacggatggctctgcccaggccggtgcctccaggaatctcccccgcccaccctctgtacagcccctcatcctcgcgcccctcttcagcgaccccgcggtctccatttcagtccctcttctaatcagtctctcatcctgcttccccctggagtgcctgtgttttagccctttccttcttggccctagatgatctcctgtcttccttcccgcagtgatcccttttgtcttattcttggttctttctttacaccccgatctcctatcctagctctcccctttcatctttcatctcactccccaagatccccttccttaacaccctcagaatctctagtctcccccaccccccattaagtcattagatctcagccccagtgtccccgatgcagggagcaggcggggctgcggaggcggtcgccagcggaagccgccactccagcagacacggtgcctggcgcccacgtcactgtctcccaggcccatctgtgctcgagggagcgggggtggggagggagtaatttgggggtgaagtgggggaggggagtgctggggggttgatgatgatagaagggtcaggccggaagctcccctttacttctttctttcctattttccagagacagagtttggacacccatgaggtcttgctagaaactgcagcttgagtacctgggccaagagcagagcaaggcggggggggggtgccagggtcctggagtc

SEQ ID NO: 588315 - DNA, 4001 bp, Homo sapiens
aactactgcattcctgacactcaacctaaattcaagcaccacaaccttattaccatctcgcgcctgaaacaaattaacatgattaacatccctaatcctatcaattttactatccctagtaaatcccattatgatttcacacactggtccagggctccctcacgcaccagcagggcttctggctgactacaaggaacagaggttggagcttcatatgctgaagtgccttggatggagagttctttcctattttttctggagtcttttttccatcactttttacataatcggcaacaaagccctttggggcctcagcactttcccagttccccagccatccctcagttaactgccaataaaaattacaatctcactaacgctagtgagaatttaatgaactaggtaaattaaattttacctagttcaattcacctagtttacctagttcagggcccgcccctccaccactcattttatgactccaaattatccaaactgctctggaaggcatcaataaagttgttagctccttgactattttcagctctggaaaaacaatctggaggaacaatccaaggtaaaattatatccactcaaagtacaatcattaaaagcaggctacctggcaacatagaaaattttgcctcgggaaaaaaaaaaaaaggctagaaaagaaatactttacaactacaatcgctgacgcattagtatgatggggcccttcaagcagtaataccaccatcaagtacgatttatacttcgtgatgtcctagatggtttgattttttgcagtagtagaagaaaacagcatcgggctaaatctctcatccccacaagactcaataaaacctgtcaaatgaaatacaaatacatattcacaaaatatttcctactagaaattctcagagttttgtacccaagtcattaagcacctatttatggatcctatggaaaggggggcggttcgcacacttatcatttaatccccataataactctgagaggaggtatcatggccttaattttgcatatgaagaaacagctatttcaacataataagtcactatccaaggtcatacaggggtgtcacagcaaagactcacatccagccttttgactggtgttcattgttcttctcagtgttttcttagttccttaaacccaaactaagcgtcaccattaacactatttccagaaaccaattttctgtcatatcaaactgatgcgatcacagttgtcacttgatattcgagactttccctgttgtgggctaccccagatcctactaataatgatcaccctgcttttcgaatgtgaaatgcacgttattaaaatattttcacgaaatcgtaagatggccaaagttttgcataacaatgtcacaaaaaggaagagggcaaggaggctagctgtgccccccaaggccccgtggggccgactcggctctttcacagggccacgtgggaaacgtgagtatcttaaaggtcgcggtggtggctgtgctcagtttcggggtcacagaggcccacgctccgcggaccggggtcggaaggcgccgtgggcttcccgcggccagtcttcgaagcccctccacgcccgcaggcctcaccttgagtgtctcgtaggcggttgccaccagcaggaaagcctcctcggcgctctgcggcgtccgcccggggccctcgtctccgggctggggccggtagcggtcagggtggtagcgccgggccagctggcggtaggcccgcgcgatctccgccttgcccgccgagcggctcacgcccagcacctcgtagcagtcccgcgtgccgcagtagagcccctccaccagggcccccgcgggccgcaccagcagcagcgccggcagcaggggcgccagcagcatccaccagcgccggccggcagccccggctccccagccgggagagagcagcggcgcccccatccccagcctcgctggcggctctgccaccccagcgattctgcagcactcagccgcgcgcccggctagtcccgtctggccccagctacacgtcagcagccgacgcctccgcgcaggcgcacagggcgcggctacagcaactacttccttcgcaacccgttggtagggagaaggacgcctcagccactaggctgcttccggtgtgtcactgaacaccttccccgtaccagcagctggaggatttgtttggtagcacctgggggatggctctgtcccgggcgcacttaggcgggctgtgcggagcgctttaccttccacagtgtccggcacacgcatccttttcgacatcatcacttgacctgctgcaataggtaacctacctggctctctcgcatcccgttatcagcgtcaagaagatttgcacgtaggcctttaaagccagccaccagccccgggcgccttcctctcactaaccccatgctgcctttccaaacggaagatgaacttagcaattctaggcgctgcctgtgtactaggtagggaccctgaaagttcatagccatctagttcagtttttctcagcctccacgctattgacattttagaccagataattctttgcctttgaggggctgccctttgcattgtaagatgtttagcagcatatctggcctctccacactaaatgccagtagtgccaccacccccagtcatgacaataaaaaatctctgtacgcgggtctgtgcgtccaccttgggctgcgcgttcccgggacaacctgctggaaggatcaagcgatccttccaaaatgctaggattacaggcgtgagccaccgtgcccggcctacatttgaatttcagataataattttttagtataagtatgtccaaaatattgcatgggactatatggcaacatgaaaaactttgcctcaaaaaatctgtttctatcattcatctggtaaatgtttattgagtctctactctgagccgggcactgttacttaggcactggggatacagtggtgagcaaagtaaacaagaagctcaacttcagagagcatatattctgatggaggatgacagtcagtaacaaataaataaacgttcagatataatcaactcttttaataaagtgaaatcaaatactgatacatagcattatatacttataatacataatgaatatacattataattttgtatttctcattgaataaatatatatctctcattacatatatctccctcattacatatataatatatataatctcattacacatatatgtctctgtcattacatatataacatatatgtgtctatttttcacctcagcccactaaatattgcatgggactatatagcaacatatacagttatatatgtaatgagagagatacatgtatatgtaatgagatacaaaagttatatatataataacaattttgtgtatcatatatgcttatttacatttgtatctcatatatgtttatatatgcttatatatggcttatatatatgcttatatatatatataatgagaaagataaaatgaatggaaacacatgggagggtctcctgaaattattaggatcgggatcaattacaagcatcaattccagtaggagctgacagctaaactgactttggaggacgaatagagaatggcttgaaggatgtgaattagagaggagtttggggacaagggagtgtgaaataagtaccaagaagagaaacgagccatgggcaagaaaaaaataataataaagcttttcaaaaaatgaaagacaacctatatgactaggagtagaggtaaggagtgtaggagatgaaactggagaaagccaagttgcaaagggtcattttatcccatgtcaaagaagttgttccttatcttaagagcaatggaaaggccaatatggggtctttgagcaaaaagtgacaccttcggattgacatttcagaaccattactctgcctgggaaaatgagttgggatgtatcaggaagaccattaggagacagttatgagtccaagtagcctgtaatcccagc

SEQ ID NO: 588316 - DNA, 4001 bp, Homo sapiens; identical to SEQ ID NO: 588315

SEQ ID NO: 588317 - DNA, 4001 bp, Homo sapiens
tcctatgtcccacccagcagcaccagggattcagagcaatcgttctaactccagaaaaagaaaggccacgagggccacaggccccagcatctggaagtaatgtctgtttattgatagaaaacaggccacgtccagagaggcccagggccaaaacctccttctggaaggccgaagtcccacagtgccggggagcgcaggagtcagctcggctccgtcttgccagggctggggggaccctcatcctcacccgcttccggagctgcagtggatgtgggggcccctgcagcctccagaaccagttccagggccccctcgcccgccacacggtgcacctgctcgcctctggccgtcaggatctcttcgatatttctggggggcagggaggcaacatggctcttcagggccccccagccgccctgcacttcagtcccctcagggcgccccatggccaggccagagctgcaagcaccaggcccagcactcctgtggcatcaggccacacgggcacttcagacgctggcctgtgtgccctcaccagccctgtgtctctgccggtatgcgccgcctcaggaacccagtctcctgctcctgccccctatgtgccagagggaagaatctgcagccccgggtctgatgggaggacagtcccagctccaagggccaggtaccaccaagcacctggcatgctggtctcagacctgctgtcgctgttactgtcctgcccaggacctcccggccaggcaaggcccggaccaggctcccggcaccacctccactgctctcccagcagccagggcccaggccacacctcctggtccacaccccaagccttgctgtgggccagccaccccaagatggcagagggcaaaaaagttccacgctagagagggacaaggctgccagtgatggcagagggcaggcagaggcagggaggcagggccacagggctggcaaaatttaacaaataaaaacgcaccccctacttggggcatacttaaactcaaaagctatctgggctttataggaaattctcatttaactgtgtgtcttgtattgataaggtggctggatttcccaggtgagatctataaacctcaacactagggcaaggttcccccagggaggccagggtacttctgggtggccttctggcccagccctggggtacaggcctcacctcttcccattcaggtccgagaaccagcccaggttgtcagcgatgatatggtggttctggcagccggggcaggtcacaatgaccacgccttggtgataggccagcttggagatgcgcttggaggacctagtcccgcagacctggctgggacagggtagctggtgaggctgtgagggccgccacgcccctcccgggaagacccgcccctctaggggtagctccagccacctcaccctctccagagaaggccccgcccccgagggatagctccacccacccccaacctcgccctctcccgggaaggccccgccccagggacggctccacccctcctcatggtccgcctccgctccctcccagaagccccaaggggtggctccactccttcctgtgacttgaccacgccgcctcccggatccccggcgggccgcttctccccgcaggccgtgtagcgtcagatacgggtctgtccccggttccgtcccgccgcgcgcctaccttgcaggtgtagacgagctggtagtgcgccgcctccacgcgccccagagccgccgcgggccccggcccctgctcggagcttgagcgccgccagccccaggcccaggcccgccgcctccccgcgacctctggacgggccccgcggccccacagccgcctcaggcagggcgcccggggctgcacgcgactcagcaacctcggcgcgccgcgcagcgcagtccgcagcatcccgctcgccggctccgtccgccctgccccggccccgccccgccgccatcttggaagtgggcgccgggcggaagcggcgttcttgggcttccgtcttccgggtcgggggcgcgctgcgctatgccgccccctggcggcctgagggggccctgcgtccacgtgcagctcgcaccccgaggacaccgcgggccgcagcgaggagggacggccgcggggctgcgcgcgagtgtccgagcgggaatgcgggtcacccgtgctgtttatttacgcagctgtgttttctaacactaatacaatgcatgcatgtattgtgtgttacatggtgaaacagaacagatcctgaagttacacagatggcgtgtgcatgggggtggtgagcacccgcatggcctccgcaaaatgagtgccgcttaacaaacggccccaatgcccggcagtccggctgggcctttcagggcaccagattcctcgttccaggccaagtcagcgacggctcggggaagtctgcgccccagggcgtcggcacccccgggtggcaggaggccgggccggtgggtgtgccctggtcggggcctgcgctgctgcggctaggagccctcagtgtcggtgttgtcgctgcccgtggtgttctcccggtcctcctccccctgccgccatcctttctgcatcttcctgagggcgcgcttcctgtgaagacaggtgtctcaggcgcgacccggctgccgctccccagcccgttttggagaagcctgggggccgcccgcctacctgcggtagttctcaaaactctctttgaggcgccgccgctccttctcgggcggctccccgctgctcaggcctgcgtcctggagaagggggaaggctcgggctccggccggctcccctgagggaacccgtccttctcacccgccccccactggcccctgtaactgcagactggttgggaggcgaggagcccagacagcctcagctcagcgccaagctctccctgtgggacctgcctgtacccctggaggtgagccggtgtgggtagcctgcatttcagatgccaagacacacccaggaggccaagccacggctccagcctggggtccgggccattgtttctacaacaaagcccgaggtggtgcttgctctcaggactcctgtgttcacctcctcatccactgtaaaggccctcggaaaaccaggaccaggcacatccacgtccaaaaagccccccaagctgctgcagtgcccaagaaagggggatccacttcgcagcccagacaccgcaccccgagcactgtgggcagagaccttgtggtcactcctcagctgtcgtcggggccaccgcagggggtgcccagggcagggagccactctccctgtgatcggtcaccctgaggcccacggctgggaggaccccaccccggggaagccttacatgggggttccgcaaaacctgctcctggtgcagagctgcaaagggctgtttcgggctccccccgccggcaaggcagcctggaaaggagagtcgtgcctgtgggacctgcccatctgctgggccacgtatagcacggctgccccacccctccccggcattgcagtggggctgtcttccaaggcctggtgggatccccacatgggtccagtgtagactctgctttctgtagatgagactgaggccttatggcctcgcttgcctgttcattgctccaggaggccgccagatgccagcccaggcccaacgctcccgccagtgaccatccctcccccgagctggctgcctgccagggaggaacgcctcccagacctcgggggaacttaaaccctgggcctgagcagcaccgtcccccatcactccaaagcatctgtgggcatggcggccctggggagagagttggggacagctacagtggctgtctgggtcctcctgaagtgggggcaggggtactgcagcaattgggagagaaccttcaggcggctggaccccctcagaaaccgccaggacctgggcagaccagggatcaggacccttgggcagaaaccacgcacgtccagtctcagccccactgcggtgagggccaggccagggctgtcctggccattggcagcc

SEQ ID NO: 588318 - DNA, 4001 bp, Homo sapiens
tcagtagatgcgggctgaaatcaccagttggtcccctccctaccccaagcctgaagcacgcagcctggcatggggcaggagttcagccaacattcaaaggacgagaggtaggaatatggtttctccattctaaactgctggatatccctgactgctggcccttggggaaggggcccgtggtgtgtctcttgcctgtgtctctgcagctccgggggtcatgtgatcagaaggggggctctgcaggagccattggagagacagatgccttcccctctgctgaccagatgggcacggccgcccccacggtggccttccaacgtcccacacacacatggctccagtcaggccctctccctctcacctctagggctggcatgggtttcccaggacatttgaggggcaggaacaaccacccagtcccactgtccatgttagagatggggacactgaggctcagagagggcaagtgacttgcctgaggttttgcagcagaacctggcttggacagaactgctgtacctctgcggacaagggcccctgcctccctctcccatgtgccagtcacttttttggccctgaaggtcattggaagaaagcaagagtttctgaagaagatgggggggagatgaaagacggggtcagtgtaaactctctcacttcatcccccagtctgcccagccccccaacccacctccagtacctggagagctcctatctttcttctctctcctcagcaccagaaaaactatttctgcctccctttgggggtttgtggggagcctgcgggtcacgaccctgcctgccccgctaaacccacgaccctttgtctttgcggttgttcctctctccgccacctaggcctctcagcgccttgtgggatcagaggcgggagggggattaggttctgcaaatggctcccccctcccgccatccctgtcttagtcatctctgccctctgccgcctctccctccaacacgattcctctggccaggccaaggggagggcgacactgacaggcgccccccacccaggggccgtggcgaagcaaggggccggctgctcagaaaaggataagaagtggtttctcctcccctcttcccttcctcatcctgcagcccgcgcctcccccctcgccgcgctgcgcacggatggcggcgggagccgcagaggtgtgtgtgtgctggcgggaggccgtgcccggtcctcgatgcccgcgggactacgtcctcttctagggactgggatgcgggggctgacctctgccacggcccaggaattcccatgggggtagggggatgtcccccattgagcccggtgtgggggacgctgcccccgggtgctgcccgctccaagggactcccggagcccaacggagacgctgagtaatgcgggctctctccatgcccatgttgggggcggggggcagctctttgcccggggcttctggcagagcgttgtctgccctaaaggatgggacggaggagggggcgtgattcggtagccggaggcttgacgacgtttgcagactagcggggggcgctgctgccccgaggggctctcgtggtggggggagggcctcctcgctccggctgggggtggggggcgcgccggccgcgggtgcagcgtcgggggctgcgaggtcgccgcgccgtcagtgccccgggcggggactccagggatcccgggggtcgggggtcggcgcctgggggcgcgccgcgcctacctgcctacgaaattctcgagcaccgagctcttgccggcgctctggccgcccaccacagcgatctgcggcaggtcgaggtccgcgttctggccgatggcagagaaggcgtcttgcagccggttgaccagcgggatgagatcttccatgccgcggttgcccatggctgcggcgggccccgcaggctgcgatccggctgccgctagcgctcccggctccgactccggctccgccgctgcagccgcgcgcccagactgcctgcgccgcggggcccccgcccctcggggatcggagcgagcaccgctcccggacgccgctagggggagcccgcggcgctgcgggccggccgccgtgcgcaggcgccgtccggggcatcatgggtgtcgtagttttcaccttctgcggcttttggggtgctttagcagtgtctggggtgcgcggatgctgcgcagaatatatttgtcaatgggttgggtctcactcctagtaccaggcctcttggagagtggtctggatgtttcactccatcttaccgatgaggaaacaggcctggagagcagatgggcttcctctgaggtcacagcctcctgacctcagaggtcagaactccgagatgagttccccttcatctcgctggcttctatccctagatcctgactctgatctccaacatgtcctcttctgcctttggtcctcagtttccttgtttctagaaggagaaagttggaacatgaattcaacaaatatttactaggtacctgctagaagccaggccctgtcctaggcactgaagattcagcaacgaataagacagccaaggcctctgccctcatagatcttgcatcaagctggggagacagacagtaaataagtaagcagataaatgaaatagtaaaaatgaaaataattcatagtaagagggatggaggaaataaacagggtgaaaaaaggtatctttgtgggtgtggaaagttcacattggcttggcaggagtcgggggtgttctctgcagaagtgacatttgagaagagaccaaaatgatgagaaggagccagcagcaagcagatcaggggaagagcatgccaggctgaatgaccagcaagtgcagaggccctgacacctggagggcccttcttgggagagttggaagctcttgtcctagagagtggaagtctttgctccaacccatcaggatggtggtaaaacagcgtaaaacagtgggattcaaatccagggctcctacaatcctaccctgcgtaccctttcacacagacagaccatggggccctgagcccagccgtccatctctgcatttaagaaacctaattagtattcacggtggaggctaggaagggaaggctagcctacactgtgctcatggggagtcggtgagtcatttccctgcgctgtgaacagtgtgggggcactgctgacaaagtggtctgtgaattggagactgttcacttactcatccatttaatgcgtatttgttgagccaggtactatgctagactccagagataaagcagtgagcaaaacggacaaagtccttacccacatgtggctgacaattcagtggaaaaagacagacaatatgcaaatagggcaataacgatggccctgttagatggcgtgccctgcagagcaagaaagcaggggcggggtagggtggtgttgctattgtgaagatggtgatcagagagtgacccttgtggggaggaatcttcgaggcaggcatggggaacaagcaggccctctccctggtagcaccagagagtggattaggagtctaatctgggccttaaacaagctgcgtgacccaggtccctccacgtctctgaacctcagttaactaatctggataatggggataataatagatcaaatgcctgtgtagggcacagcccaggcctagtgctcagggggcccttattaagctgcagctgtgaggatgccaatgataacagctcaccagacagctggagcatcagtgccacacaacttgcatggaacctggcagctgttccatgccaacctgttattatgctctgaggacaagagaaggcagagatggaagcctggatgactggcaccaggagggggtgcagtttatagatgtttgcctagagggcatcatggctgggcttttaatattatttatttacttatttattttatttatttttgagacggagtctcactctgtcgccaggctggagtgcagtggcatgatctcagctcactgcaacctctgcctcctgggttcaagcgattctcctg

SEQ ID NO: 588319 - DNA, 4001 bp, Homo sapiens
tcatcccagattcacctgactccaagctcttcactcttgcaaaacagcagcaacaacaaagacgtgtaaatgattaggttctaaataacttgacttcaattaaatgctttttaaaattaaacaatcatttgtatcagcaagtgggccattgaaatggtggttgtaaaaataaaggtaagagaaacgaaggtcagaacgcacttggtcttatttttcaattagccaaaataatgcaacgaaaacctacggcttctcattttaaggaaagttttctaaaacagctttaggttgagagtctttagatgataaactactcctttgccttcctagaaatgaatcttaccgacatgttccattatctttccatgaaaagaaatttttttttaaaggtaaaaggaaatcaccacataagttgatgatttcttttggggaaccttcattcgggacgatgactcaaggggaagaacagccacttcattctgacattacaacacgataccaggtaaacattatggagatggatttcctaagcagactattcatctaaaaaaaaaaaaagaaaagaaagaaaagaaaaaaaaaagaattcaatcctctgggcttccacatgcctccgttctccaggtagaaggaacaagagccatatactgaagttgaagtcaagagatgggaaaagagattcagaaaagtaaagcggaataactgggagtaatatattctaaaggatattcacatgcaaatagaaccaagactaaatgatgacaggtaggaacatgtgattcttgcataatttaacaattttacttattgttgctggtttcttgatatcttagaaaatggacagctaagccacatgttaacgtcactacccggctaaggtagtaattcatcaaaattcactttcatcaaaacttactgaggaggcagcaaacttaccaaacgaatgcttacagatattaagcattattttcctttgtaactttacataaaataatttctcctgaaagaaaatttaaggctgtggcattaaagtaaaagctggtggccgggcatggtggctcatgctcgtaatcccagcactttgggaggcctaggcgggcggatcacctgaggtcaggagttagagaccagccctaccaacatggagaaaccccgtctctactcaaaatacaaaattagccagatgtgatggtgcatgcctgtaatcccagctactcgggaggctgaggcaggagaattgcttgaactacaggagaattgcttgaactaggaggcagaggttgcgatgagccgagatggtgccattgcactccagcctgcgtgacaagagctaaactccatctcaaaaaaaaaaaaaaaagagtaaaagctggtatggagagaaagggttaaagcctgttagctaaacttccttaacgtctcttaggagtgatgtccacactacttcccaagacaactactgcagaaagctgcagccttcatttactttttaaaaaagcaaagcactaaaccctctaccttgtttaaaatttaaaagtgtatccaatctattttaaactaaattttgcatgttttggaatacaacttcagtcaatttaaaaaaatttttttgatttttcaattaaatatatattagcacaaattaaaccaataagcatatctaatttatcttggtgtaaagcttatctaatatacctgaaaatggacacaatatgcacttgacatgcctttattatactctgcaattctgaaacacaggaaaagtacaaataaaaaggccagtctagcaagccactgaagtcataagtagattttctgaaaaaatggcatggaaagttacctcctgcagtaaaagatgctataggtttttcgtactactatttcattaatgacgcaacacacaaattatccttctgaaataaccagaaatcactccagtaaaacatacctttgaaagattcacagttacacggcgcgtaaattgttacaggagacaaaatggcggttaccggaaactgagcggaaggttacaaaatttctaaggcagaagtggtttcgaagtaataagtagaaacaaaaagtaacctaacctcttcaagataagcagcagaaccagcaagagtgctgctgtgctgtgtgaggaagtgagtacaggagggctggagctctctcacagaggaagtgaatattcactgctggttttacaaaccatctcatttgtcagatttatctcacttggcacacatctggcatttagtgctcaaataatataacacatataggcacactcaacaattggcattgatataaaaatgtaggcaatcttcaatttaagaggaaatgtgttttaaaaatgaaggtttagggccaggtgcagtggctcactgtaatcccagcactttgggaggctgaggcaggaggatcgcttgagcccaggagttcaagaccagcctgggcaacatagcgagacccctgtctctacaaaaagtacaaaaattagccaggtgtggtggcatgcgcctgtagtcccggctacttgggaggatgaggtgggaggagaatcatctgatcctgggaggttgaggttgcagtgagctgagatcacacctctgtactccaggctgggtgacagactgacaccctgtctcaaaaaaagaaggtttgtacatactgtaacaggatatgaagctccagatagagcaaaattatggtgacagaagtgagtcagagattgcgtgagttggagggtgtggcctggggagaggagattgtaaaagcgcgctggggaacgctttaggataaaagaagtgttctatatcttgactgaggaaaggttaagtgactctaagttgcccaagttcaccaaattgtacacctaaaatgtgtgaattttattatatgtaaattatactagcaagaaaattattttacaaaaaggaggtctgtaacttggcatttcagattttggaatatgcttttccaaaaaaatgcatactacaaatggtggtaagtttttgggctagcccttctcccccaaatatgaaccataatttggatgagactgagtcacctggaagcccacctagtctagagacatcaaaaccacagctcccagaggttctattatgtaccctaagtaccggttggcagagagagagagggatattgtctgatgtccagacacagtcacagagttaggatctggtgactggagaatgtgaggtgatggtaggaagatctaaggaacaggaggcaaacacataccctgggcacttttgcacttgaccaatcgctaagtaaacctggaactcatacttactagttgaagagaggggaagccagaggtacttatgctctgtcgatggtactggccaaggtttggtgggagagtaaactgtttccttatttccgctgaagaataccttggattaaaatagaaaaatctaaatgaaatgattattttaggaaatcatcacaattttagatgcaatctttgatatcatgttataaaacgtaggccttggctgggcaatgagcagaactgactaagataccttttcagtggcctgttagtggacatcgtagtttttgtcagataatacatacccttgagaagttcacagaggccatgatgcctgcagtcaggtcctgcccaatactggaaggatgatgacagaaggaggactttgaggcccaagaaaaagatccagggcatttgactccttctcccccagccattcagagttttctctatgtgaggatgtctggtatctgactagaatcctttaaatcctgagctgccattttgatccagccattctcatttcaagcagctgaacccttttggctgactggttgctacaacagagaacaccagagaactgttgtatgaatacttctacctccctgtaggcaccttcgatgctacaggaattcccaatgattgtattttttcccaactgctcctagttcagtgatcctttgcatcacccatgtggaca

SEQ ID NO: 588320 - DNA, 4001 bp, Homo sapiens
caccgaccccgcagttgcttgcaagactgcctgtaggattagtccgggtctcggccactcaccccagatcaaccctgcccaaccccatagtttctaacatctttctgccccagtcacacttcctgatctaaaattcacaaagacagaggatcaggagctatagcaaataatacacccatcagtaacttcagtttgattccctatactccttgaatgaattacccctcctggcatgcaacagctatgaaccttaatgtagaaaaaaattcccatagggagatccctgatatacttcatgccttgtttttgcttttttttttttttttttgtctgttttttgagacaaggtttcactctctcacccaggctggaatgcagtggcatgatcacagctgtgatcctcctgggctcaagcgatgctcttgtctcagcctcttgaatagctggggctacaggtgcatgcaaccacacctggctaatgttttaaaattatttttttgtagccacaggggtcccactatgttgcccaggctggtctcaaactctgggctcaagtaatcctcccatctgggcctcccaaattgctgggattagaggtgtgagccatggcacccagcctctttatgccttttgactagtaccttttggcctccaacattaatatgcaatatacataaataattaaactcattttacagatgacgaaatagtaaggtaagagaaacagtttgctggcagtcacgtatcaagtggaaataaaatcgtcaataaagctcgatatgccctctagaagaccttatcgccttgtttttctaggcttttaattccttgttcaaacctcttcacacactaacagcacaaagatgaacctacggtggaatccacctttcacaggctcagctaagtgaagattaacaaatcggacagccctgtgggcaatagaataagttgacactttagaatgagtttcctattatcttttaactagacagtctagctttctcagggcaagacaaaaatgtcccaattacttgtcagcagtttttagtggaggaaaaactgcagttaaagcacctttactgagaactttgagcagtaaatgtgcttacatatttagtttgtgcaactttgattaggaattggatggtgagttgggatcccccagtccttagctttttgctggagttctgtaaatctcaaaatgtcagccacaggccatttcttttggtttatttaagtgtagattttttaaaaaatcactttttccacttcatggctcctttggaccagggtataaaaatagcgatgccaccaggagccaagctctttctggaataatgaagcaggcgaggacggagccttgctcaggacgacagaaggcttgcagcctgcctcaaacgcaactctaatttcagccacttcacttcttccccccgcgctcagacttgcctcaaaggaaggagccgtttatgagacactccgtggcgcgcccaacacggttacccaggcgcctatcacccttctgggacccggccacctgtaagaacctggagggcggagcgggcgaggttgttcggggaagggatccccggcggctgaggacatccaggagcaccgagattcttggggaggacctcgccgggcccagcgcaggagccgccgcgcgtccagcggctccaccgccgcagcctcgggaaccgggcgccccaggtctcaggcgcgccccgccgcggacgcgaatggactcgtccggcctcggcccctgcagcgaagctccgcttcacaccagcgctgggctgtccggccgcaacctgcgcgccgcggggggcgtcttacctgttgatcttgagcgcgaacgcgcggcgctctgcgctcggcagagtggccatggcccgccggcggttcggtggcttctagggtcgcggggtgcggaaagcgggggcctggcgcgccgcagagtagccgcggaacatgcccagccaagcgcaaacctcgtctgtcggtcggcgctggaaacttccgcatttccaccttctaagccgaaatcaccccgggggagggtccgagctcggagcagcgacggccggctccgccacccggcctggcgcgcaggcagcggcgggcgaggagggcgtgggcccagcgcggaactggcctcccgatactggggcagacggcgcgctctgcccggggccgccgacctccggccgaagggagcgcgggcggacgacaggcgaccactgcgcgcaggccggaagctccatctgcccgaagctgcgaggctgccagggaatgtaggcaagtcgggggagccccacaaagctggcgaggtcgggaatcaccccagggattcgtaaggctaggtgttattaagggttgacaccattctcgaagaaggcagccaaaaaaaaagacaaaaaagttagtggaatctatcaggattcaaatcaacttttgcaagcaatatgcccatcatccttcctgagacactaaataaatataatggattcatccaaggaataaacattatgagttctcaaaaaatgttttcgtcacaacctggcgtgaatgcttttctccggagaaacactgaaggcggcgttcttgcgattcaagggtacgctgcgtccaggtttatttcagtttcagactgaggtctgctaagaagcccggcctcaaactcaagataaaaacagaaaagtcccagtgttgacgggagtggaggagcccgtgttcgcttcaaggtgccggcgtgctgctctaacctgtgctatatatactcgagcactctccatataatgcctccatttaccaacttgctcttaaaaaataccaaagcaggccgggcgcggtggctcacgcctgtgatcccagcactttgggaggccgaggcgggcgcatcacgaggtcaggagatcgagaccatcctggccaacgtggtgaaaccccgtctctactaaaatacaaaaaattagccgggcgtggtggcgcacgccttagtcccagctacttgggaggctgaggcaggggaatcacttgaacccgggaggcggagcttgcagtgaaccgagatctgccactgcactccagcctggcgacagagcaagtctccgtctaaaagaaaaaaaaaaaaacaaccaaagcgaagtatttttggttcaaacctgcactatttaatatgatagccactagccacatgtggctattgaccactcggcattatggttagtctgaattgcccactgctggatgtgtaaaatgtacactggaatttaaagacagcgcagaaaacatcgtgtaaaatgtcttgttaatgattttcatgttgattgcatgttaaatgatactttggatataaaaaatatattattaaagttaatttcacctgtttgttttccccttttaaaaatgtggtttgcatttttaaaaatgtaaaattacacatgtggctcacatttgtgagcctcattatattcctattggacagtgccagtccaatacaacctaatttgtcacctaatactaaaatccacctaaggactatattcagtctcttcctgatacagccttccttcctggtttcagctgtgtcaggtagtttagtaacttttcagtactggttaggtaactccccgccccccaatgcccaccaaatatcagtgcccttttaagcatataagacaaagttcactgcatagactacaatagactacatacgaaaacaaacccaaagaaaaataaagcttttttgaaatttagagtttctgactttcaaaactgtccttatttactacattggaatttatgagcaaacatttggatagcaaaatacaaagagaacaaatgtgtaagtacttcttcaaactgagactcaacgaatgatacatagaaaacattttgccccagaggcttcggtccacggtgtaccatgtcagcctttcggatgaactcctctgaatttctgaatgtttatgacatacattttcatatagaacaaaaat

SEQ ID NO: 588321 - DNA, 4001 bp, Homo sapiens
ctatctgtgtagtgtatgcttccaggagggacacagtgctgatggaccccaaaatccaagcataactgtagtttaggtccactccactgtcaaagattaagatcagagctacagaaatgatctgcgcaaatatagatgtcatggtcccctcaaaagtctttttggttccaggccagcggatctcccccatggtgctaccgaagatggaggccacagtatcacccacacccacagccaggacaccggcataggggacgagggccctggctcctcccaggctacccttctgtgtgcagggtctggggatcagccagatgggaagagacatgcccaggagcaggtagatgtgtgtcagaatgagtggtccactgtctcgttcatccagaaaaagggacaggaagctccgtagagtgtgacccaaaggcttgatgcggaagtagcgcacatactccaggaagatgaagaccgccaggcatacagtggcggctacatagagcagtggccggtcaaagatgatacctgggatgtaggtggctaccacaatgaggtggaaatactttcgggcgatggtgggggcctggtgcttcttggactcggaagatgaccgcttggcattctggtacagcaccaccaggcaggccaaggtggccagcagagaccaataggctaggaggtagatgcgggtgtctgtctggaagagaaactgaagaagccagagcaggggattcctgcggatgagccggtgcagccagggtaggaccacaccaaggctcagcacacaggtcatgaggtggaagaagatggaggaggcccaggtgcctgagtccatgaagacaaacagagtgctgaagaaaatgcccatgagtaccatccctactaccaccaccagcaggaagaagtccactgggtccccctgactttccaccagtgtcagagagcgcttgatgagctggttgaggacaaagctaatgccacccaataccagcagtgcctcaccaggggtgaagcagcggggcagcaggtacagcaggatcatgttgagataaacgaagatcagaaggacttccaggacttcgatcacctcccccacgctcaacgagtgcttcatgatataaatgataacacctccagccaagcccaagatgacacaagtgttggttggcactgggcgagtgatgccgagcgccaacactgatgagaagagggccactgccatgccagtggctgccaccacaatgccaaaacgctcaaagaacgggttcccagcagtctggcaccgctccttcatgactagtccaagcaaaggcatgaccatggaggcgggcaataggccactgtttgcggacattcggaactggaagacggcgcttccctgctgtagcagccggtcccacttgtattggacgtagaaggcctgcactgcgagggccacggcgcaccacgagtatcggtcccatacggttgcgtggatgctcagcaccactgcaaacactactgccgcctctgccagcaccgatccactcagcggagccccaggccccggggccggagatgggcactctcgggtcatatctctagacctggggcttcacggaggccggggcgactacggacgccctagacttcgggcccctcagccccgtcaagcagagggaggcactttcacccggccagcaaccttctccctccgttctccagcagcgaggagggaactccaccgcaggtcacttctgcggcctgggagctggcgcccggccaccccccacagcctccaacctacggcgtagacgtcgccactctgcagccttcctcacagttacagccgcccccgctgccggctcctcacctctttgggcctcgccatcttggcaccgccccgcggcaacgtcacgtgacgaaatccccgcccacgctccgggtccgggggcgagcggtcacgtgggcatggcgtctgggggcggggttagggcgagcgggcgcgcgaagatggcggcggccgccggcgggccgtgtgtgaggtgcggagcgggtcgaatggaccggggtggctgtgaagcgcggtgtcaaagccgagcggaagcggggcgggaattggaggcgggatgtggcgacagtggcagggccaaccccggctggatggacgggcaccgagacgggaggcggttacgtccaaacggtccccgcgcgcggggatctgaagagtcttcttcaggaggggggccggctcttcaccccttccctccgcgctcggcctcccatctcctcacccagggccctttgccttcctcctctctcacctccgacgcgtctcttggcgccccacccgcgcttccttctccggccgtgacgctccctcgagccacggggagctttgcggtctcctggggtaccccccacccacgtccctgctgcaggctcccagtgtcctgccccggcgtcgagtgcgccctgctggctccccgacctctcccgcgatctgttcttgttaggattttgtttcgcgttgagcggagccacgcttgcggcttctgtcctctccgcgcctcgtatcgttcttttcttgcactgaatcaagtcagccagcatgtccaaatcctccaagagatttcagggattgaactaggctttagggacaagaagatgaaatattatatacgaaaactacaattctgacaaagtgctttctagcgtcagaccctggtggagcgcttcccaggagttatctcattcaattctcgcaactccgagaggcgccttctatttcacagatgactcagaagtccggctcagagctagccaagtgataaagagagccttcaagctgaagtctgcgtacctccagtgctataaccagaccaccacgcctccttctgtcttccacattgcagctcgaaggtcttcgttcttcccaccaccctccctcaaagttaaacatccccgtctcttatccttccctgtgccagcagtgttttccccacttttttttttttttttttttttttttttttttgagacggagtctcgctctgtcgcccaggctggagtgcaatggcacgatctcggctcactgcaagctctgtctcccgggttcatgccattctcctgcctcagcctcccaagtagctggggatacaggcacccgccacaacgcctggctaattttttgtattttcagtagagacagggtttcactgtgttagccaggatggtctcgatcttctgacctcatgatccgcccgcctcgacctcccaaagtgctgggattacaggcatgagccaccgtgcccggccctaacaatattattatataacaagattactttccaaaaatttaacaaatcgttttgtatattgagattttttgcttttagagagcagacaaaatggctatgaggcagtgtacaagtttgtatgatcagaaagagcaaaattacctctgttctctcattttgcaggagcagtagagaactgtggactattctgcttggaaggtcagctctgagagagctggtaagtggtggtgttcttgagtgggttctctgggttctttgtgtagcttttgttaccaaaaaaaacctttttttaaatgtaggaagtaaacacatttatttatttagagacagagtttcgctcttgtttcccaggctggagtgcaatggcgtgatctcggctcaccgcaacctccgcctcccaggttcaagcgattctcctgcctcagcttctcgagtagctgggattacaggcatgcaccaccacgcccgactaattttgtatttttagtagagatggggtttttccattttggtcaggctggtctccaactcccgaccttaggtgatctgccctccttggcctcccaaattgctgtgattataggcgtgagccaccacacctggcctatttatttattttgagatggagtttcactcttgttacccaggctggagtgtaacagcatgatcccagctcactgcaacctccgcctcccgagttcaagcgat

SEQ ID NO: 588322 - DNA, 4001 bp, Homo sapiens
tctgctccagttccaaggaccaaactcgagttccctgagcgcatcgtgccctgtcctacttctggacctttgcacacagtttccccccacctgggacgctctctgggtgaactcaacaaacaactaagaacccaccacagtggcaaaaaaaaagacacatatgtccctgctagtgcagagcttgaggtctgacgggagaatctgccatccagactcagttcatgatccactaatgtagatatcaggacagcatctgggagtagagacagggtctctttatatcccactctatcccccaagcccagcacagggcctggctcttaactgggctcaaaaactgttgaatgaatgaagtaagcaagtgacggtgtgaagaggggtgtgacggagaagtgcagggaaccatggaagcattaataggggactagacctcaccagatgctccaggctcagccaggtccatcacagcctgtatcatgctgcacacaactgcctgccaggttccttctggcttgttggattgtgagcactccaagaagctactctgaggccaggaggggaagctgtgaaggtgcagaggccttagcaagtctttccccacctccaggctttggctttcctcttataaagcagctggttttcatagtgcaggaatgcagggatatttcaggcctgttaagcattctaaaaaccagagctagcccagggcctagcactcagaagtgttcagtggatattgactgaatgaatgaatggatgaatgaatggtagacaggcaggcaggcagggcccaggacctggcagggccataccacccccagtacaacccagaacaccagcgtcaacgttctttggcattcagtcctggtgccctcagcggacccaggttctcacatctcgcaagacagcagcatgagcaggcccttcccaggcaaccagggctcaatgaggggctccagccttccctggcactcaaccatcttacccagggagggtcttgcaaggtgggataacattaactgcaggtatttactgaacgcttactgcatgccgggcactgtactcagcccttcttgtgcctcctgctatttgatgctcataccatcaccagaaggtaagcactgtaatcagtcccactttagagatgaattaacttaagcagaggcaggcacctgcacaaggcctcagcctcaactggagcccagatgggtctgacccccacgcccaggctctgcgccactcttactagacagcctccagaacgccgctaatggacctctcaactggaaagccctgcacttcgagaggtgtgtctgatgggaagcaacagaagtcaagttcccggaggctgcccgccccctcatcgggtcctctctgttgtggaatcgtgccctgctcagggcgtggcaccacaagtactcaaaagcctggcttcggcttgcacactcccagcaacggggagctctttctcttacaagcagcccaaagcactgttcgaaggaaacaagacactccctgcacgctggaacaggagtgcggcctctctgggacaggggagggcggggaagaagggccaaggtccaggccagggatcttttctcgcctcacacagatcctcaacccatttcagcccaccggcgccccgggacccgggggagcgccctggccgcgcagccgcagagtgcgcgagcgagcgcctcacaatttcgcccagctcatcctcgcaccactgcgcctgcgcggcgcgcgcgccggccgagcccctccgtggttcactatttgacagttcccaccccggtcccccggcgccccctccgcgggctcgagcaggccggagcgcccgggactgagaggccgtccctgggaaggcgtccttggagccgggaccgccttttacctgcaggatattcgacgtgggtgagggtcaccggccgccatgaagcggggagcgagcactgtccgtccgctgccatcttacccggagaccgggcttcttcgagcagccaatggggagccaggggggcggtggtcctgacctatcacgccggggaggcgccgtgcacccaatcggaggccaatataggtagcggcgcagccattcagcgtgcaggccgtgggggctggcccgagcggcgaatcagagagcggggcccctgggagccaacgagccgccccagctggcgcccaatctggggcgagcgcaggtaggcatctggccaatcagagaaggggagggttccagcaccgaacagggagcataacagccaatcagaaggtgaggctgcctcagcttgtgggcagggcgggccaatcaggcgctggctttgggggcgtgttgaactttggtgggagctttggttcggctgggacctgcgccctgaatgaaggcttccctggtaccccctgccgatccgcggtcttggggacctgcgcgtccgatagcgcgtgctcgaagaggagaggcaacctcagctccagggggtttgaaccgacccactttcagttacgagtaaactgagaccagagagcagagggggcttatttccctctgccccatactggccggcgaaagggcaagtcacacagagcaggcgacctttttgtcaaaagtgtgtggggcggggcgcgcagtaggcgccctaaacgctggactgaacagagaagcttaattgatacttaagagtggaagcttagctacagttaaggactccttcctcctttcattcatttaataaagatttattgattcagtcacgtctatgctacttaatgaggcgtcttgggagcatttcaaacaagaagtcggttttccacctacccctcagttttcccaagacattcctgcgtgaacagccacaccttcccacccgccttcacctctcctacccgactctgtctctggctggattggattacagtgcaggtaaggtgggctgggagggctcagcctcttgtctcctgccgctagcatgtgctgtttttgtctgtttgtttgttttttgagacagggtcttgctctgaggcccaggctggagtgcagtggaacgatcttgctcagcctcctgggtccaagtgattctcctgtctcagcctcccgagtagctgtgactacaggcgcgcaccaccgcatccggctaatttttgcatttttagtagagaccgggtcttaccatgttgggcaggctggtctcgaactcctggcctcaggtgatccacctgcctcggctcccaaaatgctgagattacaagcgtgagccgccatgcccagctaattttttttttttttttttgagacggagtctcgctctgttgcccaggctggagtgcagtggcacgcccggctaattttcgtacttttcgtagagacggggtttcaccgtgttggtcaggatggtcttgatctcctgacctcgtgatccgcccacctcggcctcccaaagtgctgggattacaggtgtgagccaccgcccctggccaccatgtgctgttttgctgcgtgggatgtactgcctctcctgccctactttgcccggcccaatctggttcaggtgtctcctcggcttacaggtttccacagtcaagtgaggggccagtactgggctctcacggttgcatttcctgtcctttctcagccctgacctcactggactgtaatcggctccctatccctcccagtcagcagcggctctcagattcatggagtgctgagatcagcctgtagaaaacacagattcctgggtcacaatggggcctgggttgatccagtaggtctgagttggagcccaggtgtctgcattcttatgtgctctggtggttctgatacaggtggttacagccaccactggagaaaccctgggcaacatgaggacagggcctggtacatcctgagcctggtccagaccagacctagagcaagtgtctgataagtgacacgagcgcccctgaggtgagttgagaattacccaggaaatcccactgagagtggctctttctgcgagtgg

SEQ ID NO: 588323 - DNA, 4001 bp, Homo sapiens
tctcagctactcgagaggctgagacagagaattgcttgagcccaggagttcaaggctgcagtgagctatgatcacgtgactgcattccagcctgggcaacggaacaaaaccctgcctcaaaaaaaaaaaaattaaaaaggataaaaactggtacacctgtatagggcatctccattacgttaaggcaccaccatggtatacgtgctccattgttgaccaaaacataattatgccacacaccactgcatttaaatctcagctccaaaagtgggctagagcctacaactgtgttctcaaacaaaagacgccccaggttatgaagtcagaaaactcccatcacttccccggctggaacatgacaaaggaaataagccccaggtaaagcactccccaggtggaagataggcgggacagcaaagaaacaaatccaaagttgagatgcaatgcctgtcttgttgaaggcatcaggcatcaggcttccctgattgctactcatgacaaattctacacccagtgggattatcacagttataccatttcatgtccaggattgcagaagtatcttttctttggacctcgaccagagggtgaatagagttgttgtcattgaaactgtacaggaagagacggcctaaacggacctgaggctccttaacttccattccaccctacaaaaaatgcagaggtagtctctgattatcccaagacacgaaggaacccaaaggatgggaaaagggatccaaggaactcaaaggtttgccatgactaaaggagtggaattctgcctggaaggagaacctctggttttctgagctggagaaacgtctattaatgagtaggtgaacactcctggacccagtagagaaggctccttctaaaccggccaacagggaccagctatggctagggtaaccacagaacccagtttgcctgggacagtcctgacttacgcctgttgttccagtgcccaatttggatcctaatatgtacccaccagaagttaagatataattcccactttctctttactgtacattccacccattcccttgggccacacctgtatatagaagacgttctgctctcaagattttaaagttggccgggggcggtggctcgtgcctgtggtgccagctactcagggggttgaggcgggaggatgccctgagccctggagtccgaggctgcactccagcctgggtgacagtgcaagaccttgtctcagaaaaaagtaatttcttttttttgagatgtagtcttgctgtatcgcccaggctggaatgcagtggtgcgatctcggctcactgcaagctctgcctcccgggttcacgccattctcctgcctcagcctcccgagtggctgggactacaggcgccgccaccacgcccggctaattgttttgtatttttttagtagagacggggtttcaccatgttagccaggatggtctcgatctcctgacctcgtgatccgtccgcctcggcctcccaaagtgctgggattacaggcgtgagccactgcgcccggccgagaacaatttttttaaaaagattctaaactgtttccagcctacctcctggccaaagggccaatatcccctcttcatctcctgggcgattcggtgcgcctttcggcctcaacctcgtggccggccccgccctcccctcccgaagccgcggcgcgcgcaccttgttctgggggccggcaggccggtcctccggccgccgcagctggtaggtcccgcacgccagcaggtgcctgcagccttgcagcgggcaccactccaccgagtccgcggtcagctcggtgtccaccgtttgcagggcgaaacagcccatcatccagccctcggggaagggcgcggagccggcagtagaggcgggtcggcggggccgggctgggtactgcgcggggcggcgaggccggggccggccggacgagcgcagagccccagggacaccgtcagcgcgggccgcctctctcgcgactccttccggggtgccggggcgggacatccggcagggccttggcctccgtggacgcccctgggaagccaggctcccacgccccctgtcggccggctgaccgcggcgggcttcaggcgtcagacgcgctgctccctgcggggccgtagagaccgaaggcttcgggaaatccgctcctccacaaagcaggtttggagacggcaagttagtgacagagccgtaggtttgaagccgcctctgcaaaatttctatcactgagaaaaaccccaacagcgagctgcggtagcgcaccccgtggcgccctcccggttactcctggccatcgggccgcgctgacttaacatttaggctgcagtttccatgacaggccttgccccggaatcaacgccttcgtaaagctgatgaggagcccgcgccccactaagcccagcaccccgaggccgcaggcgcgctctgcctgcctcctgtgaacccgccatggcggagctgcccctcagagaccgccttccagggtctttgcttgtctgacacccgtggctgcatcaggaccccccagaagcggctcagcaggtggacggctccgacccctatgattatcagcaccagtcgcctggccgccgcccccctcccccaaaactgcctttgaaaaaacccctaacctaggagctttggacaagatgatctgaggacgaactccatctcacatgtggcctggccggcccgtgtctattaatttttttgttttttttttttgagacggagtcttgctctgtcacccaggctggagtgcagtggcgcgatctcagttcactgcaagctccgcctcccgggtttaagccattctcctgcctcagcctccccagtagctgggactacaggcgcgcatcaccacgcccagctaattttttgtatttttagtagagacggggtttcaccgtgttagccaggatggtctcgatcttctgacctcgtgatccacccgcctcggcctcccaaagtgctggggttacaggtgtgagccactgcgcccggccctaaactttttttctttattgcaatccacggtctgaatgtgtgcagcgggcaggaagaaccccttgggccgttacaggttgaactgtgccccccaaaaaacaatggactgaagaccccagcacctcagagagcatccttaacaaacaggggctctcagaagcagcaggcgtgggccctgacccagaggagcaggagtccgcagaagagaaagctgatgcagaagacttgcagggccattgctgtgcagagcacagggaggcaggcaaggcacctggcagggaggaggcgtccgcacctgagggcccttgcctgcgccttcatctgagactccggcctccagagcctagactgtgaattcccgctgcttcaggctgcacagctcgcgctgctttgttgcggcagctccaggaagctaaggcggacttgactgaaatatacgggtgcctgggtattcagcctcagggcttcaagcagggctgtggctaaagacatggcagagagccaacagctcagaccaccacagagacagaggcgcagaaaaggctggccaggaaggcagcagggcattccaaaagggcctcaaccacacacctctgcgggggagggagagtgaccaggtgcgcatcccaacacaccacactccaaacaagctttagaagcagccccacattgcagccatctggatgtcctcacaggacgtcttagatacctggctacgaagaccaagaagtcggggccacggaacgggaaagatgaccagaggattgggtatcaggtgagagggaagcagtggtggggcccgtcccaccctcacggtgccacctgctggggtgaggcctggaggagctgccacatgcaaacctagaacctgcaccgcccccttccccagcgtggtgtctcacaggtgggaggccctgggcgcttctttcagtgcacttttctgatgaatgactgccaaacaaagcagccctgctggtcag

SEQ ID NO: 588324 - DNA, 4001 bp, Homo sapiens
aagcatgttcagaggtggggtcttcccgaaaccctgcccagggtcaaggggaggaggtgatgacttacccacaaacaggagcagcaggaggcctgcagccagtgggatggcgacagcataggctcggggcaggaaatacttgtggatgacatgctgactgtcgatgaatggctggcatcgagggaagagctctggtgtgtcttgcttgccttgccgagcccccaagcccaaacgtcccacctcctccatctaaggggctgacccattcagaggactgggactgcatttgcttttctttaagattacggcatttgggtgtcgtggtttgtttctttccttaatttcttattggtatttaccgggcacttgctttggtgcctgctataggttggtggtggggacaagagaacagggcacaagagacctgccctaaggcacctcacagcctagcaaatggtacttgaggaatcctcgactgactcccaacctgggcctccagggcttcttcactaatattttttctctaaaggataccaagttctgcacttccagacacactgcacttcttaagcaataaccaacaagttttcccacaagaaaaaaatatcctaaaggccttcacaaatatcactggcgtttgccatgcctaagagtcagcaggctaacccagaaggaacagaactcccccaaaagtcaaagcaagccggaaacagagttataagtgtagcggctaaggatgcaatcttgggccagatccttctcccctagcctcagctatctcatctataaaatgcggtaccactggcatcttcctcatagagttgttctggagagttcaagagatgaggcaggcaatgaagccagcgccgtgcctagagcctatatagtagttgctctggcggtgccagggctcggggaaggtgagcagcggacggggagaatgacataccaagagaatcacccaggcggtgtagtaggtgaagatgatcaggctaacggcgacgaggccgagtcccaccacctggtctgtccccgtggcctggagaaaagggaggtctcagctgacgaagtgaccctctatttcggcgcactaatggaagcggggcgtcgcggcccgatcacggtctaagcttcccattcaacagatggtagagggctgactagggatcagtttctaggctgggagagaatgctaggcctccgcgttgtcgtccgtacaatagtgggggcgggagagcaatccccgttccaagtgcccatgccccagctcctgagcagacccgggaccccacccccagacgcccctatctccggcacacggtgccaatctcaccatttccccgcgcgctcagccacccgagccgcaagccacatccggttccgggtccacgctcttccggctttggactgcggagcacgccgggagtcgtagtccccaggcctgctcgggcccacctcgtcggagacgagcaggaaccgcctcctcttctttgcatatcggcgaagtgtagttctcaagagcattgtggggccggttgctgcccgaatctctctagggaatgggaccgagttggggacccagactccctggccttcatggccacagtcctgtcgccgccccaccaaaagccaatctctaagtatcccagagtcccggggccagagtgggatgggagtgcgggatcggaagttccatttttcagatgggaaaagtgaggctcagagaaaggtagatcccattccgagtcagtggtgaagccgacacggaaaccgggtgccctacttagtctgtaggtgggagaggtgcagagaacgttcactttccagcctagggtgggcgggggagggtctgtccctagcccgcatggatggggaggatttggtggagaggaggcgccctcctcaccatcgcccggcctcccgggccacccttcggatgtcccctcccttccttcaccgactgtctctcgcagcagcccagacacgtttcggaccgggacccacgcacaggcccctccccggtcttggaaggcccttcctctgagaacaaagagatgttgggccagatcatcttccacgcttcttcagctccgagataggaacgcggtcccccaccactcacaggccggctgctcctcacccatccggtctcactgggacgccacgttcctcagggaagccagtcgggaacgttttttttgtttgtttgtttgtttttgagacggagttctatgttatccaggctggtgtcgaactcctgggctcaagcgatcctcccaactcggcctccaaaagtttacaggcgtgagccacggtgcccagcctcctgtgccttttaattcactgatgcaattgttgatccagccctgtcagccccgagggtagggtctgaggttgctgctgtatccctggcactcagtggaggcttggcccaaagaaagaggtttttttgtttttttttttttttcccaagacgggagtctcactctgtcacccaggctggagtgcagtggcatgatctcagctcactgcaacctctgcctcctgggttcaagcgattcttctgcctcagcctaccgagtagctgggattacaggcacgtgtcaacacgcccagctaatttttgtatttttagtagagatgggttttcaccatgttggctaggttggtctcaaactcctgacctcaggtgatccacccacctcagcctccgaaagtgcctggattacaggcgtaagccactgcgctcggcccaaagtaagagctttgaacctgtcagctttaagattgagtgattgtttagatactggagtacagcatctggactccaggcctccctgaggggttatgtggaggcctttggcctgctgtccccacctggggagtttggggagagatgtgctttgagcctggcatggttcgctccctctggcatttatctccttggttggttggaagcccatctccaactatggagtctgccctcccaaagctgacaagagcaacttttttttttttttttttttttgagacggagtctcgctctgtcactcaggctggagtgcaatggcgcgattttggctcattgcaacctccacctcctgggttcaagcgattctcctacctcagcctcctgagtagctgcgattacaggcactcaccaccacgcccagctaatttttctatttttagtagagatagggtttctccatgttggtcagggtgacttcaggtgatctgcctcctgcctcagcctcccaaagtgctgggattataggcgtgagccactgtgcccggccaagagcaacttttttaaacctacagtccaattcttttcccttatctctcaggagactttgggctcacctaggagcccacttttacctccttcctcagttgtgcatataacagaggaaggggcagaatcggccttcagggtttaaaggggccatgagtcggggtcagccctgaggaggagtggggtgaatgctatcccaggatagagatggagccctggtggcctgattcctcctggcctggccagtaccactgaagcttcccaacacctccaagcttattaaagaaccagagtgacttgcctgtcccagagagacttgggatggtcagaaacgggggtgaggggcccggggcaagccaagcctgtaaatgatggcagcctggggctttagtttgggaacacactcacacctcctacaggtcaggctgcacactcgtgttatttgataaccccatctgcaggtgaggaaactgaggcgcagttatttgtcctcaggcatgctccttagaggccacttgattgcagagaaggtctacagagcagtggttagaacttggccctgaggacagagcttttgctccgtatgaggctggcaggtaacgatcttctcagttttctccccaggaatctggaacgatgaaggtgatgattgtgcctgtggccaagaccgggagaaccctggatccctacaccttccccaccc

SEQ ID NO: 588325 - DNA, 4001 bp, Homo sapiens
cctgccagtgctcgcagccccgtgatcctctgggcctcactcagcagccgatcacagcccacctggagtgcaggggcagcggcgactcagcggggtcccctccaccagctccgcctccctggctcccaggatgagggtcaggccgctgaccaccagcctcgggacactccagccggcctctccctgcgccctgggaggcggcgcctcaccttgacggggttggcagggaggggacccaggaagtcagtggggtaggggtagtccatcatggccagcacggtgaaggcattccgggcgaacatgaagagctgggtcaggtccttctcgtctgacagcggctggcaggtgccgaactcccagcggaccgtgtcgtaggctgcgtggaaggggcagagacttgaagtttgggcatagctggcgctggggcgggtcaggcagtgggaggcggtgggaggacctcacctccctgtaggaacaagtccttgatctgtcggaacgcttcccgcacaccctgggtgcatttgggactctggccctcaaagtcctgggggaaagagaccgtgctgactgcagctgctgtcccttagggggcctggaggaccccaagcctcactcaccgccgtgacgtcccggaagaactggttggagtcgccgaggcctgccacagctagaacgggcgcgctggccgccagcgcccccgccaccaggtggggatacttcatcctcaggtaggcactgagcatccccccataactgggtgagggacacagggttagggctgctgcccccaacaccccatttcctcttttcctcctcaggggcccacaggtgccacaaggaggacgacacttctgagacccacaaattccaaccctgggccaggtgcgggtgcagctctcactgggaaaggccgctagtgtggccgcacatccaagctgagcaggtggctgggaggacaggtgggagggcttcctgggggaggcaacactaagcctggaaccactgcctgaggccttacgaaaaggcagcggtgggagtcagaggggagtggggagaagggctgggggcgctgggtcggggcaggggagggagggggtgcggaggccgggggaggcgcccaccttccaccgaaggcgatggcgggggcatcctgggccccgaggtcgcgtcgtagcgcgcggagcagctctgcgaagtcggccagggcctgctccaccgtcagcagctccgtgtgcccgcgctgcgtggactgcgcaccgaacggcagcgacttcccgtagtagcgctgggggaacgtgccattgagcccggccccgcgaccccgcccggcacccgcgtgccccgcgacccccgcccgcgaccccgcccggcacccgcgtgccccgcgacccccgcccgcgaccccgcccggcacccgcgtgccccgcgacccccgcccgcgaccccgcccggcacccacgtgccccgcgaccccgcccgcgaccccgcccggcacccacgtgctccgcgaagaccagtagagccccccgctcggccgccagctccgcgacgaaggccgagttgttggcgaaggcccacacgtcgccctcgttcccagtgtagaagaagatgggcccctcgccccggacccagaacctgtctgtggggagggcggatgaggcgagggtgccggggggcggcgggacggcgggggcggccgggccggggccggggtctcacccgacaccaggaagcgctgagggaaggtcttgttgccgaagcgctcgaagttgaagtggtccagacgctgctggaagaagcgctcctggaagccggggtccggggccctgcgggctgtggggggacgcgaacctcagaggcggggccgggaccggggaatgggccggggggcgccgccactcaccccccgcctggaggccgcgcagcccgagcgccagcagcaggaccggggcccagggagcggagcccatgtcgccttccgcgggcgcccgtcacgtgggcggggtcacggggccgccagggcgcgctcctccctccaggccccacgtgtttcgggcgcccgcggtccccacggagaccgtcgctgcttcagcgccgcgccggggctgtgccccccaacaccccgcgccccgcggccgctgcccaggggtccttcccgggcacggcgcggggaagcagagggcccccgggccatctccgcggcctcccgccccactggctcgtcctcctaccgcggccccatccggagctgcgctagggcgagtccctgctgcgcccgccaagcctccccagcacttgctcctggcaggtgccccactccaaggcagggccgggagagtgggggccgttctgctgccctaagggcgggagggagagggtcccaaacagagtgctggccccccgaagaaagcaacccagggtttgtccaagcgataacgggctgggcttggcggggcggggcctcgcagcgggcaggagtgtggggtgcccctggagcgtctgggcagggccgggatgtggccgggtagctcccaagagctgggaatcgccacctgcccttccgactggcacccagtgtgcccacacagccctgcagggacaaggggggaccagaggcctctgctgggagctggggcctcctccctggggagcacccagaggatggaagaagtcacctttccccagcgtccagttcagggagtgggtgagggggccgtagtggtgggtgccagactagctacgtggagtcctgctggggatgtacatgggccgctagccaggcccagaacaggtgcaggggcagcaggggctcagctacagagagttaccctgtccttctcccaagactaccctcggccagcatgaccctgccctgcccatcctgtgtggggctgagcggagaagaccggccacttccacagcccctcacgccatggccctcccgtgcctcacacagaggcaccccccatggtgggtgactggtggctggggccctcagcatggtggcagtgaccatcacgtcacactgcaacacgaggtcatccagggccacacaccgtccccaccacggccctcacatctgggccctgtcccatccctacgcagttcctggggctgcctgccggggcccccgcaggacgggggtgaggacaaacagcagacctccttggatgtggaggtaccccacggcgtcccccaccccacacctctgctcctttggctccctcgggtgccttaggtggccagaactccaccagcaaccctcacccaggaccgcagctctggagacgccagctaggccgagagctggccagctccccaagcacaccagagcctggagacgctccaggcttggctgggcccacagaggggccagagcctcagggagggctccaggagcagggtttccaaggaagccactttccctcttgtccacggcccaggcattgatgcccctctgggcagcagccagggcctcccaagccgggaagggtgggcatggggctacccagcatggctctgccaggggtgagggtggccacagtcccctgcccacatccctgtgcccacagaaacatatgctgtatggaatcaaggtttaaggcatctaggcctgtgctggtaacctgtaaccttagccccatccctgtgcccacagaaacatgtgctgtattgactcaaggtttaggggatttagggctgtgcaggatgtgctttgttaacaatgtgtttgcaggcagtatgcttggtaaaagtcatcgccatcctccattctccattaaccagggacacagtgcactgcggaaagccgcagggacctctgcccaagaaagcctgggtattgtccaggtttccccccagtgagacggcctgagatatggcctcgtgggaagggaaagacctgatcgtcccccagcccgacacccataaagggtctgtgctgaggaggattagtgaaagagggaggcctctttgcagttgagataagaggaaggcttctg

SEQ ID NO: 588326 - DNA, 4001 bp, Homo sapiens
atgactgttcaagggtacatttttcctctttaaattcatttctgtcttctctttgtctgtgaaggactcctcagagtgtctgtcccaccaggagctcccctttttatttcctagtgtagctgtatattcgtgcatttatttgtctgtaatatatcttgtattatttcaagggagttggtgagaggggaagagggcacaaggtcagctcagtttcccctcttgaatctcagtacttctttttataacttcatctgccagaatcatcttcctctagtcaggtttcacttagttagttcatagtctgacttgccacatcacctttgttcaacaaacggcagtctctaaagtatcttcatgccagcatacaaacctttcttcagcgtatatatacattaattgccacagtcatttgaaaaccattactataggttattgaaatgacctatatttcataggttactggaacaactttttgaacaactttttgcaatctactttagttttagaaaaattaacatgcagcatgtaaagaaggaccaaatccattagctgattggcacctgaaatcataaaagtcaattcagagagcaaagtagtatgttggaagggaataacaacaacagcaggggaaagcaatatgaaaacctgaactgagagacaaagtgaaactagaatttgctgagtggcatggcaagtgtgctctgatggatatcataagtgctctgcaatgcatgaaatgtatacattgaaattttcttgcattaacaattgtatgtgcagaccttccatcctgttgtgaggagtcagggcctagacctcgaggctctagagttaaactctcatgagggtctcaggcatcctgctgtcctgaggcatcctgaaagcactcacttatggggcattgcctgattgagtgcttaggagtgtgaatgtgccagctgtggccattctgagcacacccctctctcccagtatcctcattctggaaactacctctctttctttttttcccccaaattgactcacttttacttacccagaaatctaaatagataggcacagaaataaacttacagagctatttgaattttgacaaaatcagtatctaaacagtctcactacagtgtttaaatacattttaggaaatggtctctcaatactaattttactattaatgcttaggccctcattattttcattgatatacagaattttgctttgcacttaatatttgctttcataaacaacttcgtaattgagtgtttgcctcctagaggtaaattttctgggattccaatcatagtatcatttttatcaagtaatttttttccttctagcacttactgtgtttatcccaacattaaatattatttataaaccttgattaacttatttttcttcatttaaaatttcttaccagttatcttaagtaaactttaaaaatattaatttagaattttaaaattctacatgaagtcatgagatgtctattatctattttcacttcattcaacagatttaaaatgaaaaatattttgaattatttatgttcttttaggacttaaaaattaataatattttcaaaccaatttatacttctattgaacacataattccacctaaacatataaaaataatttaatactaagtatacaaggtctgaaatacttgggaagtacatcgtgaaaaaaacaaacagaataatgcatactttgaactttaaaaatctattagtaacgagctaatttactcaagagttaaacagttgtgaaataaaatacccaaatattaaaaccattccacatgctaagtagaaacttaaaatttaaaacttttttacctggagatctaaactaagtaggctttgcttggtgtcatttaagtctccagctgaaaatgaaacaaaatcagagctttctttaaaaacaaagaaaggacagaagggaatgttgaaaagtatttgctgaacttcttagtaaaatctaaaataactgcctcccttggggataaatgcctttcagttctttgtgcagaaaatcagccaagaaagtaaccagggaaaatggttaccaagggaaatattttttttaatcataagaaaagtagaaaacagcagtgggtgtgggggaagagcattttgtttgcaggctgaaaaggcagagttggaaacacaaaaatgagcttgattaagaaatctgtggttttcatagactattcgcattaaaaatgttaaagtttatactagccaggatgatgtcacttgagctttatcagattatagggatgatattctcgtcagctaaaggctgtgtatatctggaatctattttaaattggattaataatatttaactcatctgcccacccacctcgatctcacacacaatactaacaaaacgacaacaacaaaaaaatggttacgtattaatatcagtggaaattatgtaacttctaaccatgaaataatagaaagaaaatgtgaaagggagctgtgtggctcctaattacctgttacgctggcaaattagttgtgtactttggcctcagtttctttatctgcaaatgagaagttagagacagatcaggattccaagcgcaaccctgctgtttatgagggaccttgagtaagttacttaatgtttctgaccaaagttcactcttctgtaaaactagggtgatacctttcaaatttttctgaaaataaaaggaataacagatatgaaggtcctaactcagtgcctatcctagactaggtaattttagaactattttttaaattttttttttttttttgagacgggagtttttgctctgttgcccaggctagagtgcaatgtcgtgatctcagcacactgaaacctccgcctcccaggttcaagggattctcctgcctcagcttcccgagtaggtgggcttaaaggcgcctgccaccatgccagattaatttttgtatttttttttttagtagagatggggtttcaccatgttggccaggctggtctcgaactcttgacctcatgtgatccacccacctcggccttccaaagtgctgggattacaggcatgagccaccgcacctggcctgaaattcttatatcgttatttcaggggtccaaatcatttggcaaagaggagctaaatatttgtttaaatgacgtggttagactgaatcaggattttgtaaaatgacctagatagactgaatcaagataagggactaaatacataagccactcaacttcctaaaaataaggaaaatgatatctatttttaaaaatgtaaaactagctgagtgcagtggctcacacctgtaatcccagcactttgggaggcagagacaggtggatcacctgaggttaggagtttgagaccagcctggccaacatgtgaaaccccgtctctactaacagtacaaaaattagccgagtatggtagcacatgcctgtagtcccagctactcaggaggctgaggtaggagaatcacttgaacctaggaggcggaggttgcagtgagccaagattgtgccattgcactccagcctgggcaacagagcgagactacatctcaaaaaagaaaagaaaagaaaagaaaaagatgagtacaaatgagcaaacaccattaaacaggcagttcatagaagaggaaatgtcagtggtcaataaaacagaagaggaagatttctcaatctcagtaacagtcaagaaaagtaaattaaaacaggaaggttattttttcactaccatagtgagatgttgctgacaaaactttgggggtagaaaaattacccaaataatgccaatgctcaatcaagcttgaagaccactgctaatcaaaaatcatggcctgatttgaaatacatacattgttttttgggggaaaaaaatgttgatgatatgctgtgttggccagtgtgtagggaaaacagaaactctcctcttccttgaggacagctgaacagtagctatgctgtctgtcctaccatttcacctctaggaaccca

SEQ ID NO: 588327 - DNA, 4001 bp, Homo sapiens
ggctcaagtgagcctctggcctcagcctccctcctgaatagctggtatgcgttagtggattctttttgagaaatcatatttagcacagatttacttttctgctggactctactgcaaaagtaggaaggaacaccaaatactggcctggtgtggccttcctccctgaatctggttcctagtaacacagagatgacacatctcatggaagcctgcaggctctccagaaacatcaccaataacagtgatgccatctcatctacagtcactgaatattaatataatgtatttattaactttttttttttgagacagagtctcactctgttgcccaggctggaatgcagtgacacgatctcggctcactgcaaccttcgccctccgagttcaagcaattctcctgcctcagcctcccgagtagctgggattacaggctcctgccaccgtgcctggctaattttttgtatttttagtagagacggggtttcaccatcttggccaggctggtcttgaactcctgacctcatgatccacctgccttggcctcccagagtgctgggattacaggcgtgagccaccgcgcccggccaacatttctaccacttcagaggagtgacttgtggagcatcctaagtgtgatctgctcacagatgctgccacgcaattattcccatgactcctagcttgtggccattaagtttcctttaaaagaaaaggagagtgaatttggttttgactgtgcaaccagtaagggtagggcagaccaatgaatccctgtcaccagagccccagcgcatcctggcccaactggcctcaaaggcttcagccctaggccacctgagggtacgaatgaggcagaggcggtgactaaactgtcctccctattacatcagactcacaactgaccctcggatccatcagccacattggtaatctccttccacaagtactgttcagggcacgcccatcttccacctgtgcaacagggtccacctgctcatggggtcccctgaagcaggcactctctacagcctgtgatgcacccaggcaggctccctgggcagtatctgaccagcggagaccagtagaaccaagcaggtcccaggcagagagaaaactctcagggaggagcctaccccctgtccccagctcccactcaggtcactaacctctgccccgtcacccagtctcccgccccaggccctcaactgctgtccaatggcccccagccctatcccaaccccaattccccaccttcatcgctggttcctgctgcttgccccagtccccacccctgtcctaagccctgtaccccactctaccctgttcttccaagccctgtccccatctccatccctgcccccgttcccagtgcccaccctggttctctgtcccctatcctcacacaaggcccccagccttgtccccgtccccgtccccacctcctgcctctgtcctcacacctgtccccaccaacagtccctgcccctatcccctccccgccccaccctggcactggtcccggccctatcgcctgccccttgccccgtccggttccctgctcctctcctcctccagtcgcccgccccctgcctcctgggtccgtccatcccctcctgggtccgccccccaccttcccacccctgtcctggcccggtcctcctacccctgcgattcgccccgcccttcgaaccccgtcctgcccccggcaccccagccttgtccccgtcccctgcgccctgtcccaggccccgcctgcccttccccgagccccctgccccacggtccgtggccccggcccagcgtccgccccgcccggcccggccgctcctcagtcagcaaagcacctgcttggatttggcctgggcggccgtagggcccttcttgcgcagcaccgtcaccgtgtcccagtcgctctcggccatggcgggcgaagacgagcgtccgtccggcggctcagcggcagctgctagagacctggcgcggcgacgctacgtcccctcggcacctccccgctttcggcgtcccattggctggctgcacgcggggggcgggcacttcccgtgctcggggccattcggcgttcggctcgtctgagggacgtcgtggccgggcgccggcgacgtagggaaggcgacgtcggggcctggcctggcctggcgaggcgcggtagccgctggggctgcaggtcgggaggaccccggagcccgggccccgcggcctccgagcacacgcgggcggcggctgcgccccgacgcgcagcccccgtgcctccccgggccccgcaccccggccgggccacgcgggcggagggggcgcggggtctccgctctagccgtgcggccgcccccctttgttttgccgcctgcgcggctgggacctgcgctcgaggaccagggccgtggggcccgaaacgcagcgtggggtgggacacttttttttttttaacttttattttttgagatggagtcttgctctatcgcccaggctgggtgccgtggcgcgatctcggctcactccgtctcccgggttcatgccattctcctgcctcagcctcccgagtacctgggactacaggcgccagccaccacgcccggctaatttatttattttattttattttatttttagtagagacgggccaggatggtctcgatctcctgatctcgtgatccgcaggtgggactctttaagaaaaagaacgcaagccgggcacggtggttcacgcctgtagtcccagaactttgggaggccgaggcgggcgtatcacctgaggtcgggagttcgagaccagcctgaccaacatggagaaaccccgtctctactaaaaatacaaaattagccggacgtggtggcgggcacctgtaatctcagctactcggggaggctgaggcagaagaatcagttgaacccgggaggcggaggttgcggtgagccgagatcgcgctattgcactccagcctgggcaacaagaatgaaactgcgtttcaaaaaaaaagaaaaagaatggaaaactgtgaaaacatcggttgcaaaaatgaatggttttgcatgatgtttattttctgtaatgtataaagtgtatatgttatatgacaataattctgtaataccctattttccagccgttttgtataatgagaaaggtcattatacattatcattgaacaacttttttaggatttttatttttatagacagggtctcactctgtggcccacgctggagcacaacattgagatctcagctcactgcagcctcgacgtcctgcgctcaagcgatgggactataggcgcggcccccacgcctggctaatttttgtattttgtggggtagagatggggtctccgtgccgccctggctcgtcggtctggaactcctgagctcgcgtgatcctcccgcctcggcctcccaaagcctgggattacaggcttgagccaccgcaggccctaatcatagtattgacttccgggctttgaatagatgctccacaaacaaggaacctgataaatgcagtctccatccaaaaagaaaacatacataaatgctgtattaaattggaaatgctgcattagcaaatgcactccgcggaggagacaactgtaattctaaccaggcagtgggaagttgagtcttctgcttaccgtttttcacaccggatgattggaagaaccttggggacacactgatggctccgtccatacaaaccttgcttctctgtttcccgccgacttccagcaccaagctccgttcggctaaggactcaacagcctcagccggccagcaaggatgtgcttccactgaatgaaaataatctcttgtggccgggcgcagtggctcacttctgtaatcccagcactttggaaggccgaggcggatggatcacgaggttgagagatcgagatcatcctggccaacacggtgaaaccctgtctctattaaaaatacaaaaatcagctgggcatggtggtgcgtgcctgtagtcccagctactcaggaggctg

SEQ ID NO: 588328 - DNA, 4001 bp, Homo sapiens
gcgggcgcggcacgtggggctcgggccagcccaattcagcagcccctcagaccccagccggagccagcgccctgtgtcataacccgcgtgggcgccggtgtgagaagtgttccctcggagcaaggggtttgctgggactcacctggcggaggagaatcagtcatcccccggacaggggcaggagctgctcctccgggtggtgggggccacctgtgcctccccggtcctgggggctgctggttggagaggagttgtgggttagtgcctatgcacagtcctggtcaccctgatgtctgggggctgggaaggggcccgggaccagctttcggtgctgctgtgggacctccgcctgcactaggcctacaggcccctgtcctgcacctaccccgaccccatcctgtcctgagctgattgtcctctcggatccgcagcccctggcctcagtaaaatggggttattgcctccagccctggactccctggcatggggatgggaggctgctgtgagtggagctggaggtctctccatgtaacccagggtgctgggcaaggggcctgcagatgggtccgagagggccaccagcttggtcctaccttggtgcatgggagctggaggaagggaggggcccaggtccctggagaggagtccccaaaatgaggccgccccaccctgcaatccagtggccactgctctggaccaggggccctggaagcccctggcacgtggtccaagggacgaccagagcagctgctgtcagggggcgttcctcatctgactggggagtcctaggcctcctggcgccctgagcccacgcagggcagctcttacctagcccccagcagtgaagtgttcagagtggggcctagggggcctctgggtgggagagccaccgccaccctccctgtcccctgcccctggcctcatctctggatctgcggtcacttaaccctttgacctgcctccccacctctcctgcctgagtctggaagaggcgatggagcagaaagggcagctccagggctgccccgactcagccctcgctgcccccatcctggctaggcaccatttggaaagtgggggttctcagacaggcttcttggtgtggacgtatgagacaaaaagtggggccttctaggacccactgtggttttgggggctttgggatggggcttcagccactctgcatgaggctggggagagggagaacaagggcgtctccagggtccaaggggggcccacagagtcacccatttgcccaccgcacccagcaagtcatccctaagcccgagccccacgtcccgcaccctggattcacactgctcatcctggctacagatgtggctttggggttcctctccctcggggccagttcccctccccgggcccccgttgggttgctcatccactgctagggagaagatgaggagacctcagccctcgggacaccgcagggcgtagcgcgaagcccctcacagcgggcccagccaagctgaactttgctgccaaccacaggggctgctctgcggagggagagaaaggccagagggtggggttcaggggaagggcgactgggggtgaagtgttggagtcagcagactggattgggatctacgctgggccacccactagcaggcgtttggccaaggggcctcagtggcctcctctgtgcagaaggggaggagactgggacccctcccctgtgacctcgctggggagcagattgcggagcagccagcaggcgccacggtcagcgggagtgaggggaatggggggcccgccctgtccgctccctgcccctccgaggccacccctgccatacctgatgctgctggagcccaggcgtggccatggtggccgctgctgtgtcctgggactggagatggaccctagcccttgctggggcctcaggcccactggccgcctggaggcacctcctgaggcccacctgcctggcctgtccacaggagcctcccttgcagccgtgcagggccagcttggtgcagggaggctccccccgggcgaggaagggcggctttttatgctccgtcctgggtaatcgggattgggatgggcccttcccagccggacttcctgtgtgtgttctccgctgataacggggacgtgtcgtcggacaaacaggaggctgaggggggtgggggccaccgtgtgagggggcctggacaaactgcccaggggtggggaagccgtcccctgggccatcagagtctagccccaaaacagccagaaaccagggctggaccctgctggagaccctggggagagtgtggggtggaggacgcaagcccagggccctcccaggaccgtgggttcacaggccatgctcacgtgtggctggacagaagggagctgctgcatctttgggccaaggatgctgggccctcccccaggacacccccagatgtgtgtgacacagcacgggagcttggaggggccccaggccaaggcagggaccagccacacaggagccttgaccagtgagggatggcgagtggcgaggcccggcaggaagggactggggtggcaagacaggctgagcggtccgagaacagcctgttccgtgggtccctgaggcccatggtgagggggtgacgggaggggacaagcatggagtccaagctctctcccctaaaagagctgccagtgaggctgtgagcccctgccctggagatgggcaagcaggcccaatgccctcagccccacttcacaggggtgctctgggctggcagcaggctgcggccgggggtgtggggagggatgcgggacactgtgggtgatcacagggggtgctctgtcagattcccggcgtcccagcctccaggtctgaccctcatcttccctgttcacacggcagtgggagcctcaggccgagcgagccactgtggcaaaggtgggctgggtgggaggggacacggtgccgaagggagctgggtggctttggagggcacgcctggaaccccaggagagcagggcctctcccaaccccgctgtccgtggggtgtgagccctgctttggggtcagcccctgtcggcctgatgcctgggacacccccatttccctggccctgggcggtcagtgtgcccccacctctccagccccactcagctgggcaacttgagccaagggaggctggggcagctggggaaattccccacgggactttggagggcaggtggaaacctcacccacacgcgatgcgcctccccctcaagcaggaaccagctcccctctacccacggccaggggaagggtctgctctgggcgccaggctgtggtcagggctcagggcctcagccaggcaggacctcactcttctccgggcctgtttctgcacctgcttcatggtcactgagctggtttaagggggcgctcctggcacccaggcaccgctggtctgagcgggaggggcctctttccagaggtggcccctgccctgaggttggagcagataggcagaaccccatttccccacctcctccacactaggccaccctgggatctggcccttaccctactggctgcaccctcagccgccctgtgcctccctcggccccctggctctcccacccaggggctcatcctgccctggccagcctgtccctccagctgtcaggagggggttgcagtgaagaacaagttggcagcaggccgggcccagtcccccaggctgtcacccaggagtccagtgccaggaggacagcctggggaggacccagactctgccctcgcccctggctgtaagcacagcagtcagttcaccgggaaggcccccagcgggccaagccttagcaactcgtgcactcggctacttagctactccaccgtataggggcccagtaggcttgtgcccccatcccaggaggtgccctcttgccctctgcctgcatccctgcggcctgccccctcctcccccacctgcatgcccctggatctgccctggcctcctggtggaaggacccacaagcatggggtgggctagatc

SEQ ID NO: 588329 - DNA, 4001 bp, Homo sapiens
atttgatttctcatctgagtgtggaaccggccccagcaggtgggccagcagctgcaagccagcaggaaccgtgcggagggtgcacacattctaagaccaccagaggggcggccttcattttagagggggtccttcccaggctgggatatgtgtgcaatcagcctccagggatcctgggacagtggctgtgccaggtgcacacctgggggtgaggagcagcccccgacagtgtcaccggaaccggaatccaaccccctcctggctgtgcagcaggagccaggggcccgggtgaggcttcctgagagcatgagagcccagaattaatggtctgtggcaatgccggggatggggattctgtcctatgcgcagccaggggtctggagacctggcgagcccctgccatgctgcagggtcccacccagggcctctcacgggtgcttcccaaaggctgggtgggttccttccgaggcactgcagggccctccgcagggaaaggccaggcttcgggtcggggcagaggctggggtaaggctgtcccttctctgggattcagtttcctcacacactagaatagggtctctgaggcccctcctcagctctgacagccagtcctataaatagtcacactgtcctcagtcgctgctggccagccccactgggtgtggagcacgatcccacacctgcttcccacgggcactgccaaggcatcacccggtcccagcggggagggtggctgggggtccttcctgggcctccagtcctctgtgcgctggagagaggagggcagggcagaggctgccaactaggcagaggctgccctgggcagctgaggggtggggacttagcttgggggcagggggggcatcacagcagtttttgggcaggagtttgtcgagggggcagagctggctggagattaactctggggatgggccctggatgaaggacactgttaggggctgggtctggtgcgacctcaaggcaagactcgaagtcgggggacattggggagtgggacccgggaaggaagaggtagggcagcggcccggcggcttgatgtgggcagggggatgccagggcgggcctgggggtaggcgaatctcccagacctcattgccccccacacatattggcacagctcccccccacaattcctgagagtcgcctggacaggaagcggtgctaagtggagactcaatttttgaaagtcatgttttcccgaggccagaggaagcccgtggtgctctccgagccggtgctgcaagccccatttccccggggggggccacggcctcgacccaggggtgccgggcggggagggggcggcggcgccaggtggaccagcagtccggtccccgtgcccccagcgcccacgggctccctccccacctgcccggcagcagccccgcagcccccacccgcgagaggccgggtccgcagagggaggggcctggctgcgccgcaggcactggcggacccctcgcggcgggagcagggctggggaccgcggggcccacgagggagggcgcagaggcggagcgagacggacctgcccgccgccccctcccagccgcgctgctggctccggggttcgcggggggcggagcaggcggcacaggctgggccccgaggcgctgagtcgcgccgggtcggacgaggggccgcggcgaccccggccctccccgccgcgccgcccgcccgcccgccgccggcagggggagccggttcccggggccgctgggcccattctcccggcccggcccgacccagccgcgggcgccccggcccgctccgcccccggccccagcggtcgcgctgcctcgtcccggagccgcccccagctccgcgcgcggccaggttccccgcccccgggggctccgcgggtcccgccctcgacccagcccgggcggcgaccggaccccgaccccggcgcgccccgctcgctccgcactcaccgccggatccggggcgcgcacgcgccgccgccactgccgcccgagcccgcgccgtgggggccccgagccccgccccgccccgcccccggccccgccccacctggcggccccgccccgcccccattgcgcagacggggaaactgaggccccgcggcggacgagctgcccccgggcgggcagtgactctgctggaacccggggctgacgcaaacgcgcctctgagccgcggcccgccagcaccccctccgggaatcctggggcccgagtccccgcggcagggcgctcgctgcgcggtcgctggggacgcacgaccaagcccggccgccaggagccaggagaggccgcccagggcgcccacactgacggggctgcgggccctttgctagctttcaagccccccaggctgaaaaccaccccgggacgcccatctcagccgctggggggccgcgcggtaggcgcccggcgcaggttagcactgagctgggtcctgcagcctcgcaggcagtgggcatcatgaccgtccccaccgcaggcccagagacccagatctcctctgagaccacatggcagagcccaggcctgcctcctagccttagcgtgttaggttgggggcccctgcgccggcccccacctggccctctctcaggcatcaggcaccctcaccggggtcactgggtcactgctgagttcagcacagtcagggccatcgcagaacactcctcccagcgaatccacaggcccccagagagtctcctcacaccagaggtccctgggctggtcacctctcttctccaggcctccatttccaaatttataagatggggctaaacagccctgggatctagtgacggtgaggtcgtggccacacaacaattgttacagctgttactgcgggcgcggcacgtggggctcgggccagcccaattcagcagcccctcagaccccagccggagccagcgccctgtgtcataacccgcgtgggcgccggtgtgagaagtgttccctcggagcaaggggtttgctgggactcacctggcggaggagaatcagtcatcccccggacaggggcaggagctgctcctccgggtggtgggggccacctgtgcctccccggtcctgggggctgctggttggagaggagttgtgggttagtgcctatgcacagtcctggtcaccctgatgtctgggggctgggaaggggcccgggaccagctttcggtgctgctgtgggacctccgcctgcactaggcctacaggcccctgtcctgcacctaccccgaccccatcctgtcctgagctgattgtcctctcggatccgcagcccctggcctcagtaaaatggggttattgcctccagccctggactccctggcatggggatgggaggctgctgtgagtggagctggaggtctctccatgtaacccagggtgctgggcaaggggcctgcagatgggtccgagagggccaccagcttggtcctaccttggtgcatgggagctggaggaagggaggggcccaggtccctggagaggagtccccaaaatgaggccgccccaccctgcaatccagtggccactgctctggaccaggggccctggaagcccctggcacgtggtccaagggacgaccagagcagctgctgtcagggggcgttcctcatctgactggggagtcctaggcctcctggcgccctgagcccacgcagggcagctcttacctagcccccagcagtgaagtgttcagagtggggcctagggggcctctgggtgggagagccaccgccaccctccctgtcccctgcccctggcctcatctctggatctgcggtcacttaaccctttgacctgcctccccacctctcctgcctgagtctggaagaggcgatggagcagaaagggcagctccagggctgccccgactcagccctcgctgcccccatcctggctaggcaccatttggaaagtgggggttctcagacaggcttcttggtgtggacgtatgagacaaaaagtggggccttctaggacccactgtggttttggggg

SEQ ID NO: 588330 - DNA, 4001 bp, Homo sapiens
aggtaacagtacctacctcttaaggttgctgctaggctcaaattattgaattcatgcaaggcactggcactatggcagggttggacacaagtcagggctcagtcaacacaggctgtcattctcatcaggtgtgtaaagccctattcaaggctgcctatggaaccagagacatctggagccatttgctcatcggtcatgtattaaacacctactacgtgcccaacactgtactagtgctggtcctacaaccgactggccaagttatctaacccttcctcctcagctaaacaggaaacaacaggacgggcacaatggctcatgtctgtaatcctagcacttagggaggcggaggcaggcagatcgctggagtccaaaagttcaagaccagcctgggcaacatggtgaaaccccggtctctaccaaaaaaatacaaaaaaattggccaggtgtggcagcacccgaggtgggagactcctttgagcctgggtggtcgaagctgcagtgagcagtgatcatgcctctgcattccagcctgagtgacaaagggagatcctgtctcaaaaaataataataataaataataatttaaaaaaggaaataacagcacctgctgcacagggtgaagaaaaccgagggaggcgcctgatctaaaggtcttgcacagtgtgtgggatccagtgggtacttcataaatgatagaattcatcactacacgtcttctcccctacaagcctagaagtgacttgaaattttctaatttcgctttttgttctcagtgactaatattaattccttgaatgctgcagatactcagcaaaaactccttgcattgaatttaagaattcccctgcaccttcccagtttacttatttcaacaccccccaaaaatgcaggaaaaaaataaacaaaaaggccatacattacctgagttaaaatacagtgttaagtctatgcaccaggatactgtacggcttcttactacaccttaactttctaagctttagaagtctcaactgttactagacagttaatttcaaagaaatacttctacgctgacagttttctccaaaccggtcccttatctcagccctaggaccacactatttctgcatctccacggacacaccacctcctgcttgcttttccttcagagggacgccagtggtccactcgcaagactttaatctctacgctgcttcctttcctaagcaaggaaacaaactatccttgagaatgagcacggggaaggccgagaccattaacaaaagaatgtgaactttttacatcgagagccctttaaagctgctggtttggaaataaacttgagtccgcaagcttcccaccgagcgtgctttcctgcttctgacagccagcagggctggagcagcattgtctggggagaaacacgccgggactggccaacttttcgttaaagatggtgccatcctactcagaacaaagtgaaaggtcaacgaagcgaaggaagagctccgagaggagggacagcctcgcctcggccggcgctccaaagttggccggccccgctacttttccttttgtcctccgcacctccccggcaccctggccgaggccctccccgcagatccggcttgcgggcggcggcggcggcacggggtccgtggggggcgcgggcacaggtacgcggtcgcctccctcacctgcgcccccgcccgctcccccagccgccgcccggcccgcgccgcgcacaaagcgcgcccggcgggagcgcgggccggacgcccggcggcctcggcccggcctcggcctgaggcggcggcagcggcggcggcggcggcggggggacccggggccccgcccgcccgccggccgcctgccgccgccccgcccggttcttcgcccccgcgccgcctccgccgctgcccgccgcccccgcgccgccccccgccggccccgctgctcacctcggcatcggcggcggccatggcccgggcccgcagcgtggccccgcccctcccgcgcgccatcgccccgcccgcgcctcgcggcccagagtcggggcggggccgatcgcctacgtctgcgcctgcgcctgcgcccgcgcctgcgcgttggagctcgaccggtgcggcgcctgcgcactggaaccaggcgtgcggcgccccaggcgccgggcctgcggcggccggaaccggaacgcgcgcccgcggggtaggagacctggagctggagaacccgcccgccagagtcgtagtagtggatggggagtagccgtcccattttcaacacatgtctcattctaaattgacgttttggtgggctggccgaagaaggagaaagacccgcggctccgacctctgacctctaaccccggacgcactttgatttcgccggcttgcgcggaaggctgactccctgggccgcggcctggcgcgggagccgcctgtggggtgtccccggcgcgggagggtgctctggttcaggcaggttcccgttgcggcggggttccctcggttgggaggaatgcccctgccgagggtatgctccggctggagggggtgtccctaacggcgggaatacctggactggctggggtgtcccactggggagggtttcccggtggggaggtgtctggcgggggagcggctccggctaagcatgggtgttctgctaggaggatgtgtctggctgggggcggtgtcccaatcgggagggttgccctgatgggggaggttctacagttgtggagatgccaacctggggggcgctccggttggggggtgtgccctctctggttaccccgctctcgctgccactcataggcccgctgcccaggtatgcacaagtcaaggccttttctgcagaccaagtagccttccctggagagcgcccccagcaccacggaaactacctacatgccccgcggtggtcagcccgccttatcccagccccgagacccaaaacaagaagcatggactgaatttgaggtttctggatggtcgtgtgaaccgaggggacgggtactggactgacaagaaatgagccttgaaggtcaatctgggtgacacccgagtctcctggtgagtcggactccggagaattatctcaagtccagcatagacagcgcacatagacagaaaaggaaacggacaatcccaagtgccaagggaaccttcccaggtttctttagggcagctaaactgctctgtcaaagcctaagtccatttatgacaggccgagcaccctgagccctcgcaggagacacgagcgccttcatggccctcctgccccgcacccacctctccgccacccctgctgtctgtcccttccctgaaacctttatttcgagtgtctttgtggcttccctctttaccatccttgagttgaaatatcacctcttaagggaagccttccctctcctccctagttaaaatgatactgcccccccatacctgtcttcgttgacttacttggctccatcacagtgtgtgtcatgtgactctcccacatcctgatttggaatattgtctccctactagaatgtaagtccatggtgcctagaacaatacctggtgtacaggagacaaaatatttgttgactgggccgggtgcggtggctcacgcctgtaatcccagcactttgggaggccgaggtgggcagatcatgaggtcaggagatggagaccagcctggctaacatggtgaaaccccatctctactaaaaatacaaaaaatagccgggagtggtgctgggcgcctgtagtcccagctactcgggaggctgaggcaggagaatggcatgaacccgggaggcagagcttgcaatgagctgagattgtgccactgcactccagcctgggcaacagagcaagactctgtctcaacaacaacaacaaaaaaattgttgactgaataaagggagttagaatgtgaagaaaaatccttcaccaagcaaacatccaccctaagtgaaggtgtgggaagcagctgcaggcagctttttcactccatttttccatcag

SEQ ID NO: 588331 - DNA, 4001 bp, Homo sapiens
gatgttttcttcctcttctttctctccccatagtttgcaagcgaacttcccgtaagtatatcctccccacaaccttaagtgttgttaccttagcatccctacaaacctcctataaagaaggcccctaccacaaatgcagtaacattcgggtccactcagcaatacagtcaccatttatatatacccaaaggttactaagacaaggtagatgcaggacagcttttccacccgctcaccaaaatggaaactccaggtcagcttccacaagaaatgggaaattcaagcgactctggcgaaacgattcttgagaaaactcttcaagggcaacaaaacaatatttcaaacaaacagattttacttgagggaatggggacattacacagcaattgatattcgaatggttttaaatggactgattcgccgtaagttttgaggctgagctaaatttttatgaagaattattaggaatagggccactagaaaattaagttttaaaagcgcttttgtccttgccgaaggtattacattttggcacttctaagaaccgttctttgagggagggaataaaggagagtggacaactcgtagcaaatccttttcccatgttttcagaaaatgtagagacgataggacttgaaaatctttgtcataaagatggtctttaaaaatgcacacaattctaaatgaccatctgggcagctacaactgcatgctcatagctcgcatctagaggcatggttttacgctctggccctgaaggataacaaggaggcttttaaggaaatgccgtgagaaagactgctggctaagcattgtcacggccactggaggagcacctgccagtgaaccgacgctggctcccccagtctcaccagtgcacgcacactagtccgtgcaccccggccgccgctggcaggccctaccagccaagctggaggagcagctgccgcaaccacggcaagcgaactgaaatcccagagccggcctcgcccggcagagcgcccgcgcttcccgcgcagcgcacgcctcgcgcgcaaacccgagatgtgaccgcgagctgcgacctcgcgcggctgcgacgggcctcacctaacgcgcacgaggggatcatcattgctcctgccctgggcgcccgcggccctacaccacctccgcacacaacgcggccggtgttaagtctccaaacgccccgagagctccaaggaccgcgcgcgcgaaggcgccgtagcaagtgggcacacaccagacaccaccccggcgtgttccgcgggagaagccagtgcacacatcctcccgcaaggcggggttgccagtgcaacacaggaatcctgccctttttctagaaaagccccctcccccactttccctccaatacactcacctgcgtctcaacagtttccttcttgcgctacacgcggccgcacccgggcacgtccacgcccgtgcacgctgccaggcgcgactgtccccgctcggctcccgccgcccccaacctgcttgtgcccacgggaggggcggtgccacctcccgaggcgcccaattctctctactcccgccgcaacgggctgagctctaggaacttcgcgggcacaacctccgccgcccccaccagtgttcccgcccagagttcggactagggcgcaccacccctaccctgctagacgcagcgggggcgcgcacagaccttagcctcggcgtccaaaatggaccaggggcaaggcgcggacgccgtccccgcccccacgcccccagcacttgcctgctgtgactcgaagctgcagctactacggctcgtgccgctggccgtcagcactgccgcggaggagtcgctcggggcgagctccgcggagaggcggtggcggcggcggcggcgggaaaggggactggaagccggcggaacccccgccccacccgcgccgcgccgcgccgcgccggcaaccgccctcctcacccggccggctactgcctcagtgacgcccaggcgccgcggtcccgccgtttgtagcggggcgggaaggaggggcttgcttggaagagcgccaggaggcggggccggcggcgagttcgcggcgccgcggccgccgccggcgcgtgccctgcccgaccgcccttcgggtccgtgccggcagggagatgccgggcttcagcagctcagctccgtccctccggacttccgagtctcaccaggcttccccgacaaggtttctctggactcggtggagagcgttgagcgcccagaggaggctgattccaggtgcaagtttgcaaatcccgaggcccggggcgctaacggggagtcagagcagctaacgtgggggttactttatgtgttcataaatgtatttataaatatatataagtatacacacatatgtgtgtctcttttaaaaattctctttttccccctacttcgcagccaaggggtcctgtccctggacagaaaataaaggcttagccccctgctgcccctccctgcctctctagagagaacctgacgtttaaataagcccagagtacctgtgcggggtgctgtactctgcttcaaacgcaaagtaggaaatcctgcactcgactatgcaaacgcttgccgctagccgcatccttctatcgccccccaactcaagacccgaaatggccaactcttcaccgagggggcgtcccatcgctgccttgccttggcccgccccttcgccaagctcaatcccttttccccagaaaaacctgtgcctgtcctcagacccggccccacggctggaagtcaaaacccaccccggagccacgcggctggagcacgtttttacacctgctcggccgcttaattacgagagcacctgtagttgggatttttttcattgcaaaggcatcgattttagcccttctcctaaaatactacatttaaaaaatcacctgtcatacctacctgaaattgtaggaggtaagagaaaggaaccgagcagtgggcgacccagtcgccgcaagaacgtgaccgaggttacagcttcaagggcatgatgcaggtttgatgcagcaaggtccgctaagggcgtccagcgctccccgcccccatgcgacgggcggagcggggttggggggaagggaggggactcgtctaacccagggcgggtgtgggagaggcaaatttgccctcttgggcgaagtctaatcagcatagtgaagtagggggctcaaccaaggtcaaaagcgagataggccatcccttaatttgtgcgacccagtctggggacaccggatacagctaactgattctatatcagcatttccgtgtcaccccaaatccgatttgcaattaaatgaccttaattgactttgtgtgggttcctgggaaaactgctcaaagcgcctgcgcctctttgacctctcagtaaatagttaattataatattctcatcccaggcacgcgggattgctaaaaatgcctatttccaaaacgttaggcgaaaatgggcctacttaatttgtcaatccaaacctaaaactcttagaatgccctacgccctacttcctgacgctgactaaattatgggagagctctcagaagagttccccaagtcttccaaaccacttcttcctacaaccgtagcgttttttgtgaagagctccagaacaggttagctttatgaagcggggtgcccaagcacttggttaaaagagggaacggggaagaagtgcctgctgtaagacacattcaggcaatgacagcaataagtaagggcgagagttaaaaaataaaatgttaaccccataacaacttcgaaactctcaacatatttttttgcgggcttatctgttcatagtctgacaaatctttcagatgtcccatttaagaagccattttacaaggaagtcttaaggcccaaacacatttcctacccttctgttccccaaaacacgaacaccctttttctgacctttagaaactgattttcaatttggaaaataatttctttagttactattgtctgctgtgtactttctaaaaa

SEQ ID NO: 588332 - DNA, 4001 bp, Homo sapiens
aagcatatcctataactaaaattatcttgaaccacagggaaagtgtgtgagcactgaatatagctgacttgattgttcctgaaagaagacactacacaatgaaggaaacacctacagataaggaagagggaggggcttaacacctaaagttgtctttcaaaggaagaaaaaaacaactaactccctgaaaggtggcagcacaaagttacccaaataacaggcaacaaggggctggttttaaccacacaaaaataaaaatactctctcaaaaaggaaaattacaaaggaggaatcacagaaaatttaatgtaacatgtttcttcatattctaatttttcctaccccattctggcctttatcttccagatgttttcttcctcttctttctctccccatagtttgcaagcgaacttcccgtaagtatatcctccccacaaccttaagtgttgttaccttagcatccctacaaacctcctataaagaaggcccctaccacaaatgcagtaacattcgggtccactcagcaatacagtcaccatttatatatacccaaaggttactaagacaaggtagatgcaggacagcttttccacccgctcaccaaaatggaaactccaggtcagcttccacaagaaatgggaaattcaagcgactctggcgaaacgattcttgagaaaactcttcaagggcaacaaaacaatatttcaaacaaacagattttacttgagggaatggggacattacacagcaattgatattcgaatggttttaaatggactgattcgccgtaagttttgaggctgagctaaatttttatgaagaattattaggaatagggccactagaaaattaagttttaaaagcgcttttgtccttgccgaaggtattacattttggcacttctaagaaccgttctttgagggagggaataaaggagagtggacaactcgtagcaaatccttttcccatgttttcagaaaatgtagagacgataggacttgaaaatctttgtcataaagatggtctttaaaaatgcacacaattctaaatgaccatctgggcagctacaactgcatgctcatagctcgcatctagaggcatggttttacgctctggccctgaaggataacaaggaggcttttaaggaaatgccgtgagaaagactgctggctaagcattgtcacggccactggaggagcacctgccagtgaaccgacgctggctcccccagtctcaccagtgcacgcacactagtccgtgcaccccggccgccgctggcaggccctaccagccaagctggaggagcagctgccgcaaccacggcaagcgaactgaaatcccagagccggcctcgcccggcagagcgcccgcgcttcccgcgcagcgcacgcctcgcgcgcaaacccgagatgtgaccgcgagctgcgacctcgcgcggctgcgacgggcctcacctaacgcgcacgaggggatcatcattgctcctgccctgggcgcccgcggccctacaccacctccgcacacaacgcggccggtgttaagtctccaaacgccccgagagctccaaggaccgcgcgcgcgaaggcgccgtagcaagtgggcacacaccagacaccaccccggcgtgttccgcgggagaagccagtgcacacatcctcccgcaaggcggggttgccagtgcaacacaggaatcctgccctttttctagaaaagccccctcccccactttccctccaatacactcacctgcgtctcaacagtttccttcttgcgctacacgcggccgcacccgggcacgtccacgcccgtgcacgctgccaggcgcgactgtccccgctcggctcccgccgcccccaacctgcttgtgcccacgggaggggcggtgccacctcccgaggcgcccaattctctctactcccgccgcaacgggctgagctctaggaacttcgcgggcacaacctccgccgcccccaccagtgttcccgcccagagttcggactagggcgcaccacccctaccctgctagacgcagcgggggcgcgcacagaccttagcctcggcgtccaaaatggaccaggggcaaggcgcggacgccgtccccgcccccacgcccccagcacttgcctgctgtgactcgaagctgcagctactacggctcgtgccgctggccgtcagcactgccgcggaggagtcgctcggggcgagctccgcggagaggcggtggcggcggcggcggcgggaaaggggactggaagccggcggaacccccgccccacccgcgccgcgccgcgccgcgccggcaaccgccctcctcacccggccggctactgcctcagtgacgcccaggcgccgcggtcccgccgtttgtagcggggcgggaaggaggggcttgcttggaagagcgccaggaggcggggccggcggcgagttcgcggcgccgcggccgccgccggcgcgtgccctgcccgaccgcccttcgggtccgtgccggcagggagatgccgggcttcagcagctcagctccgtccctccggacttccgagtctcaccaggcttccccgacaaggtttctctggactcggtggagagcgttgagcgcccagaggaggctgattccaggtgcaagtttgcaaatcccgaggcccggggcgctaacggggagtcagagcagctaacgtgggggttactttatgtgttcataaatgtatttataaatatatataagtatacacacatatgtgtgtctcttttaaaaattctctttttccccctacttcgcagccaaggggtcctgtccctggacagaaaataaaggcttagccccctgctgcccctccctgcctctctagagagaacctgacgtttaaataagcccagagtacctgtgcggggtgctgtactctgcttcaaacgcaaagtaggaaatcctgcactcgactatgcaaacgcttgccgctagccgcatccttctatcgccccccaactcaagacccgaaatggccaactcttcaccgagggggcgtcccatcgctgccttgccttggcccgccccttcgccaagctcaatcccttttccccagaaaaacctgtgcctgtcctcagacccggccccacggctggaagtcaaaacccaccccggagccacgcggctggagcacgtttttacacctgctcggccgcttaattacgagagcacctgtagttgggatttttttcattgcaaaggcatcgattttagcccttctcctaaaatactacatttaaaaaatcacctgtcatacctacctgaaattgtaggaggtaagagaaaggaaccgagcagtgggcgacccagtcgccgcaagaacgtgaccgaggttacagcttcaagggcatgatgcaggtttgatgcagcaaggtccgctaagggcgtccagcgctccccgcccccatgcgacgggcggagcggggttggggggaagggaggggactcgtctaacccagggcgggtgtgggagaggcaaatttgccctcttgggcgaagtctaatcagcatagtgaagtagggggctcaaccaaggtcaaaagcgagataggccatcccttaatttgtgcgacccagtctggggacaccggatacagctaactgattctatatcagcatttccgtgtcaccccaaatccgatttgcaattaaatgaccttaattgactttgtgtgggttcctgggaaaactgctcaaagcgcctgcgcctctttgacctctcagtaaatagttaattataatattctcatcccaggcacgcgggattgctaaaaatgcctatttccaaaacgttaggcgaaaatgggcctacttaatttgtcaatccaaacctaaaactcttagaatgccctacgccctacttcctgacgctgactaaattatgggagagctctcagaagagttccccaagtcttccaaaccacttcttcctacaaccgtagcgttttttgtgaagagctccagaacaggttagctt

SEQ ID NO: 588333 - DNA, 4001 bp, Homo sapiens
cctgtccagcagtgttaacagtaaatactaaatggttggctatttctctcaccctcgccataataaaaccagacctgcagccggtaattacgagaaaatacccagtctcgccatcagttttgctaaccggtacttgaaaatgggaaacggggaacttatccaacctccaatttgtcacagttgtatagctttcgtattaattctgtacagacgtgaaataggtgggtacgtagcaacgtgctgggcataaattaagcaacaatggccacgcgaggtctcgtccgccgcggagctccagtggtgggcactgccaccttgccatccctagcccccaccgcccttcgcagagtccagtccgggaggctgacggtgcgctggctttcccagccggtagagtgggtggggtgaggagcaacgagacgttaaccccagccggctttgtagctttttcccatcctctgcctctcgagcaccacatgagcgctctcacgcacacactcacccacaccccctcgtgccaataatttaaacttctcttaggaaagccagcagcttgttccaccaccaccaccccttccgccctccccggcccacgaacatcctccccctttcccacatctaccctggatcctctctttggcagtagaaagccaaatgatttctcctaaaccctgagaaatcacaaaagttaaaatgaagcgtgtgcctatctgcccagcttgtcatccccaaccatctttctcctggcgtcaatttaacaatagctattcgaggaagtgggggcggtaaggagggggtgagggctacgtggccgagttggctcctggggtggctgcgaagcctcgcggctgcagaggggttccccctctccccgaaggcgaagtcagccgcgtaggaccaaggacagggcttggaatccacttcccagcgcccagcacagcgaggctcccaagcagccggcacttcatagacacagctccaaggatcttatttacgcttttctgaacaaagggaatctcatatccggtacaggcttaagaattcagccccaaattggctatcttcttttaaaactgaattatgataattggagtccgtgaatcagagcccgcatacaatgatgagttctgacagcttctaacaaccctagcctcagcccagccccagccccagccctcaggcggcatgtacttttttcagtcaactacaactcgctgcctggtgcagcatctaaattccatctggcaatcccatctccccagcacatgctatctggttaatgcaattaagcctgtggttttcgctggtctaatctgccagtccaggcttctgattccccttaatgattgtaaagcctctcccgtccttccgttgctgagccaaagtagaggcatgcatccccaacacccaagttatcactctctccccacgaaatgaacttccgatctcaatcttgaagctcactccacatctaacctcccattgtacccctactcccccctggccacatttaccacttaagtttctgccatggacatttacgaatattcagtacgctaagcatgcgtccaccgtcttttagtctagctctttaaaattaaaaaagcagaacagtagctttgaaatgagacaaacatgtgcaattaacttcatattctgtattccgctcacttacaggttttctgggtttgccagcgcatcgctgcaactaatgattaaagaaaccaaaccgaaacttacctttctcccttaaggtttttgtgtatgtgtgtttttaaagtaacggtgcagttctcccaataaggatgagcaagaagctgctggatagttctcttaagacagcacgaaacctaaactgtgctcggcttaaaagaagcaaataaaaagaaacgctttcgaccccaaagtccaatgctaaaagaaatggcgaaaaaaaatatgaaaggggaggggaaacttaaaaaagagtttaaaaagacggagagactaccctcctattgccgttcaactaaacaaaaaggggcaagaaaaacaaaccaaggaacaaagaaaagagacgaaagaacgttttttcaaaaagacgatgtctttctccttgttgctttttagtaggtcgctacaggagtaagctgctgcatctctaactaagaacagaaataggggggaggacgtcttaaaagggaggtggactggaccacagatttatagcaccgtatcaccaaccccttctctgcctccgcactgccgtgtgtgcagctgctctgccaggctcctatcccgggcagcacgcgcggaagtatacgccgaatcgcgccacaacgtaacttgctcatcgccccaggatcctgattggtccacacgcttccattgaggccgcccaggcggggccgcgtgagacgattggctatgggcttgtgtcactctcgagagctcaatggagtcccgtttcaaggtaagttgtgcggggaggtacactcttaacactggcggcgaagggaaatgcaagaagcaaaaagaaatgtggagagagcaacgtgggagggttggaactgtactatcagagtttgcgatatggcacgatctcctttcctcttaaatctttctgcttcagaaagattcatttcctttgccatcactgctgcatctgtggcatatttctttataacatttaactctgtccggtatgtatgagtcattgagagctccctctctttgatctgagtgaaagggatgaatgtacatccattatttgcccgcatgccttttttcgatttgtgttcagtactgtattttgtattagatgttaggtaattgtatgtctttattttaatatacgcatatttcagatttatgtgtccccatgaacccctttttaaagcatccttttaagataaagatgaagtcagaaatgctctcaaataaagctgcacggtttgaattggctttcacttcatgttagaatagaaaagtgtaggataaatatcctatccagaaaaagaggtattgagtagagctaaggtccttcacttcgaggtgtctaatgattctcaaaaagagcagctgtatataaaactggaacaagccactcctctgcatttgcagacaggtacagtccttggaccacacatgtattgctgacagcaaagatagttgaacctttatcagggctctttctgtgaggatttaagaagtttaaccagaagaccaagtgctatcaatgcttctgcttcatagaggaagactactttattacaaccccatattttaacagcattcaggagaccaaaatacagttttatgcatgataattgtttcttcctctaagtgaaagtgaggtcctcaggatcgtctggatgtataagtagacacaatattcatttgacctacgttcttttccagccagcatttctcttttcaatcttgaaagatagcaccaacttcctagacagtttttaccattcttaccagaatgtgtaaatgtaatgtacacattacattacacatgtaatgtgtcttaaccagaggcacatgcctttttgaaagggattcctttacatatttacaactagtcgctatctttgagaatgccggaaaaagaagacacaggtaagagttagagattgcaaaagggtagggtgtcatggaggggaatgggacagaagatcccaaagcaaaatgactttgaagtgaggaatacagtaaatcagtgttctttgagagtgtccttgagtgttgataaatgattaatggtgaaaaacagacctgtttatctcccgtgtagcctgtataacaatatacgagttctgttactttgcatgacaatacctggggcttgagaaagaaggcctgaatctatgttatcttataattagtgtttataaaatcatgccttaacctccacccccagtttttgtataacaacctctggagtcttaatttcaacttaaaactattctctagacctgggtgaaactcacagcaagaagaaagaaaagcacttt

SEQ ID NO: 588334 - DNA, 4001 bp, Homo sapiens
gagtcgaatgaaggaagagcctgtctccacctttcagagaggactgaggcctgtccccagccccacccagggtctcctgggaagaccagcccttccaactaccaacccgttccttttcccagtctgagccacaggaagagcctagcggggaatgccatgaatcgacctccatcctgagctctccaggcctgggacaatggaaagtggatagggggctgtcttcccagaaggaagctgggtcagaggttggtgccccatgggctccacccagagccccatggcagtctccatccattggtgccaggacctgctgggaacaggctgagagggtggttggcccagtgcacagtgcctggcactaacaacctgatcgtgggccaggtgtctgcctcgaaactgcctgaaggcaggcagggtaggacaatgtctggaggctcacggttttatagactaggggtccccaacccctgggctacagaccggtaccagaaccgggccacacagcaggaggtgagcagcaggcgagcaagggaagcttcatctgtatttacagccacccccccattgatcccacagcagcctgagctccgcctcctgtcagatcagtggcggctggagattgtcataggagctggaaccctatggtgaactgcgcatgtgaggaggttgcgcgcttcttttgaaaacctaatgcctgatctgtcgttgttgcccatcacctccagataggactgtctagttgcaggaaaacaagctcagggctcccacggatcctacattactgtgagttgtatatttcactatatgttacaatgtaataataatagaaataaaatgtacataaatgtaacgcacttgaattatcctgaaacccgccctcacccaccaagccgtggaaaaactgtcttccacgaaaccgcaccctggtgcccaataggttgggcgctgcggttctacaacagacagccttcttctgctgtgtgacactgtgcccgtcactttgcctctgtgagcctcagcgcctcatcactaccgcaggaggaaggtgaataacggtattatccccatttttttgacgaggaaagcgacgctcagggaggtgcccagggttcgcagttgaagctcaagccctggtcggcctgcagaccctgtgcctggagcccagtgctcctccctcccgccacgggatgtcactgcgatgcctgaccgggggcgcgttgggcagctgccccgttctgcagaagaacaaaccgaggccccgcgaggccaggcgccggccccgcattccgcgaccggcccggggcgcgggcgctacctggggcgcgacgttgctcaggtagaacgtgtcgtccatggccttctggctccagcggtggttggcggcggcggccaggtgaccgcggtcgaagccactgccgcggtagtcggcgttggtggcacggtggtacgcgtgcaccgagtcgtcctcgcggaagtcgcactcgcgccggtcgccgtcgccgcggagacgctcgggtcgcagctgctccaccacccagagcgcgccgcgggtgcgcgggtcgtagcacagcacgtacgactcgcggctcttgagctgcgccagccccggcagcccgtacttggccagctcgcccgggccgcggggtcccccgggcacagggggcaactcggctgccgccgccacgggcagcacgggcagccggcccagcagtcccggcgccgcccgcgcgtcctcccgccgccgccgccagccctcgacgaccgcacccagccccgcgcccgacgccagggtcaggccggcccgcagcgcccgcatggccggggagcgacctagcggcgggcgacccgcgaggctcttaaaggagccgcgtcgcgggatccaacgagggcacagggctgctggggccgcggacgatagcgtgacctcccttccactcacaaacactgccaagggcttgggcctcggaacccagaagggagcagcagagcccaaccgggtgtccccggcgtcctttctttgcgcatttaagacgccggtatgaggggcgtggcatcgtcgcctcagctcgcgattggccaccatcaggcctggctccgcacccgcctcgcaggccccctgctggtcgtggggtgggagacactctctcctctgcgcctgcgcagggagctcctgcttaatacgctccgcggaagggtcaagcactgtcgaaagcttttactgtcactgcttagtctcaccctctacaccgctcggagagtgagctcctagttcgcagagcaggcacagggccccaggtatatctggccctaggctatcctccatgacaccataaaataagccccgcaattctaccagattggcaaaggtttctttttttttttttttttttttgagacggagtttcgctctggtcgcccagactcgagtgcaatggcgtgatctcggctcactgcaacctccgcctcacaggttcaagcgattctcctgcttcagcctcccaagtagctgggattacaggcatgcgccaccacgcccggctaattttgtatctttagtagagacagggtttctccatgttggtcaggctggtctcaaactcccgacctcaggcgatccgccggcctcggcctcccaaagtgttggcattacaggcgtgagccaccgcgcccggcccagattggcaaagattttaattaacagcagtttgaggacaaggatgcagacggctgatgctggctgctggctggaacagaaacctggggcgaatattccaaaaaacagcttgacagtacagtacaagcgaagccttaaaaaggttcataccgttcaacccacgcagagggctgagctggggaaatctcgggaatgcaaggatctcgaacgcaaatattcaccagagtattacactgccggcaggaataagcaaaatattcagaaatatggactggttaaggacttttattttttgagacggagtctcactctattgcccaggctggagtgcaatggcgtgatctccgcgcagtggaacctctgcctcccaggttcaagtgattctcctgcctcagcctctgaagtagctgggattacaggcgcgcaccaccaggcccagctaatttttttttttttttgagacggagtctcgctctgtcgcccaggctcactgcaacctccgcctccttggttcaagcgattctcgtgcctcggcctcctgagtagctgggactacaggcgcgcgccaccacgcccagctaatttttgtacttttagtaaagaatgggtttcaccatgttggccaggctggtctcgaactaactcctgaccttgtgatccacccaccttggcctcccaaagtgctggggttatagacatgggccacccaacccagccactcttagcatttttttttcctttaaggaaaataaggtcttgtgctgtcacccacacggagtgcagtggcaagatcacagttcactgcagccttgacctcctgggctcaagccatcctcctgcctcaccctcccgagtagctaggaccacagacacatatcatgatgcctggctaacttttaaattttttatagagatggggcctcgctatgttgtccaggctggtcttgaactcctggcctccagtgatcctcctgccttggcctcccaaagttacaggcatgagccactaagccctcctgaggtcagtagtttgagaccagcctggccaacatggcgaaaccctgtctctactaaaaatacaaaaattagctgggcatagtggaccgtgcctgtaatcccacctactgggggactgaggcaagaggattgcttgaacctggagggcggaggttgcagtgagccgagatcatgccactgcactccagcctgggcaacagagtgagactctgcttcaaaaaaaaatatgggacagggtcttgctttgttgcccaggctgttcttgacctcctgggatcaagtgatctgtgggcctcagcctcctgagtaa

SEQ ID NO: 588335 - DNA, 4001 bp, Homo sapiens
ggagtacttacgctgtgaaaatccacaaacgctacaaattgagctccccaccccgttgttaattattcagcagcatatcactgcctttgatcctttaaaaccaggccctaaatgtctgcatggacctttctctaacgaccaagaggaagagagtgttactgcagcgacaaatacgagagagggagatcttggagctcaggtaggggctccgtcttagccatgtgaacttggcaggttagagcctcccttttctcttctgtaaaatggggatgatgatggcagccatcttgcagggtcgttgtgagccgcattaagagggttcgccctatcacaccttactaggagcaaacatttagggagccgcaggccgggagtcaaatccctgctaagtcacttaatatgtctgagactcagtttcctgtcaatcaggtggtgggcagagctttagagacccagaatcagggactctaaaatgccatcaggtggggaggtggggagaagttggctgccccaccgctgttttccttccccttcctccccacactctcagctcatttctgcccctcttcccccaaatctgtcaggaagcccctggatgcacaggtgggtcaaaggatgtccacaggaccggccagcggcttgaggtggccgagggatagggagtgggacatggggctgggggtcccttgctcctcaccgcccctcctctggtcagtttcagaaagcagcagaggccatgaccccttggaagagcccccaggccaaggagccccacagaacccctaacctggcctgcacccactcctgcaccctttctggggatcagggaggtaggagggaggcagggcagggccctgcagccttggcctgttcaaagggtttgaggagctgcccaaaggccctggggaaggtgagctggaggaacttaaagctaaaaataaaacaacacagaagtggccagtctgccagagccctctctgcaatgatccctcaccacccacctcctcagcagctctgagagggaagtctgttctcttccccacttcgctcagaggcccgaaggcagtcccccaggatcacaccacaaggaagtgcctatgtgagatttgaacccagagacggtgctcagagcccaggctgtgggccctccttcccatccattcctcatggggaaactcaaggcccagagaggccaggaaactctcccgtcgctgcacagcattctgggacctaggcttcccggggagtaatggaacgcagctgggtgagcagacgccagagaccagggttaaagtgaaagagtcagcccagtttgcccgaggctttctttcaacactgaaagtcctgcataaccatttagttccagcaaactgggagggttggtgaccctccagagccccaaggatggctctgctgggcgtgagctcaggatacaggaaggaggccgggaatacttggggcctggtccgtgcaccggaggccgagtctccccaccctgggtccctggacacctacttgtggggctgaggctgcagctggccagcagcagggcaacagccagagggagcgtgccgcggtccatgctgtccacgtgggggcctgtgcgctgggccttatcctgtgtccagtggcagggctgcgggcgggcaccggggccggcgtgggctcgcacggggacccgaggggagcaggcggccggagcgacggcgtccctgctccagccttctggggtggcggccgaggggtcaggagaagtggacacagggacgcggggctgggctggagttgctgtccgaaggatgggcggggagggggtgctgggctccaatggatggcagtgacagcagcagtcctggccccagggcgcagatgaaggctgtggtatgaccggcagcagggagctcctggctcatccagcccggccggcccagggaggcaggaaatgcgcttccttagagaaggggctgggccaggccgcctgccaaccgggtagaggaagtgccacgggctttgtcactgggtggggggccctgggatggggggaggcagtggggtgggagggcccaggctctaggcttgtctccccaagcaccccaccctcccatcccaccctctccaaggctggtgggtgggacgcatcagggagccccacagatgaaaacaatcaccctaacagcccaccgaggggaactttcagggggccggtcttggctaaagtagttcctgtagaatttgtgacccacctgagctcactgatcccattttgcagatgaggaaacagaaatccgatgtgttgagatcactggttcaagaagatggtagcgctgggatcctgcccacctccaccacttcacgtcttgtcgggcatcaaacccggcctactaagtgcagttgacatggggctgcctaacaggcaggaaaactgaagctcaggctagggagggaagtcccaaagtggcacagcaaggcggctagggctggcgtctctgggctcagaggagctgcccagggccacacacttcacgtctgaccccttcatgggtggaaaatccttcaccgacaaaacacagctccaggccgagtgtagtggctcaagcctataatcccagcactttgagaggccgaggcagacggatcacttgaggtcaggagttcgagaccagcctgaccaacatggtgaaaacccatctctactaaaaatacaaaagttagctgggcatgatgacgtgcgcctgtagtcccagctacttgggaggctgaggctagagaatcacttgaacctaggaggcggaggttgcagtgagctgagatcagaccactgcactcctggcctaggtgacagagtgaggctcggtctcaaaaaaaagaaaagaaaaaaaaaaagaagacagctccaaattatggggactttaatggcacttctgaagtcacgtggccctgggttcaaatccgattctgcttgctcctagccatgagaccttggacaaggcccctcaattctcagcaccccctgtttgcaaagtggggcacgatgccttcctgaccaagccattatgagatttctgagggtcaggacactacagcactgagccctgggacatacaggagatgcttccccatcagtgctccctgagctgggtgacagtccccaaactgtcccatgttcattctgcaaacagtaagcgcacctactatgtacccaccgtgggactactcacaggtagcacccagggccaggcccatgaaagctcagagaaggaatcctgggccacctggagggcctggtatttaggcctgccctttgaaagactgggtgagttgggattggggagaagaaggggtgaggaaagcatgccaggcaggggtgccagactaagcaaaggcacagaagcaggaaacagtcggaccaccgtgagaccagcaggggtgtggtggggacaggaagctggagaggcagagtctggccctgcattgggagggcctcaaatgccaggactttgtccttagggccactgggagtcatggagagttcttgagcagaaggacgctggcagagctaggctttgagaggccaaatctttgtgtgtgctggcaggacccacggtgagatggagccagaaggttcttctccctggatccacctgccctgggtcacaggtggagaaattgaggcccagggagggaggagaaggctgaggccctgggtgcctctggagggaggatgtctgtccagggtctgaggccttgcctctccgtgcttattggccggcccgggtgacaagagtaggccgtgtgtttgtctctgcaggagctgtcacagcggctgggagggtcggtgtggctctttgggtggggattagggatagttttgcttgcccagccttgtggctgcctggccagtttgcagccaagcgtggctttgaggtcaagggagagtgtcctctcccagagggccaccctgagaagggcatctcctctgccttttcctgtaacctcggaga

SEQ ID NO: 588336 - DNA, 4001 bp, Homo sapiens
aagatgggcgcggagagactggcttcatgtccagccaaggccggctcagaggagggggcagggaggcttcttctgaaccctgggctgtctggagcctcaccggcctccttcctcaccttcccacagcacgttgggctctgggccccagaagtcagcaaaggaagtgagatggtcaccccttgccatggcaacgccattcccagctctgtcttgggaaggagaagatctggatgaggacttctggctgccacgggggcccaggccttatatgtcgtctctctgaccctatcctacatgtcccagggactctggagtgcctggacatagtggcattttggttaaaagcaagctccctggagccaggctgacctggtttgcctctcaggcccaatgcttaccagctatgtggctctggtgaatgatttcacctcttggggcttcaatacctggtctataaaatgacaacagagcccacatgatccacagaggtggctgggaggactccatgagactgggcacatggcaattctttcttaaatttctatttgtttatttttcagacaaggttgccctctgtctcctgggctggagtgcagtggtgtgataacagctcactgcagccttgagctgctgggttcaagcgatcctcctgcctcagcctcccaagtagttgggactacagttgtgcgccaccacgcctggctaattttttaaattttcagtagagactgggtctcactatgttgctcaggctggtctcaaactcctgagctcaagcagtcctcccgcctcagcctcccaaagtgctaggattacaggtgtgagccaccatgagtgagccagcatgcctggccggcagctttctcttaattacaattatttgactgacttcagtcactgtagaattgactgttctaaggggtggggtgaagtggcgggatggggtggcctccaggtgacggtcctctgggatggagaggtcactgggatctccctcaccccaacaaaatcaagggctggtgccatctcctgtctccagtccctctgacccaccagcccccatgttctccccaccctctcctttcctcatcggtgagcgcaggttccttggctgttacctagcttaagcccctcctactcagatggggagactgaggtctggagggacgggacaggtcaaagtctcacagcacatggttgaccaggccgggcctcggacccgcgtctcccaacatgacccagtgtctggcctgcagattatcgcagcgcctccctccttccctttgggactttccctgccccctccccagacttccaggaaccccagttcctcccggattgctggggccgcctggggccgcctcctccatgccgtcagccagcgggagaggccacaagcctggccattatgtaatgatcagataacaggcctggcggggagatcagataagaggtccatttattttggggccttttcgaatcctggccgcccccaccccgcagacgagaatggggagacaggagggagtgtgacgcctgggcctgtctcccggagcctgaggcgggcccagaccaagttgaaaacaatcccctggcaccaagggaaacgccagggcctcccgggactgggtcagaggaggagccgctgggggcctgggtgactggaaccccaagtgagagacccagaagccacctcccaccactgtcccctctccaccctcgccacccatgtgcacacagcacctcccagatttccagagggctaccttcagcaccttggaggatgatcaagaaaaacagctctggagccagatggcctggatcaaatcccagctctgcctcttaaaatgctggtcaccttgagcagaagcctaacctctctgagcctcagtttccccatttgcagaccaccaataatcactgcagatgctcccatcatgcttactgggagcctaggcagctttacacgagtgaactcatttgatcctcacagcagccttgtgaggtgggcggcgctattacacccatgcacactccaggaaactgaagaccagggcggttaaagaaactgaagaccagctgcccgaggtgacccagctactaagtgtcacggcctggatttaaacccagacagtctggctccagcaagcagcaggcattcacaggctgagtgtgtcagtttgatggggtaacccctgttgagtgcctggtactaagtaggtgccccagacacagaagctgtgaatattatttcatcatactaggacagatacttttcttcccgctgccacccccccttttcttttctgagatagagtctcactctgtcacccaggccagagtacagtgtctcgatctcggctcactataacctccccgtcccaggttcaagcgattctcatgcctcagcctcctgagtaactacaagtggaccaccacactcagctaatttttgtattttttgtagagacggggtttcgccgtattgcgcaggctggtctcaaactcctgggctcaagcaatccacccatctcagcctcccaaggaagatacgtttcaacaagggtccttcttgctgcaatgcctgccccgtcttgttcagtacccccgggccactctttacccttttcaggcccaattacagcctcacaggtttcccagcatccagcccagccactgcccccagccaccaggaggtctcagcatgccttggccccgggctcccccctggttctacgatgcctgcagggtcaagttcctgcactgcagcctacagtagaggtgaaaagcacagcgatttgacagatgccaaaggttcaggtcctgattcttccacctgccagctgcctttccatcctcagtgttctcatctgtaacatggggatgagggtcatcataacagcttcccatggagtcggcaagcaggccagtaaattacacctgcacagcgctaggccggctcctgctaagtgggggttgctcaggaactggtgactactatcacaattatttatgcccagtcagtggggatatgtgggctcttcccctaaacacacctcgctcctgcctctgccatgccctttcccagaccaacactcatcctttgtttgaccacctggccttttttttttaattttggagagtcggggtcttgctctgtttcccaggctggagtgcagtggtgcaatcatagctcactgcaacctccacctcctggcctcaagcaatcctctgcctcagcctcccgagcagctacaggtatgagtcattatgcccaactaaattttaaaaatatttgtggagaaagagtcttgctatgttgcccaggctggtcttgaatgcctggccgcaagtgatcctcccaccttagcctcccaaaacgttgggattacaggcatgagccaccatgcccagcccctagcaaacttctattcatccttcaaaaccctgtcctgaaaatctcactgaagccagtccctcctttcttaggtgcatccgtccttgggtgtccttggagaaccagaccatacatgcccaggtgtgctgttttgatttgtcagtgtgtctgcactcccagcagacagtgagtttttccaggacaaggagagtccacagcattccatgtcccaatcagttagtccagggctcagagcaaacatccacttccactggatacagtgagttctagatttctcttcaaagaatcagtatgtcagtatgttcagttctttgtcctccattttaaagtttaacttcctcatggtttcagtaaacaaccttttccaccagttttaatcagtagttcacatctgttcccctggtcacctgctccatcctgactcatcctggtcatgtgctttgacctcacaaacccctggtcacctgctttgacctaagtcacctttagttacctgttcctaaccatccttcccgccaaactactcaccccgccactctggctcatacccctgctctctctaaaatagctaactggaattagc

SEQ ID NO: 588337 - DNA, 4001 bp, Homo sapiens
gggtagagccatagttccatttattatccagcaaacactgggaggaccaggggaggggcccagcctggacaccctcctattattgccatgggttccagtttgcttccccagcctagagggcctagaggtgctcagcctagggaaagagtggacccggcccctgacccttggcccttgggatggagcatagtccagatggccctggctctagcaccaactcataagcccccaccccaggcccatctccttagggccactgagctcctattggagccaagctggctagactctgggccgctgggtccagctccaagcaggcggactcttgagttctggaccccaggctggctgaactctgggatcctaattccaggctctaggtgaggtggacttaggtcctgggctccaggctaggccaggggccttcagggctgcagcaggtagctgccttcatggctgggcttctggggtggtggggccttctcaggacaggggccagggctggagttgggactggattcagagagagagtcaacgtcggcagagcgagaatggcaggcccagcagaggatgacccagagcagcagcagcaagaagcccacgagaccgttgcagacgatggcgatgagggccccctgggagatggctgcccccatgacaggcagcaccctcagaccagcacagacagtggagctgcctcaatggtgaggcccatgccgaggcaggactctggtatggccggccttcagaggaggctgtgctgtctgcacgctcagtgattcctgggcagtggagatgtctacctgcagtcctgagcctgttgggggtatacagtaaaggagagggtggtgaggaggaagggtggggtgaggcctaggaggagagaggtagggaagagagcctccctcccacatttctggcctccctggtgaaagaccttgggtcccaacaggctcgaataccccacagagccatcacccccatccacaggcttggttctggccacctgaatgagtgtgtagccaccgtggggaagctgcagtaggcagccgtcatctcattctccttagacctggtgggcatgccctggtcctgcccaccaagcttgcagccctcaaaagccctctgttggtgggtgggatccaggaagcccccagcccaaaaggatgggggttgtaagcagctctggtgtggcctgggcgcctcctctctcccaggactccagccagcccgaccaggagacctccagaggcgccagcttgcacagagggaactttgtggaggccctggcaggcatgtgcaggctctgtgcgtccagggctgtgtgcctctatgtggggctgcctctctgggtcaggtgtgtgtgtgtgtctggtgtctcactgtccctccgttggatgtgtgcctgtgcctctgcacacccacctctgtgtgtgtggctgcctctccgtgtgtccccatctctgagtatgtctcctctatgtctcatttctctaccagtgtgtctctgtgtatctctgcatcagtctctgtgtctctctctctcttccaggctgtatccccctctgttcccatggacgtgtccctatccccttctccgtggggtcttttcggtggttcctgtgtctctgtctttgtgttcgtctctctccgcggcagtgtgtctctgtctctttatctccatcttcgggtcgcgtgttcttggcccccgtgcccgtggcgggaggcccttcttacctgagttgagcctggtgcgcgcccgcgggagggtccggggcagcgggatgctcggcgccgactaaggcttgggagcctgcgggcggggggcggcgggaggtgggagaccagcagaggcgacgtccgctcccccggccctccccctcggccgcgcagcctccaccggccgctcccgccgcggcgcgaccggggcggcctctgccgcgggcggtctgcggtgagcgggcacctcctccccttggggccgcacctcctccgcggccgcggcgctcgctcgctcggcagcgctcgggcggcggcggcgggagctgcgcggtgttcggctgggctcggctgcgttcggttgggctcggctgggctcggctacgttcggctgggctcggccgggctcggcggccagcaaaaacagcgaagagcctcgcctcctgggaggccggcggcctgcggcccgggggcggagccatcccagcgccgctgccgccactcaattggctggccgaaccccggttcccgcaccattggtggtgcgctgaggtggggaccagcccgcctctcgtgccggcgcggggcgggaggagggccgaaggagtagctggccctggatccttcccgggagaggggatggggtgggggcaaggcctaacctctggtagggatttcttgcaccttctacacctggaagggttgtacaccccacatccgagaaaggccaaggcctctgcatttccacatgtgaggaaaccacccctctgtatctgggagaggtctcttaagtaagtcatccggaggaaggccccgcgtccccacacctggcaggagactgaatctcctcacctagggaaccgcctatagtgcagtcccgcacttccctctgccacctgggtgtggactctgcattcccactttagagggccccaggttccctggccctaagaggtgtgaaaatctctggcaacacaggttctttggacacatttactgagttcctacccagtgttggtcgcaggcttgctgccaggctgttggggagtctgggacagaaatggagtgtcctgagcgatggttctgccctggctggaataggtgcaggcgtggtggaaatcctgccttgccatcctaaaagctcccctaagaagaagatagcttggacaggagcagtgaggtagaccttgtcctccccgaccttcacaggccagtgattgtcacctattctgatccggccgtcttctcatcccgctctacatgctctccttggaggatcacatccctgaagctatatcatgaagactcccagtgctcccaagtctagccttaacttctctctggaatcctagactcatataactaagtgcctactgtaatcggggcagtattgattcctggttcacttactaactttgtgatcttgagcaagttactaaatctctcttagcctcagcttcctcatctgtaaaatggttgtaatgctacctctcagggttgttattcactaatttatagcagatcgatcacatctcagcaaatgccagctgacacaacccccaggaccatgtgactaagaggccccttcccccaatccaatgccatgaaattcacataagacccctgtaaatccagatgctatcttgaaagaagaaagggaagactgagtcatccaaagctaccaaagtacttagagactgtctaaaataaattattggatcctatagagtttaccagagtggattacttttagctcccccccactgcccattacccagcagggtgagggcattgtgagaaagatcagcctagttataggaaacagaggagacttaaatcatcgcacatctgagtgtaatgtgagcgaattttgtgacccagctgcaggagttcagattttatcctgaaaacagtggggagccactgaagaatttttgagcagaagagtaatgcgatcatatccagaaattagtaggatgatttgggctatggtgtggaatgggggcttgaaagcatttgagagtgaaggcaaggattaataataagggactgaaatgatggaaggaaaaagttgtagagagaaaaggagagcattgaggatatttgggagctgctgctggtgggacttagagaactagaggataggggaggtaagcaggaaggaaaagtctgggatgactcccgggttagtgacgagggatgctgtgatgccatttactgaatacacaggttcaggagagaggtccaggctaaagataatattttgtgagttgtcagcaaaa

SEQ ID NO: 588338 - DNA, 4001 bp, Homo sapiens
gcaaacgactcctggccccactcaggcgcaggggcaccagcctctctctttccagggcttctgcctggagtgagccccacccaacactaagcagaaggacctgcactggctaaggctggagagggtcccagagaccctgcagtgagtgggcgtcctggctgggctgggctgggcctcacctggaacatcacaggagctgtgctggcccacaatgcctgtgtcgttctccttgtctgccggccacttgtagataaacatggacgtgtgtgaagaaccagcgtccaggacgatgccatactgcgggggagggggagggagtcagcctggggtgtccgggggccctgacaccctgacaccaaacgtgaagttgggttcctccagtttgccaccgctcccccccccacccagtcatgtgccaagcctcatgctgaagctcagaggaggccagggcctcctctgaggccgtggttggaaggagaacagggaggtggtggggaggtgactcttccctcctgactacctgaagccagcatgccagggtctgggcagcagccttcctggcaagggcagactgagggactgagtcagggacagagggacagagggtccccagggacttttccctggggcacaagtttcccaggctcagggagaggaagctcctctgcaagaggagctccctagagtccctcttccttcctcccctcttccttcctcctctgtctccttccagctcctctgacggcagcccaacctgaggatgcaggaggcagggccccaggtgaagaaggtccaccgaggctggccgtgggcctcagagccaggtcagctctaaagacactctccctaggcctccaagccagggccagagagagaggctggccctgccttgttgggggtgctgggtgggccttcctgcagacctgagtggcacgagcttgtaaatgcccttttccagctcctgccccagcatcctggatccacctggaaagctggggaccagcctcccaggcccgggcgccaattccagcctccgagagggccgcaccagtccatcccgaccaaggcttccccagagcccagagcatcaacaggtcagcgcgtgcaccgccacatggccgtcctgcagggccgcagagctccctgcttctgactccccatcaggctgggggacttggctctccaccccacccccctacaagcccaataaagggttaaaggggccgaccaggaggtccctgggcctgctggagtggagatccaggctagcctgctccaaccttttgaggaccggccagggctgctccggtcaagccctcctgtctttctgggccactctcgtgtcctggcgggggccctgggtcctggggcttgtggatccccatctgggctgaatacccagtcgatgtggctctaaccgcaccctccggggcggcggcacagggcagaagtggcccggagtgcccctgggggcccgcacaggcctgggggcgggcgtccggcagcacccagggggcatcgctgggctatcccgggagcggggacacagcccctgggctgcgttgacggactcggcggcgggcgcggaactcccgggacttgttccttcagcaccgcgtcgccctggaagcgccaccgccccccgccccctccgcgtacccggtcggggagcgcagagcgcggaacccgggaccccacccagcccgccaggagcagagcacggtgggggtcccgggctgatcctgctcaggttcccagccgcaccccctccccggctccaagcccggcccgctgctccccagacgtgcgctgggtgcccgggcgcgcaccttgagggcgggcggctcccggacgtcgcgggtggggacgcacagcagtaggaggccggcgaggcccgcggcggccagcagcagcggcggcagcagtgaccgcaccttcccggccatgggcgggcgggcgcgcgggaggacgatgcgtggacccggagagtgcggggagccggaggcggaggcgggcggggccgcgggaccgcggggtaggggccccggggcgggacgaggggcgggaggccgggcgggcccgcccatcaccggccacgcccacgggcggacaggtttcgcctccgctcccaagcttccgccgtccggcccgcgcaggtgagagacgcgggcgcggctgagtcaccagcaccgccccccggctcccgggtctgagcccgggcgccccgcggctatggcccaccttccccttcccgcccactcagcaaggggatcccccggccgtggaggcaggagacctggcgtgggggtgggcgggcgaggctggctcggagggtcctgtgctggagagccgcgcttttcccgggcccgggaaaggaggccagactcgcttgcaggaatgaggcactgtcggctgcggagccacgcggggcccgggctggggactcaggaggaagccgagggtcagcacctgtttgtggagcagggccctgagcgccaactcccagggctggtgaggaccaggctggcctgcgggatgccctcccggccagcaaggatccgccagcctgcggcgctgagccagcgcaggtcagctccagagacacgcagctgacccaggccagaactacccttgaggcccagtcagatccacctcacctgggccctgtactgaggtgaaggtgaggacgcaggaacggggaaggggagggacggcccaggtcacaccgagccgagaaacaggagaagcagcacagaccgggccaaaggtccatacctcccagcccagggcctcagccgcgcctgctgccccctcggcctgaggggaacagaggcttgggctgcggaggccagaggaggcttccccaggacggaaacaggtggggcctctacgtggcctgaaaggcaaggaagagggtccccaggccaagcttggggtgcgggtcagcaacaggcttctggggacggctggggcaggcgaagcgcagctggccccagacgcaagccctgctcctccgtcccacgacatggctggcctttcggctctgcagcctcacaggccccgcatcccagcccggccaggggccaccccctttgcgcctgctgcaaagtgggaattcttgtcccaataattccagccacacagcgtcagggagccacgaggcaaggccaccagggagtgcaggctgctggggcccaaagggcagccccatggggcagggtccagaccatgcccggccttctggaacgggcagtgacaattgtgctgggattgctgcctgggctgagggtctggcgccacaggcccagtaaaggcatctttcttccagctcaggaccccaaagggaggggtgggaaccctgggaagcctctctgctgcctcagcctcacagcccagcctggcggggctccagcaggcaatctctgggtgttgccggtgctaagctccaggccccaggccccagtttccccccacacaccccaggcctttcttccacccctgaccgcccagaggagggagaggcacgcacagtgcacatcatgcctgaaaaggaaggaacaaaggccgcccagaggcagggtgctgcgacccccactggcctgcggtaccccgcttccctccaggcccagcggggcttcctggtgttctggactcttttcatggacaaaaagctcaagccagggagtgggaggtctgccaggcctgagaggatggggagggagaggggagctggactctgccccggggagacaggctcatggccgagtgcccagcttcgcctgcggagggagaggcagggagcccagagcggccaggacaaaggctgaggctgagctctctttgagacggagtgagggcgggggaacgccccttcctggcatggactcagggaccctggaaggcagacttgggagagcgtcagagggaagctggcaggagctgaaggggtggaggggcctctgggtggggcagctctcggcttccaggaccctctcggggat

SEQ ID NO: 588339 - DNA, 4001 bp, Homo sapiens
ggaaacgttgcacccacactgagtggcaggcgcgggtgctgccctggtcctgacctggggctcctgggcacgtggaaagtgggacacgctgtggggtcctcacgcaattctgtatgtccgggggatataagcccattttaaggagggtagatgacagaggctcagagaggacaggaggccggtccagcccagacagggcccagcctgtgtccccaaccagcacccaggccataggccacctcatagggacaaacaggtgacaggggccaggaacacagggactccacacccagaagatgtagccacctgagacccccaggcctgagcctccaggtaggcaaagaggttggggcaacctctcccacactcaaaagacccccaagaccagaacagcctcccagatcagaacagctcctcagaccaggaaagcgccccccagaccagaacagcccccccgagaccaggacagtgcccccagaccaggagagccccccagaccaggacaccccctcagacagaacagtcccccagaccaggacagccccccagaccaggacagccccccccagaccaggagagccccccagaccaggacaccccctcagacagaacagtcccccagaccaggacagcccccccagaccaggacagccccccagaccaggacagcccccccagaccaggacagcccccccagaccaggagagtcccccaggccaggacatcccctcacacagaacagtccctgagaccaggacagcccccccagaccaggacaccccctcacacagaacagactcccagatcaggacagccccccagaccaggacagccccccagaccaggacagcccccgccagaccaggacagccccccccagaccaggagagccccccagaccaggacaccccctcacacagaacagattcccagaccaggacagcccccagaccaggacagccccccccagaccaggacagccccccagaccaggacagcccccccccagaccaggagagccccccaggccaggacaccccctcagacagaacagtcccccagaccaggacagccccccagaccaggacagccccccccagaccaggagagccccccagaccaggacaccccctcagacagaacagtcccccagaccaggacagcccccccagaccaggacagccccccagaccaggacagcccccccagaccaggacagccccccagaccaggacagccccccccagaccaggacagcccccccagaccaggacagccccccagaccaggacagcccccccagaccaggacaccccctcagacagaacagtcccccagaccaggacagcccccccagaccaggacagccccccagaccaggacagcccccccagaccaggacagccccccagaccaggacagccccccccagaccaggacagccccccagaccaggacagccccccagaccaggacagcccccccagaccaggacaccccctcagacagaacagtcccccagaccaggacagcccccccagaccaggacagccccccagaccaggacagcccccccagaccaggacagccccccagaccaggacagccccccagaccaggacagccccccagaccaggacagcccccccagaccaggacaccccctcagacagaacagtcccccagaccaggacagcccccccagaccaggacagccccccagaccaggacagcccccccagaccaggacagccccccagaccaggacagccccccagaccaggacagccccccagaccaggacagcccccccaggacatccctttggaccctcacctgggctggctgcccacttcccggagcggcaaggaggaagctgtgcttagacgcttctgtgtccgcgcacctggcgtccagcctctccctgcccctgggtccaggacagctggggtgggcggggcagggcggtgacagcctcgggcgatgcgctgtgcacctggctccagggcccgcaggctgaggccagcgcccaaggtcgccccgcccactccaccctcgggtcccccgcccagggtctccccgcatctcccacccgcgggtctgtctcggtgcccagggtcgccccgcccccgggggggtgggaggcaggagagggaagctgaggaggagcctggagctgcgaggggcagaactccgggaccccgccccccacggcccgcagccgcgctcctgaccccggcccggactttaccccccgtgccgcccggcccgggcaggtcggagtcaggtgaccccgaaggtccaggcccggggcgggggcggaagcgcctgcagccccgcggcgcccgtcgttttccatttgcagccactctgcctttcccgctcgccgtgggtcccggggccgccgccgtcggggtccgggcctctgaagcggggcggggctgggggaggcgcggagccagggccgggctgggtggggctgggggtgttggggggcggggaatagggtgggggaatgcgggggggcggtgaattcctttctgtgtgagatccaagaaccctcttggggtctcaatcgggactctctttactggtagcatatttggtgtcatgtgtgtgcatttttgtgctttttcttggtgatttcactgtttataatggcgtctcagcatagtgcagaaatgcaagaaggctgagatgcactttacagagaaaacacacattggataagcttcattcgtgcaagagttagcgctgttggccatgagttcaatgttagtgatacaatacatattaagtaaggtgcccttaaacaaaaatacacataaaagaaggttttattaatatattgatcatttaacaaaaatgtgaccagaagcttgcaggaacagaactttgcatttcccttaggagcaatagtttagcatattctttaattcagtgtttgcagcaactttatacactagctgccatgggtcataagagtcaaatgtgtttgttgaggatttttgcagttgtgttcaacaaagttgcatagttttcttttttagtcctggtttctgtatggggataatgctgggcttataaaatgagtctgggaagttgtccttttttttttttttttttgagatggagtctcgctctgtcacccaggctagaatgcaatggtgcagacttggctcactgcaacctccacctcccaggttcaagcgattctcctgcctcagtctccggagtagctgggattacaggtgcctgccaccatgcctggctaattttttgtattttcagtagagatggggtttcaccatgttggccaggatggtctcaaactcctgaccttgtgatccgcccacctcggcctcccaaagtgctggaattacaggcgtgagccaccgcgcccagccagctgtccttgttttattttgtggaagggatttgaagaatttgtattaaatttcttctttaaatattttgtataatttggtggtaaaaccatctgagccagtactttcctttttagaaaagttttaaagtacaaattcagtttctttaatacttaataggattgttcaagttgtctatttaatgagttttggtagtttgtggctttcaaggaattggtccatttcacctaagttgctaaatttatgtgactacaattattcatagtacttcctggttatccttttaatgtctgtagggtctgcagtgctaaccctcccattcctcatattggtaattttgtcctctgtgtctctcatcagtgttgctagctagaggtttatccattttattcatcatttcaaagaacctgctttttgtttcataattttttctttttggtttttgaatttttaaatttaatttaatttaatttaatttttttgagacggagtctctctctgttgcccaggctggagtgcagtggccggatctcagctcactgcaagctctgcctcccaggttcacgccattctcctgcctcagcctcctgagta

SEQ ID NO: 588340 - DNA, 4001 bp, Homo sapiens
ctctcatgaagtccaaacatttctcccacccgggaaggcctatatacttccttggaagtccgggtatgttatttcttcccttgacatcctcgagatgatctgtaacattcatctaaagctcaattaccgctgtgtcctcagtcacacccagaaattcccgaaggcaccgtctgccgcagcgccgggtgcacagtgggcgcccgattaatgtgtggtttgatttgatctgatctggccccttcagccaggaagactcactggtaactggacgccctgcagcggaccgcagcgccggcccagctctcagctggcgcggggcgggggtgcaaccacctgtgggcgggtgcccgggacgcaggcccaggcgccgccgccctgaggtgccccgccgaccccacgcacggtgcccaagggagaaagtcaggcgcgcctggccccccgggcaccccggggtcgactcccagcgccccagcaaagggctctgccggtgcaaggcaggcaggtctgagacagccgactctagagttagctcccaagtcaccctacccgctgcgaggaggctgcggggcagatggggctcagggaatgggaatggggtgtatccagaagggatcagcagagagcagaaatggtctaacccccgcctcccaaacttggggcgcctgccgagcagcaagcgaggggatctcctctctgctgtctcatcaaggcctgatggcgagtttgaggggggacaagctggacaccccaggacggcctcacattgatttgagattttctacccaataacccagtatcaggaagacccctgctggaagctagggacggaaggggagcgccggccacccacaccagggggggcggggtctcgggacttggggaccgtgtgtactggggagggggcgaggccccaaggactaggtgggcgccagagaaatcgcaaccccgcggcgcaatgtgccaaggagggggcacgggccaaaggtggggccccggaagagaccgggacggggtggcccaagaagaaaaagggttgaggagtgctcggagaagaggatgggggaggggatccccagggaggtgcaagggaagcgcccccgatgcaagcactgggggagggggagctgcctccaggggcgcgaggtgccagtgccccagactggccccgtcactcaccggcaggtccacgctcacttcggtcccgtcgagcaggaagacgcggcagtagagggtggccttggcggcgccggcggcggagatgtgcacggccgcgccgccggtgagcaggggcccgccgcccgccgggaacacgctgcccccgggcgcggcgggcagcgccgaggaggaggcggcggcggccgggcccccccgtggccccccatcgcgctcgtcccccagcccggcggccccgcgccccgccgcgccccgcgcgtagcgctgcatggagcggcggccaaaggtccggcgcaggaaccgcagcatcctggctgggggcgccccctgcctccgccccctgcgctgccgctgccgctgccgctgccgctgcgccgccgcccgggagcgtcccgcgacgccgtcagtgccctcggccgcccgcgccgcctctcgcgggctacggcccggggcaagcccgcgccgaggccgaggccgcgctctagccgcctgcggggcgcgccggcccggccagcgccggctgcgagtggccgcaggcgggagggcgcgctcggggccgtcccgccgccgccgccgccgcgcgctctcccgggccggcggcctgcgcgggctgccgaggggctgctccggacgggcggctgcgggctgccagggggctgccgggggcgcgggaggcgggctgcgggctgctcccgcgccgcgcgccggccgagggccagccggagcagggcgcctgcgtggtcctggcgcgctcgctcccactcgccgcgccgcgcccggggcccgaggaggccccgccgagcgcccgctcccaaggcgccttttcctgcgcccgcagcccccgcctcccacctgggaggctgcacctccagccgccgccgccgccgccgccgccgctgccgccgggactgcagcacgccctcctccctcggggctgcgccgggtaattgcaagccgggtctgtgctgccccctgccggcccgagcgccccctgctgctgtaggtgtgctcacgtgtgtacacgtaggtgagcacacacgtgtttccggcgcccagagccctggaggcgccgagtgcccctttgcaccgataggaaaacaaggccgcgtgccctctgggaagcgttgccccggagaccaggcagaatagcactacgttttcccccatgaaaaaatagcactgtttcctcttctggaaaaggagaggggtggactaggtaatcaacacggtaatctacaaggtccttgctacttaagttctgtcaatttaagatctcagagctggaaggacttttttagtcattccagtccagtggactcattccacataaggaacttgaggcccggcgaggagaggaagtatttttccaatatgctacgcaagaaaacacctttcctcaagatctcaggtccagtattgagataaaggcctggataaataacagagaaggctagtgaagttgaaaattactgagaagcagagtagatctgaggctctgagaatgaatagtgtaggacacactgagaatattggagagagacggaattgtttctaagcagtggccctccagtatacaagttcaaggtccgcttcgagtgaagagggttgaccagtgctgctaaatgaggaatgtggaagaggatgaagctgaaaggaggtcaggcctcttgggaagaataacactactatttatcattcccttaatcttgtgccaaacaccgtgctaagccctttccattcatcatctcaatccccacaacagcctggttagatagacgttcttatccccattgtacagaggaggaaactgaagcttagagagcttaagagacgggctccagattccatggttaagaccagctctttcacccagctccaaagctgttggctgctaaccactacctctgctgccaggcagaggtgtgtgcatgactggcaggcaggtgaagatgtctgagaggcctggaaaacgcagtggacacagcaaaaaagacaaagaggaaggagtgcatttatgaggcattctaaaacagacatttattaaggatcaggcgctgtctgaggtgatttcatggatggaattttcattagtccacactccaatctttccaggtattctatgtaacccccaagtcacataggactgcagttcgggtcttaagagaagtaatatccttgtccgaggtctcagagctcctgagtggcagcagccagtaccctcactcattgtctaatgttctttttatgatactatggaggtctcccatgtgacagtgttctctgagagggcatctgtaatcggccttcaggtacccaatctactcctctcccaccgctccaccccagactgtatttaatagaacacagccacaagcagatgttcaaaggtagtccaattctgcttactggtttctaaggatagtccatttcctactatatagcccaggagtgctgtggcacactgactaatagccacccaaagatgtccgcagaccaattgctagaatccgtgaatatgtccctttatgtggccaaaaagactttgcagatgtgattaagttaaggagtttgaagtagggcgattatcttgtattaatccaacgtaatcgcaagggtccttataagagggaagcgggagggtcagagtcagagaaggtgtcacaacaatggcagcagaagtcagcataatggaaccaggatataaggaacctgggtagctgaaagaagctagaaaagataaggaacaaattgacccctagagattccagaaggaatgcagccttgattttagcccatgaaacctccagaattgtgaaataatacatttg

SEQ ID NO: 588341 - DNA, 4001 bp, Homo sapiens
catgggaaaaactgcacatagactaaatgttctcccacaagataacagataaattatggacgacacacataaaaacggtaccattaatatttcatcgtttttgagcaattcctgagacagagctatggaaaaataaaacaaagtcacaacccaacactcatgccatgagttatgaaagtataaaagttgaaacactggtatctttctagggacagacagtttaaaaaaacaagtataacaattggcctaatttcatcttagagtttggttaattaaatataagtttcacatcagtagggacttggtgttagacacttggctatcatccttgaaaaacataatgttttatccctactttatgccatacacaaaaataattggatttaaagctcaagttaaaaacaaaaacataggccgggtgcagtggctcacgcctgtaatcccagcactttgggaggccgaggcgggcggatcacgaggtcaggagatcgagaccatcctggctaacactgtgaaacccgtctctactaaaaatacaaaaaattagccgggcgtggtggcgggcgcctgtagtcccagctactcaggaggctgaggcaggagaatggtgtgaacccgggaggcggaacttggagcgagcagagattgcgccactgcactccagcctgggcgacagcgcgagactccgtctcaaaaaaaaaaaaaaaaaaaaaaacaacgataaaattacttttaaaattcaagaaaacaatattttggactggataaagcctgcttaggcaagacacaaaatgcagagattataaagaaataaataaacagaactgatattataaaacttgaaatcttctcagttattaaagatacttaaacaggcttggccaggtgtggtggctcgcacctgtaatcctagcactttgggagggtgagatgggtgaatcgcttgagcccaggagttggagaccagcctgggcaacatgatgaaacaccgtttctacaaaaaaaatacaaaaattagcttggtgtgatggcatgtgcctatagttccagctactcggaaggctgaggtggtaggactgcttgaaccctgggaggtcaaggctggctgcagtgagccatggtcgtgccactgcactccagcctgggtgacagagcaagactctgtctcaaaaactgaatacgatacaataaaataaaataagccttaaagataagcagcatcttggcagaaaacatttattacttttaccgtaaaaaggattaatatattctacataaaaagagcccttaaaaagaaatgaaaatacaacctaatggaaaaatgggcaagggtatgaacaggcaggtcacagaagtagaaataaaatacccaacaaatacagggggaaatgatggaaatttaaaaaggacacttaagtgaaaccaggataatcaacttttgcatatacatttctattcactttaaagacttacattgttttatatctttataataattgccatttttctcattagcaggagcataattgggagtatgatcttcattcttttcttcctgcttattaacatcttcatttaaaggtagcacattaggcaatgctaaaaaaaagtatcacacaccatagatcagaaatatgttgatttcttttactgctttctttttctaactgcatttttttcacaaaggattagaggcagagatttaaaatctaaaacataccatagctccaacaataaagtttatatcctcctgtagaaaactgccacataccaatttttcatgattatgggtcatccttcttacctactatttttataaaagttttaaatgctctctcaccttcaatagtaggcttcaaagtgctactttttaaggaaaaaactccaggtataaaaataaacaatataaaattcattgggaaattgaagtgatttatccagtaatctagtgcgtctacccagagcctcctttctgtggcccagcaggtcctgtgtctaactaggacattatgacatcactgtcagatgggcatcagaatgttggtgggggtgggggttcccaacagctttgtgactcagtctgaagactgctttatctcaggtactataatggtttttagttattttttaaataaaccattacaagattttctttgaaagttaataagtgtgttttcataaaagaatgttaattactcggctctggattttaaagaaccatttgtagagcactcgattctgtggctagtcagggtgccacttgtaacccgcacggacctaggggactgaacaaagggggacgaatgcgggaataaaagacaaagacaaaagagtatatttggaagaaggggtcgggggcaccttgcctctagtgggcaagggccctgagctttacacagccctctgtatttattaggcaagagagatagtgagaaggaggatggaagaaggggtcagctgcccggtccagagtaggcatgcaacactgcattctctagatgtcgcagtagataacctcggtgccagggagtgattgcctccagcaaaccttctgtgggcaggagcagtcgtgagtttgcccacatcctgcattcataataaacagtttgctgtttgatcatatagcctccagtggaatgctgagtggctcacgtcccacgagccttcggctccctgcaaccattaatattgttaagagtaaaatgagaacagatctttttgtttctcaaagcattgcaatatgatgtgttttcttggataaatgcaataaaaatatcttttaaaaactagtcagaggctggacgcagtggctcacacctgtaatcccagcactttgggaggctgaggtgggcagatcacttgaggtcaggagttcaagaccaccctgggcaacatggtgaaacctcatctctactaaaaatacaaaagttagccaggcgtggtggcccacgtgcttgaacatgggaggcagagtttgcagcgagccgagatcacaccactgcactccagcctgggtgaagaagtgagtctctgtctccaaaaaaaaaaacaaaaaacaaaaaacaaaacaaaaaaaacaactaggcagaaaaaccaagttctgatgccaaatgccctacaagtctacaagttctggttaatggattatcttaactataattctttagaaaagttctctaaaactggtcatttttagattttaaggcctatattatataaataattaataataacatattatatattagttatataaatatattatatattttataaaatatataattatataatatataaaatataggtcttatatgtatttatatttcatatggcttttggggtccaagtggttcttggttgcattgatgaattgtatagtggtgaaagctgagattttagtctgcccatcacccggtagtgtatattgaacccaacatatagttttttatccctcacccagctcccttcttccccccttctgagtctccaatgtccattataccactctgtatgcttttgtgtacccatagcttagctcgcacttataagtgagagcatgtggtatttgtttttccatccctgagttatttcacttaaaagaatggcctccaactccatccaatttgctgcaaaagacattatttttttcttttttatggctgaatagtattccatggtgtatatataccatattttctttctccacccatcagttaatgggcacttaagttggttccatatctttgcaattgtgaattgtgctgggataaacatatgtgtgtaggtgtctttttgatataattactttttttcctttgggtagatacccagtagtgggattgcaaagggtagatctacttttaattctttaagaaatctccatactgctttctataggtgttgtactaatttttattcccaccaacagtgtataagcattcccttttcaccaatatccatggcaacatctattttttttttaaatttttagtaatggc

SEQ ID NO: 588342 - DNA, 4001 bp, Homo sapiens
gtccaggctggcctcaaactatcctcccgcctaagcttccccaaagtactgggattacaggtgtgagccatgcgcctggcctattacaaattatcaatctcacaaatccttgatatcttgcgagaaaactaaaaagtacaccaacatatacataactgtaaaaactgcattggaagaagagtgctatgagaagggagtattgagaaatgtaatttaaaagggaaaggggtctaagaactgtatctcagataagtgtacagcatgtgcaaaaaaaaaaaagccttaagggaatcacacaacttattggagtattttgggtttgagttcggataatttctaggacgaaataaattcagttgagttagaaatggaatctctcagtatccaaactacagaacaactgcttaaattgttaagatttcctgttggatttaacagggaaatgggttaagtgtcctaaaatttaatgagtcgaaatcatttgttttggtttaaactaattaccaactcaactcattctggtgatagggtctctctctccctctttcactccaaaggcctcctcaagcattcctcaagggtgttcccacctcggggccctggagctttctgctccttccaccaatttccctaaataccaagagtgactagatttatcaaaaggaatgagcctcccagtcacaatatccactcggcagcttcatctatttttagctgccagtctcctataggtatttatatgtttggtccctgaattacagcgtcatcaattcctagacctcagaattcaggcttgtaacttgccctctctgaactttagctctgaattcatctatttaatgagatcgatatcttcctcaaaggaaagcaagtaaacaatcagcatattgctgggctcaggaaaatcactcaatacctggtagcttttgttatacagcacaattattaatgaaaactactcatttgggtgccagaaggcatcccaggtgacttgtggtagataatcacaccttctttaaacctcctatttaaggcagaatataatgccctgactcaataggcaataaaactcaactgaactaaatatctcaaccttcatttatctacttacaacaaacttctgccattcactaacaactggggcatacaagaataaagaatgaaaataacatttactgagtgcttaatatgggccacacgcggggtcacataaatactttgcgtattccccacgtcatttaataatcgcaagaacctagtaatgaacccagttttacagatgaggagcctgcccaaagttgctcagcaagtaactgtcagaggcagcactagatcccaggggctgactcccgagtccaggttctcaacactgaatcggagatttggttccaggcctggaggggttcacaatctgcagctgtcactgaagaggatctacagggcaaaaccccaacccgaagggcaccggcaagaactggtccaacgcgacgcagtacacaggcctctgcgtaaggggcgagcgcggagctggtacctttgcctgaggtttccgcgcggggctgtggcgccgacggatccatccggccagggggaggggccgagcccggctgcatgtaacacccggaaggcggcggaggacagcaaggtggctggccggcaggccaatggcggccaacgccacttccggccgccctccgagcatcgctcttcggcaacccgaagccacaggatggaggagggggatcccagcaaaggtagcgactaaggggacccaagcagaacgggagggcgacgtccggagcggcggcagagccaggggacgctgtgtgaggctggcaaagcggtgttcacctagttctctcgggctccgccgccgccggaggaggacaggaggccggcaaggcgacccccaaatcttcctaggctctgacttccgtctcctaacccccgcaaattccaacccggtcttggaaaatcccgcgagaacgggctcccgaattgtcattgggatctcgcgagaacgaaatcttcctttctgtgggcggagcaatcttcccgatgtctcttccctctgaggccagtagcaggaagggcctcgggagttgcgagtgtcgcgaggtttgaggtcgctcggtgggccgggcgctgtgcgaagctagaaataactgggggcatggagaatgcggtggctgtaaagggccgctgaggcggtggaggcctggcagagagcgtccccgcggtcgcggcttctggcttctctgtggagcttggttcttccgtggtggtgcagcaccccaggaacttcaggaaccagtccttccttggagagctccccgggacagccacgggggccaagtgaaactagcgcgttttcttggatcctacactttatagtgagtcataaatactttaaatacaaagccaacaacatttgctgcaaataaacgtaaaaatactgttaaagtgtaaagtgttttcctccgtaccatctgacgtttctggcggttcgttgaacgcgagagaacgctgagccgtctgcactgagcccgggagcatcttcagggcagcgccgcccacgcgcgaggtgaatgaaggacacggcctcttgacactcccaggcagcacagatagacggatccgtaagtggctcccgcgcatgttaaaatttgtatactgtaaggtatttcatggattgagtgaaatacctgacagggcctgtatccgttccctattgccacaataaccaaaaaccacaaactttgtagcttgaaacagcacaaatttatcatctgacagacaatgcatttattatctcacggttctgtagatcagaagtgctacctgggtgtcacccgggctgcactcctttctggtgactccacaggacaatccttagcttgcctttgccagcttctgtccacattccttggctttggtcccttcctccatcttcaaagccagtgatatgccatctctctgaaccttccatcctcaagtctaccgctgattgcagctggaaaagattctgagggctcacctgagtaatccaggatcatcttcccatttccaggtctctgcccttgatcacatcagcagaatccttttgccatgtaagctaatatattcacgaattccggaaattaggagataaacatctttgggggatcattattctgcctacagtagtgtcttaagaaaacaatatggctgtttgcaaatagatctcaattctatggcagatactaaaaactagtagtatgtgttcataaaatgcttcatttaaaatatgacttgtttgcttaccagcaggcaataactttaagcctaagtgaaacatctaactcagccatctatgtgtgagttgttggccagatcacttctccgtgttttattgtactcacctatcaccattacagtgaagctaataatagtaaactacctaaaaatggtaattgtaaaaaattagataattaagtaaaactcctaaaacagtagctggtcatagtaaggaatatatgtgttgttattactattattatcaatggaatgcatccacttgaaagttgcattctacatagccattatgtcagtttaatattttggctaataggccgggcgcggttggctcatgcctgtaatcccagcactctgggaggccaaggtgagcggatcatgaggtcaagagatcaagaccatcctggccaatatggtgaaaccccgtctctaataaaaatacaaaaattagctgggcgtagtggcacatgcctgtagtcccagctactcaggaggctgaggcaggagaatcgcttgaacccgggaggtctatagaggttgcagtgagccgagtttgcgccaccgcactctaatctggcgacacagcgaaaaacactactaattataattgtaattcttgattctgacatgcaccctgatattggaaatcttaaaatctagaaaaatctgctgcttgttattgatggattatatctcttttcacattg

SEQ ID NO: 588343 - DNA, 4001 bp, Homo sapiens
gtgggtaacttttccactacacaccccttcctccccaaaaaagcttagttctttgccttatataaaagggaccgcctttcattatttcagacaccaagtgaacatcacttataaagttccatatttttattgttgcctcccacgagttgaccccttcagttttctccaccatcccactcccaacttctccccatatcaaaccaatacaaggactagggatgtattcaaaacgtgtgaccactggccaggcacggtggctcacgcctgtaatcccaggactttcggaggctgaggtgggtggattgcttgagctcaggagtttgagaccagcctgggcaacatggtgaaaccccatctcttctaaaactacaaaaactagccagatgtagactactatccgcctgtagtcccagctactcaagaggctgaggtgggaggactgcttgaacctgggaggtggaggctacagacccgagatggagccactgcactccagcctgggcgacagagccaggccctgtctcagaaaacaaacaaaaaaagctaaagactaagcaggatagaatataacttcactgtgcatactcctgaacgttacagattctgggttaatgactttaagtagcagaaaccaatgagcaaaaataatcaagtcaagaggttaaataaggcgggcgggggaaacttttgatggacctagccctcctagcatacacccaaggtctaataacttcaattcaggccaaaaccaactgtacccctaatgaaaacaaaactgtttttgtcttttcactgcattccaagtggggaaagctggaagtgggggtgggagacgtttcagaaagtccttaataagcttgcaacactttgcattctagcaaaaactttttagaacacagtagctgttgaaaacttgacgccagcttaacacttcatgagctttgacacacctgggttacaatatctttgacttaatcacctttcctagcattcttaaaggtcttaaaaaaaaaaaaaaaagtcaaaccttacacagtcactaatccaaggggcctaaagataaactgcagggatctgagaatttatcagactgcataccaaattttgactgggcggtgttccagaaagagtttctatagccttcagatgtgggggctgtaaccctcagaaagttagaacagtgcactagcgccttccaaaactccccgcccccaaagcgaatttatacaacagtctaggtacacaaatttccatctggaaagcagaagggctaagcaaggtaaaaaggggaagctgttccagaatatggggagacgactcacaaccaaccatctgcacgaagggcagacagtggaaagcaggttcaatctacctggcaaccccaatctgcaccacgagcttaaccggggacaggcaagccccaagtcccggcaattcagaccccagaagaaggacaagcaaggtcaccccaccccacgtgcagcctgggaggggtcagcgagtcccagcggtccggcaggggcgggtgcacacaggtgcggtgccccggagcctgcgcaggagccgcaaacggacgcgcgggccgtgccaggagggagcggccggtacctggcttggagcgcgtcgaactccccgcggtgtccagcggccccgcgtagcacgagctgctgcagcgagagctgcaccagcgtccgcagcgcgatcaggtagagcgcgagccccagcgcggcgcgcacctcagacagcccggtccccgcgcccctgctcgcgccgccgctacccccggggctcctcttccgcgtcctcccgccgccgctgcacccatccaccagaggctcctgcgctcgggcctccctctccggcggtggcgcggccgccgctccctctcgacgctctactccgacgcggtgccgcctcacagcagccgactcagaaccccactccatggccacgagcctcagctgccagcccaaccgccccaacccgcgacagccccggccgccgccgacgccgccgtcgctgccgcagcgcctcctagtgagcggacggaaactgcagagggccaaacttcttctgattggcccgtcccgccgcgccaagacccagcttctttggcagttctcgggtgcacacagctgcagggccgacccagcagcgggtggtggatatgccgtctcccgcagggcttttccagccctctgtaggacggagattgccaaatgtaaagacacctaaaaacccaaaacgagaaaaatgagagatcgcttttgaaagaacacacaaggctcttacagtgcatcaggcagatgaaaaaagcaatgacctggctttcgtaaggaaggaatattagaacatcaggctccaaaaaagtgggttcctggctcttaaaattagaaataagattacgcagaggaggcccggcctattgctttcacatgcataatctaatcagatcttcataactcagcaacttaatctgtgctattactgtctccatttaacagataaagaaaaataatggctattatttattgaatacctgctatgagctaagcgctaggtcaagtcctttaatacatcatcttatttaattatctttaacaatacttaaaaggaaatatctttgttcccattttataacctgagaaacgtagagataacagatgaagaatgtaaatctaatttcatgggctcccaaaacagcattctgttccactactacattagcactctgcaagtgaaggttcagaaaggccattcttcacttgacgactctctggggcggttaagcagcagagccttggtttcagtgcagatcctagtgattatctagtcttcttccagcttgccggtacccatgagcctctctgctccaaggttttttgtccctagcttggagttgctacattagcatgagcattaacctagagaccaactgggagagcacactgccggattttgacttagcacatatgtcagatttcatacaatgccctatagtcctgctcttgcccacctctcaggctcctctgacaccaggatgcttcttatttccagctctccagccacactggcctctttcaaagacttcctgcacgcatctttccttctacaataggatcttctcacatgctgtttgaattacctggagtgttcttctctctcctcattgtctttttaactcctagttatcctttaaatctcagattaagtggtacttcctcaagcaagaatctcctaatttaattaagcttgcttcccctatttgtaggatctcacagcaccatgtttgcatgtgactatttcataacttcctcattagactgtaagccccacgaaggcaggaatcaggtctggttttactcaccattttattccttgctcttaacacaaagcatgacacatagtatgtagtcaatagatatttcttgagtgaatgaaaaaatgaaaacataccacttttgtggcagcaagcataattttagctctacaagatccctttcagtctgtaagcactatgagactaaagacagtgtctatcttatttaatcatcactgtatccatagtgcttagctctggataagagcctagcccatggtcataactatatgtatgtatatatgtgtgtgtgtgtgtgtgtgtgtgtgtgtgtgtgtgtgtgtgtatgtctgacaatatcccatggtaccataatagggaaatgcctggctgcctggctgttggggacgggtagatctgagttcctggatctggtacctttagtacacatggcattattcaagttacaatctcacagagtccacgtgtatttatctgtggtaatgcagatgatacctgccttaaggggcttcagtgaggattagatagatagacagatgatagatggatagatagatgtgtgtgtgtgtgtgtgtgtgtgtgtgtgtgtgtgtgtgtgtgtgtgaaagatcctcacataagattctcattaaaaactatttttcagaattttccttctcat

SEQ ID NO: 588344 - DNA, 4001 bp, Homo sapiens
agccttttcatatctacaggtattctctaacatattttccagatttttatgcctttacatttgcttagaaagataattatacaaaatgcttagattttagttaaatctagattctatttgggaaaaaactcatatttaacaagattaggtttttctataaaaagcatgagttattccaaaataaattatttcttcttcataacttagctttacaaccaaaccataccatttgaggaaagtgcatctgatatagtttgcctgttcagtgtctcaacttttctttacaatatcttaagatttttgccctttttttttgatttcctaaaagtgcacacaattcataactcaagccattttgtggataagattagtatccagtcttcttaaggagagagtggtctctaataatggtattattctaacacttctagaaggaaaaatgtatcacagtgtataatgaaatcaccaagaaacaacactatacagaatattttcctcgatacagaagtcattcactgttgtatacttataagaagtggcaataagacactctatcatttaatattacaatgtttatacacaactttttgttctcaaaagtactttgacatgccatttagttttttacagtgctttttccgaaaaggtccaagtgacaaaagaaaagaaagaactatttcaaacacaaatattaaacatttaatgggatatggcggaataagcactggaagtcaagagacttgtttctaatcccagctctgcctgtaactagctgtgtgacttcatatgcgtcactaaatcgtttcttaaattgtaaagaaagtagttcttaatgtttaaatctgaatttctaaaaatctactacaattaaggtactttcaaatattacattataattaacagcccaattaaatataagccattttgccatacgtgtttagtccttcgcttttgtctcaatttgacctgaagcctggatcaattagtctgcacactcaagacgtactctggggcaagagggactagggaaagattcttttaagatgggatgatgctgagcaggttaggcagttaggaatgaatgcatattcaaataaggcgcaatgaagaagaaatctgcttccatggggaaatacgttgcaataagatttgagggaggccttgagctgagattgtcaggtaaccacaccttccacccttcaaactctattctcccagtggaatccaaaccagtctccagttccgggttcccaaccaatcgcatcaagccacaacagagggatctgccaacccgggcaccgcttcagggatctagacccagtgagagtcacacaaccccagcacctgtcgacctcacactcttcccaaatggagagggtgggaaggaacgctaggtctatgcttggtcttttccgattcaagctaccaccaggtccactagccctcgaaaccgaaacccccggacttcggggagaaggggaagctcctacgccgtgactacgtatcagtccctcagggctaattctcccattctcccccgacactggtttctcaggcctcggggactccgcgcctggaagccgacaggcgagagtgagggcagcgggggagggtgcactccaaaacactgcaggaaaagacggaaaagcaggggcaggagtagcagtgttccccctgggcgagggccggaggccgttcgtgcgtttgtcgatgggtctgtcattccctcactcaccaggagcagaagggagcatctgaggtcgggtaaggataggaagacggcaggatgcatggtaacgctggggtccgtgacagggacaggcgctggcggctgggactgggctaggttgggttgggttaggaaagggctgggctccgggagccgacggcagcggaggattctccaggcagcggcacctcgtcctctcgacccgggctccagcggcgaacacccgggacaacttccagagaggcctctcacaccctcacttccgggtcctgcccacctcggtgcacttcgggaaatgtagtcctgcactagcctcaccccgcacgtcgtccgtcatctagaacttcctttcccattgggctctcggccccggtccactgagtcctctgcgcgcggggtcctgtgggatagaagggcggagggcgggtgtacgcggtgcttcagaggatgggaactacaattcccagaaggatgtgcggccgaaagcctcgggcggccttttgaggggctcggctagcttcagcgccgtggggtctgacctggctggatatagtgtaccggcccggcaggaggggcggcccggtccgggttgcgcctcctggagccgcccccgggacgtcagtcctggaggaggcgagggtgagtaggagggggcctggctggggaggctcagatcattcggtccgcaccgccttggcccctgctgcagactcacggccttcctggcctaggctgtggcctgagcctccatcattggcctcctcgcccgctgcctcttctttctgctctaattcctgcattataaagtcagagccaccactcggggcctcagttgaatgagtcaatgacttatccctgattgtctctgagggctcctgtaaggagtagatgtggtacgggatgggatagcacgtcgtaaactggaaaactgtgtgagtgattgctgctaaggcgtggatcgctcctccagtataattacgaaattccctagcaaagcagtcgaggatcctaacttggccccaggtagctctgcggcttcttctgcaaacactcagtgaggtccaggagcccacgcgatctctgcttagtacccaggaggcacactgtgcttttgtggttctccctgctcccgcctttgcttcagctttcctgctgcctggaatggccttacccgttctctctctggaatgctatcttaaatgtcaccatctctgagaacttcccgaacaaccaaccctttagtcctaatcagaattactcttcctatgagtgtgactgcagtacctctagttttgtacggttataattattagagcatttattacacgggcttgttgtataattaggcaaggatgatgacacctttgcattttatagcactttatcaaagtggttttgacttttttctataaaaaatgatttattttcttaaaggggcaaaaaatacattttttcttaagaaaaaaaaagagccctgcataatggctttctcagggtgacaaaattagacagtgatagagccaatactcttaccaaggcggcctaactcctagactagtgctcctatctcttgtccacgcccctgacagagcccaaagatagttgaaatgggaaattttaaaagagcagagacttgtaagtatgaactcattattcaagaaattaaactttgatcctgctcactttttggacttagcactcagcctgtgacctttcatccaacaaacatctactgagtactggctatatacctgttactgtgctaagtgctaagaattatgaagtaaaaagtatatatatataatatatataatatatgtacatataatatatataatatatgtatatataatatatatattatatatgtatatataatatatatattatatatgtacatataatatatatattatatatgtacatataatatatatattatatgtacatataatatatatattatatgtacatataatatatataatatatgtatatataatatatattatatatataatatatgtatatataatatatataatatatgtatatataatatatatataatatatgtatatataatatatatattatatatgtatatataatatatattatatatgtatatatattatatgtatatatataatatatataatatatatacatatatattatatatataatatatattatatatataatatatatgtatatataatatatatattatatgtatatatattatatatattatatatgtgtatat

SEQ ID NO: 588345 - DNA, 4001 bp, Homo sapiens
ttatggcaaagttccagccagtttagaaaggagcctatatggccaatcaccactgttgtactttaggcaaataatcaggccaaatataatcctaaaatttattttacaagtaaattggtcttaccaagatttatctttggtagaaatggggaagtagagaaaaattatgtttcagagaaaaactacagcatacctgttactggattctagccctgatcattgtattttttattttcctacaatctggactaaatcctgaacaatcttctggctacaagtctcaaagaagaacctggctgggcagaggttcacacctataaccccagcactttgggaggcccagatgagaggatcacttgggctcaggagttcgagactagcctgggcaaggtgtcaagacctagtctctaccaaaaaaatttaaaattagccggtcctggtggcaaacacctgtattcccaggtactcaggaggctaagacaagaggatcatttaagcccaagagttcaaggctgcgatgagtgggaatcgtgcctctgcactccagcatgggtgacagagcaagaccccatttctaagtaaacaaataaataaaaagaaagaagaacatggattttagtttcttcatgtttttagttgtctccctaatggaacaggtttgtttttttcatcctggcatacaaattggttatagtcctatgtgttacttctgagaaaattaaaattaatggtgtttctaaaaactagagatgattcaacaggtgacagcagttgtataaattaatgacttcactgagacctcatgtttgccaccctgtaatgccattccaattcagtttgtggtgttcttaaaaaaaaaaaaaaaaaaaaaactccctgaaatgtctcctccttccctgcttggcatgggacaggactatgtgggaatgagccttcccagcaagaggggacactctgaccctcagattttgataatcaatgctttcaagaagaaagattttgatcaaaaggggggcaaatgagaaagaaaaaaatcatttatctgaggaatgtaaagcccttttaaactgtgggcccagaaagcttgatgttaagtgccagaaagcatttcaaatgaaaccgcagcccctcactacccctcgagccaagtaactatccactgatgacaccaagccgtggtcaatcgcgaaccaatgccatttctacaagccagtgagctcctgggcaacgttcgaaaccacctgctctccgatgggctctgttttctttaaaaacctgagcctctgttttgttctccgttgcacctggtgacccaggccgccctcgacctctgtgcctgaataaacccaccgggcaccacattctgacccttttaattattttaggttgacaactaatacaggactcagcgccggtggacaggaagccagggcccctgcagggaggcgcccgtcccttctcccggggagggcagggcgggcgcgcgcgcgtcccaccgggagcgcctcctcctcggcgagggagcgaagggcctccgggtcctgtgatgtccgtgctcggaaggcgcggaggagggcaggccctgcgggacagggcggcggggtcgccggggtcggctcagctccccgcggcgtccggctgctcggcggcctccggagcggggccctgcgggagaacgcaccttccccgccccatcggggcctcagtttccccaccccgggagagccggcggcccgcccccggctcactcccagctacggccctcacctcaggacgcgcacccggcccggccccgctctgcccccggcgcccagaccgcccacctggcccgcgcggcccggggtcgctcacctgcggggccgggaccgccccacaccgtccacgcccggcgcggaaccttggcccgaccgcagccgctggcccggagggctttatccggcgcaccaaggccagcgcgggcggggcgaggaagccgggcgcacaaagctcccggcggaagtccggccggggcgggggccgaatgggaggtgggcgaggcctgagggtctggagtgggcgtagccgtttctggcgggggcgtggccttaccggggaggggcgggcgcctgccgccagggggcgccgcggggcagcggggttgcacctggcgcttggcgcccgcacctctgcccgcctcggagaccccgcagccccgcgccgccgcctggccccggccccggcccctccgcgggatcctggcccctcctcgagcgccgccaccggccgccatggcctctctgggggacctggtgcgcgcctggcacctgggcgcgcaggctgtggatcgtggggactgggcccgcgccttgcacctcttctcgggcgtcccggcgccgcccgccaggctgtgcttcaacgcgggctgcgtgcacctgctggccggggaccccgaggccgcgctgcgggtgagcggggcgtggggaggccggtgcgggcgacgcctccgcctcgagcccctggggagggcccagcgcccctccccgaccgtcacggggtcgccctgccgcccccgacccagcgaacgccccggcaggtgggagccgagcaggggggccgcacctgagctaagcgaggccgcgctggggggcgcggcggtcaccgggagaggccggggcccgagggtgactcacaccgggaagggggaagctgctgggctgggtcaggcccgagggaccgccctgccctaaggggaaagcgttgcgcctgtggtcatggccgggagaccgggtcagtctcctcctcagagccctcagccctcccccagcccactccccgaaacagccaggagtccagggtgccagggtgcagcggccgaggccctgcacggagcccggtgcccttctcgtgccccctcgcgttccggggccgcctgttcctgcgcatcccaaacgccagcgctgcccacccccgctcagtcccaagcaccccgcagaagcaggcaggtgcccacggttactgaaggctcggtgacagcagtgatttaaaggagagggaactgcgcgctgtgggagggtctccacgcccctgactggcaaaatatcccccttggaggagactgggcaaagcgcatgagacccccctctcttgtgtcttaaagctgcgtacaaatttacaatcacctccataatgatttcatttttttgtttgtttcaaagatggagtctcgttctgtcacccaggctgaatggagtgccgtggcccaatcttggctcactgcaacctctgcctcccgggttcaagcaattctcctgcctcagcctccctagttgctgggagtacaggcgcccactaccacgcctggctaatttagtatttttagtagaaacgggtttcaccatgttggtcaggctggtcttgaactcctgacctcaggtgatccaccctcctcggccacccatagtggtgggattacacatgtgagccaccttgtccggcccacaatgatttcattttaaaatgttatccaagaaagggaatgtaatctttagacaccaggtggttcagcaacaaatcctatgtccggggctaacccagtcacttgtgctcttgtgcctggtttcactacagagaggggacgcagtgaaagtcatacgactaacccacagcatatgcatgttaggaatatgggaacttaggaaagcagatggaacagctatgattcataaagccgatcacgtgaggggcagcccagggtgcagagggtgtcgctggaactgctgtctcttgttaggagccttgcgtgacgtttggggcagacaggtgggttctgctggccctgagccgccaccccacatcagggctgcgtgcctgtgctcagccgccacacttcacacctgtgtgaacttggttcaacgacaagcccccactcagccagatttgtgaaagagaccgtagcacccttcctgtcacacacatttaactgatggccacggtccctgttcagaaccttctgtgtcctcctg

SEQ ID NO: 588346 - DNA, 4001 bp, Homo sapiens
aagcctgcactgatctgcaccaccccacctacagtcatggtcaaaacctcagacttacagcatgacagggcaggcaggggtggggtgggggataaggagggggcaggaaaagcctggttgtacaacctgatgctgcaagaaagggaatacacaccttttgttctcacctggttttcaaagctttcacacagatcaacttgtttactctctccacagagccagcaacagatgcaatgagcttctcttctcccatatacgttccatggcccctgatgcaaggcgaagatacaaagaaaggatacgagggtaactcgaaatgacttctctcccttcaagaacaacgtgttcctcaaagctaacaggctccccctgcaaagcgtggcttctgtgctggctgctccctctgccttcagtgctccttctccagacagctacttggacatcactcctctcactcaggtctgctcaggtgtcactttctgcagcaggcctaccttgactgtgccattgaaaacacagcccaccctgttgccaccattccccccacataccattgaccctgctccacttttttccctattgcattattgcctaacattctgaataacttattcattgcgcttattatctatctctccctgttagaactccaccaggacagagatttttcactctgccataataacccaactgcacaaaatatatgttgaaagcattaatgaaagaatgaatcttaagatttcctaggggccaggcatggtggctcatgcctgtaatcccagcactttgggaggccgaggcgggcagatcacacttgaggtcaggggatcgagaccagcctggccaacacagtgaaaccctgtctctactaaaaaaaaaaaaaaccaaaaattagctaggcatggtggcgtgcacctgtaatcccagctactcaggaggctgaggcaggagaatcacttgaacccaggaggcagaggttgcagtgagccgagatcgcacgactgatctaagacagactccgtctcaaaaaagaaaaaaaaatttcctggtatccactaaccttaaactaacaggttaaagggcaatgctatgaatgctgtgccccttgtacatatacaagtaaaaaaataataataataaaggttgaaacactagtgttatctatgatgatataatggctggttttacttcttttcttacataattgtctcatttaatcctcattaccgtatcatactgttattatcactatcttacagatgaggaaactgaccgtggagaggcaatgccgctaataagatgtgatggtagcaggaccggaaccccaactgtctgactcaagagccttccctcttaaccacaatacactgcactacaccccttagattcaaaatgtgtataaatgggtgcatgcagcacaatgtaactgtttgccctaagatcgaacaattacggattctaaactgaagaggaggcagccaagaacgcccaccgtcccctcagagagctgaaaactggaaaagagcctgcacctaaccctccccagctttccaggtctcccacaaggaaggatcaaagatttggacttcaggcagaagacccaaaagtcacagccaccggaggtcaggagtggagggtttcagggagctgagacaaatgcagacggggacacacaagatgcagggagcaagaagcacgaggctcggaagcgaggtgtgtaggatgctcagacgaagtgccctgggtcccgcggggagttacacacacagggatacgaggcctggaccacgtgcagagagccctgaagccgctctctgaagcctcgactcccccaagtccccacgtaccgcatgaatcctgtgtccgtagtgattgtatcccccggcaccactagatgtttcttagtgtcgcggcccagtctctcgctaagaggcttgcgagccactggaagcctcatctccatcgccatcttggcgccaatgagttgcgcaggcgcagctcagtcgggagctgcgatatccgactccacaactccaggccgcgttcggaggggcggggaagggcggggactcagagcagctgccaatgagaactcacggcctagaggccatgtttacaattggcaacaataaggcgaacccgaagggaagggagccgagctgccatgtctactattggcaaggaagcacccgtggaataataaaatctcacgttgtgtggcgtgtgactttttaccaaaactgtcttgtactcatcatcccatttattgtttaccagggttagagataattgagaaacggacctctgagtttctgtccaattctaagctgctgaaatccgatattttgtaagagagagctcaggaggatggagagatgggatctacagaaaacactatttgaacagaaagaagagcccctttccacacggttcccagtagcgccaggattctacattgcggccgccccgtgggtgctggctcaacatcatcatctataaccccaaaccgggctccagatacttctcacttggttctgtcctttcataaggactcctttgaacaagctaatttactccaatatttcttttggaaacaagttaaaaatcgtctaagaaaacaggtcaaaccttgcaagccaggtatatttggtagggaagggaagagcacacacaatgcgaagatcttggcttgcatttagttacacagcgagttgagcgctctctgtgtgccaggcgctgttctaaggactcagcggggaacagacggatgtctctgtgggtttttctgcggctccgttttaataggagggtacccctcgccccttctccccgtcccccactaccctctccctctccttgccctgcattcacaagaaactaattggggatggtaactccccatgcacagggactctaaagacgattaaatgaaatcattggcatcagctgtggtcagtaaagccggtaaaccaagtccgcctcctgaagaaagatccatcgagccaattgttttataaatctccaaagcgacagcatttcttccacttaagcaagtctcacgaccacacttaagaaagccagccctgccaggcagtcgatgacatgaatgctagtgccccgaggccctgggtaagcgggctgccagaccctcgccctctgccgtgcctggaggaaggcactagagcccagcccctcggtccagtcctgccgcggccataagagggcgatggtgtcctctgagctcgcgtagcccggcagccggggagccaggcccagcgagcggccctaggcggagcgagagtgtaggcctgacaccatccaagttcttcccgggagggagagacgtcgcctttaccccgcgcattctcacagcgttcacaaggttggcattgtggataccagtttatggaggaggaaatcgaggccccaaaaggaatggaattcacattagcagatggctgcaaagccgatgtgtgttccaactgcacgcgatttaccccagagcctgcaccctttaccagaaatagcccgagtgcttcggctggtcctttgctgagtgctttacaaatactatgttatgtattcctcactttcagcccatcttcgagataggcattgctatccctgatgatcacttggggccaccgagccccccaaacagacccgtaactgggactagaatccaaaacgacagggactccccctctcccatccccagtgctcctctttctgcatcatcacacgcacctttttttatttttatttttttcgagacagagtctttgtcacccaggctggagtacaatgacacgattatggcttactgcagcctcgtcctcctgggctcaggtaatcctaccacctcagcctcttgaatagcttggactacaggcacatgccaccaggctcggctaattttttgtatttgtcttgtgaagacagggtttcaccgtgttgcccaacctgatctcgaactcctaaactcaagtgatccgcccacc

SEQ ID NO: 588347 - DNA, 4001 bp, Homo sapiens
atggctgtatgaaggatataattagggatgaggaaagacacctggagtgtaatgccaaggaattctgtagattttggagaatcttgtcttttcgagaaagtgaccgtgtgaggatgtcagctctcaaaatcctggatggtgaggtaaaagcgtggaggcagggattaatgaagaagtgactgagaccagtcaagagggagctgaagcctgaacttgtggagataaagggacggacatgccaaagatcagagacagaatcaaataggatcaaaataggattaagcaactaaatttgcatgagaagtgaatgagaagaggtgaagaaatcactaaatttcaggctggatagacaagaagagtgtggctatgctacctgaaaagctcaaattgaaaacccaaggtaacaatattactcctctatcagctcctaggacctacagccaggatggatggatagctgataatgtcaatttgcaccacctgtccctcctctaagcctacagcagacatccttgtccagaggatatggacataacaaataatggcgatgatagatacaacctttcaactcagtagaaatgaaacatcccaagaacaaatgtagccaatgtaaaataaattgtaaatgtaaaaaataataataataattatgtggctctgatcctggagcatctgaagaaactcttggagcctggggcaattatatacaagctcagagatctaggtcatgctttggagacaattcagatagccttctggatatgtgagtgttctagggaatggatgtttgtttctttgaaaccaaaggctcccgtaattacctgcacatttggtctgtttcttttagttgcaccttcaaatgacaagtaagacaaagaagctggctcactccctccaacatcaactttgaatatatctccagatttagctgtcactatgccaatcacatggtctccttttactggaacatactacaaaaagaaacagaatgaaaaaacagccataaatgacaagataccattggaagataccttcagcaagtcctttgtggttactttattgtcattaaagagaaatctgatcaaatgccactttcggtaaaagaaaatcacttcataaagtgccgggtgtgcagcttctggtagtctgttaattgagtccaaactccattatctcttaggcaccccaaccagtaagtctctagctttgtggcataagtccagtggcaaaggaatccttacaaccaaggaagcccattccatagacaattttttctatatgaaattcttacctgttctaggagaaattaactccctatgacatccactcattgagcctagtcctgccctctgagactccaaacggcaggcctgctgtggggttttgaagactataatcatgactcacggtctccaaacgtttttctctcctggtcgcccttctcaggctatgttcctattgttcacggtccctctaaaggacatgcagaagtgggcacaagactacggtggctctaggtttgcctgaacaaaagagggcctcagggtccctctcttcttttgggaggtcttctcaaagcagggctaccactctcactgccgcaccacccctccggagtcccagctcacccgcttctgctgagagtccacccagtaaacaccgccgccgctgccactgccgggctccttgtgacggaggcggccgcacttggtgaccagcaggcggtccccacagcgccgaaggcccggaccgcatacaacgcgcacccgcgagcacgctctagcattcaggctcaacggtcgctccactgcacccccagggccttccgcgtcctcctgttccggcaggagcagctcctcacccgggagcaccacctgacctagtactgtgcgtgcagcgcgcgccctgctgcccgcgagagattcagccgcgacagacgcaggttcggccatcgcgggctccaccaaacaccgtttccggtacccgccttccgcttccgctccgcttccaacacccgcccttgaggactttccgtttccggcagtagcggtccgttggattcggaccagtttatgaagcttgatggccgtcagctcacgggtccctgtccaaggtggcagtgattgtggccggccacctatctgacagcctggccgcgggtcggtatgaaaaccgcgcagcttggtccatcgaaaagcctccacttccagtgtctcgggtcgcgtgttttgtgaccggtcgcatcgtggggatacgagatacttccacttaagagtttcttgggatctctggaagctgagcagaggggctttgaaaattggacgctggggccgggcgcggtggctcacgcctgtaatcccagaagtttgggaggccgaggcgggtggatcatttgaggtcaggagttcaagaccagcctggccaccatggtgaaaccctgtctctactaaaaatacaaaaattagccgggcgtggtggcacgcacgtgtaatcccagctactcggaaggctgagacaggagaatcacttgaacctaggaggcggaggttacagtgagcctagatggtgccactgcactccagtctggaggacagagtgagaccctgtcaaaaaaaaaaaaaaaagggaaattggacgctaggtgggttcatgggaccttctttccgactccgccctcagaagagtggctgaccttttaacaggaaaagtagtttttttcaaaataaataaaaccttcttggttgttagagatctagtcacatttagaaaacacagagaaaaataaaagaagaaaataaacgatgttttaatcttgcccgtttttctcccttgctacactgtagttctgattctttagagcccaaggtgtggcatgaaataggtaatacctgatgaatgaacgaatgtattcctttggtgtgtatttctccctagactttttccccctgcaaatatacatatttcacatgcttccgatagccctacatggcctggaatatcagtaactcaaatttccctggagcacacttagttgcgcacgtgagaagcagttgaattccaaacccaaagagattccaatcatctatctgactttgggggttctattttaaatcaccgttttctctgtcaactcgaaccttcaattagtgcttgatcagattctccagcagtggtagaattcctagggtctgggaggccgtgactgaccgattgcctttagcggccctccctttctactgctcatctctttgaggcacctgcttccaacgtaatttttagatttttttttttagacggagtctcgctctgtcgcccaggctggactacagtggcaccatctcggctcactgcaacctccgcctcccaggttcaagcaattctcctgcctcaggctcccgagtagctaggattacaggagtgcaccaccgcacctggctaatttttgtatttttagtagagacagcgtttcaccatgctggccaggctggtcttgaacgcctgacctcaagcgataggcccactttggcctcccaaagtactgggattacaggcatgagccaccaagcccggccgaatttttagattttttaggatgattaagacagatcatctctaacacaccctccaaatttggcaagccattttcccctgggtataaaaaaaggtcaacaaataaaaggagctcccacctccaggttagtttccctggcaagagtgggagctcctgtggcagggacagcgtaaattgtgctctcttccccactccagaagtattcggtgaccacgcctgcctcaatcttggcaggcccaaggccatggctcaagggcgctcaaggacctcacattccggccaggcaaacaggcaggtcggtaaatgttctctggaccgtctttgatacaccccatgtcggtagtgaagtctctggaggaaactcggcccagatctagcggctgagtcctatgaggcccactaccctgtggaggccgcacgtggcgagcgg

SEQ ID NO: 588348 - DNA, 4001 bp, Homo sapiens
tttaaaaagagagaggccgggtgcagtggctcacacttgtaatcccagcactctagaaggccagggggcggggtgcggggtggatcatttgcagtcaggagttcgagaccagcctcgccaacatggtaaaaccccatttctactaaaaatacaaaaaaattatcgtggtagcgtgcgcctgtaatctcagctactgaggacgctgaggcaggaggatcgcttgaacccaggaggtggaggttgcagtgacccaagatcacgccactgcattccagcctaggcaacagagtgagactccatctaaaaaataaacaaaattaaaatttaaaaaaaattagctgggtgtggtggttggcacctgtaatcccagctattcaggagactgagatatgagaattgattgaacccgggaggtagaggttgcagtgagccatgcttgtgtcactgcactccagcctgggcaacagagttaaatcgcgtccccccaaaaaagaaaaaaaaatagagacaggaatctaagtcgtccacgctggtcttgaactcctggcctcaagcaagtcttccacgtaggcctcccaaagtgctgggattacaggagtaagccacagcatccagcctgccctaagttctcgctgctgcagcttctccacctgtattaggctcactttccagaagaggaggcccagaaagtaacagagtcaagagtcacactcccatctgtagaagtccaaggctcttcggagacaggccaggatgatgtgaccccagctgggcccaattggcaagggacagcctgggaactcagttgcattcagcaacaagctgggcagctggacctgccaggatggggacgaacaacacaaaaccaaactcaacggagcctctttcagagagggcagcagcctcctcgacaagggtatttgcaatgcaaagcagcccagctccagccagaggaggatagtcactcggagggggctgggtaggccaaaatccagccacctccctccagccagactagggagtgcctgcgatcgggccttcccaggcgcctgggggtgccggggaacccgtggctggcctggactcttgaatcatatgacagccccagtggccagttcgggtgcaaggtggcctgaacacccctcccctgcacaatcgctcagggtacaaatccctgataggctgtacatgcaagtctgcagaatggacctactgcaggcggcacgcagggccccaagagaaggctgaaagactagacccccaggtatttggctggcggctgcctggcaccctgccaactgcctcaggcccagtcctgccttgtgcaacctgccccaggcacacagaatcccccggatcctcctcacaccggccccaaggggcccttccacacttgccaagtgtctaggtctcgctcatcacccccgctgctgcaggcgcgaccgccccagctcctaccttgacgacaagctgacaaaatcccctccatccagcagccggaccttgcagaagaggaccccgttcacgaagggaaccgcagtcagctcctccagggtgaaagtagtttggaatttgaatttcttcttcttcatcaagaaagccatgagcgagttccctgagtctgaagccccgaaggcgaaaaaaggtggagagggacgggattcctttccctacaccacaccccctcctcaaaacaccagagccggatcccgccctgatggtggcggagacggcggagatcggagtccggggccccaggtctgagagatccaccagtccagttcgcgggccggcgggcttcaccctcggggagccggggctcggaggggttcggagcggccggggacctcaccggcatgtaaacagcagggcatggcccaggaggcagaggcaggggcggaggtgcggggctgcgcgcgagcggccgcgctggcttgcagcatcccgagacgcgatgtccggggagctcacgccgcgcggccgggcggaccggtgagactgagggcggcgggcgggctggctggccggtaaggctgagggcggagggcggccccgcccccgccccgctggcggccgggggaggtgccctcgccgctcacgcccccgcacctgggtgccgggcggccagcgcaggtgaagccggggaaggtggggcacccccagggggctgccaggagctcgggggcctctccaggaggcgcgtcggggtcgctgcgggccgggaacgtccggcctcgggcctcctcagggcaggcaccgggccggccccgggcagcggaggcgccgcctcctcctcgatcctgggacccgcgccgcgggccccggcggagctgaggcgcccttcggcccggccggtggcgcccgcctcgcccggcacccttcgagcagcagcgccgccccctgcggccccgacgctgcagccagagcccgatgctgcgaggcgccgcttggagaatgcctgggccccgcgcggccgcccgcctagccgccgccgagcacggcaggggcggggcgccggcggctcagccctcccgctattgcgcggcccggctaggcgggcgcgcagcgcgattggtgggcggtggcgtggggtgggactcgcgggaggcagaggcggctcggggctctcggattggtgcaccgcgcggccgggcccgcctcctagggcggggcggggctgagggaagggagaggggccctgggaaggcagtgggaggtcgcagggctggcggggcagggagagcgcgagcagaagaaaagaagaaacaatgacaaggagaaacagtttgtggctgcagcggccttccagggtcccgccagacttgagctcgtagaaccctgaagcaggcccggaaggtagcgagtctcctttctcagaaagctggcgcccagagagagcccctggcaggtcgcttgctcgccctgaatctctagtgcccctcagcaatgagcagagaagcgtctggaaggcttcgccgaggaggtggctctggctcagtccatcacgcagccttgtgacccagcttgtaacattccaagctgttatctaagctttctgttgtcctttagtttcttgcccagcgtgactggtctcactgactagttagctgttctgggggcagaacccactcgaaagcctcgtacctcccaggcccctcggcatattgtggttcattcatccagtccccaaatgtttaggggcagtctccactaagccaggctgggacctagtggagaacctggtgggcttgcccttcccaaatgctcccagctcaagaccaccaggtggagaagcagacagggacacaggcagcgacaaatctatgggtaagagttgtaacaggggataagaggcacctgacatgggttggggcgcagactcagaaagtctcgaacaaagggagccaagccatccacaggatgcgtgccctgagtcacgcagggtccaggcatagggagctgccagagacctggtggctggagatcgtggtgcccgcagaaagtttcaggcaactacatctggctgtactgtggcagttggagagaggggcaagagatggggctggaaaggccagatctcccagagtcttgtaagaccgtaaggaggaagccacggacacgcgttgagatggagagtgtcctggtcagatttgctttattttttatttatttatttttttttgagacggagtttcgctctttttgcccaggctggagtgcagtggtgcaatttccactcactgcaacctccgcctcctgggttcaagcgattctcctgcctcagcctcctaagtagctgggattacaggtgcgcgccgccacgcccggctaattttgtatttgtagtacagaccgggtttcaccgtgttcgccaggctggtctcaaactcctgacctcaggtgatccgcccacctcggcctctcagagtgctgggattacaggcgtgagccacgaggcaaggcccagatttgctttttgtcctaagaagcttgctctggct

SEQ ID NO: 588349 - DNA, 4001 bp, Homo sapiens
cctagacaatgagcttctccatggtgaagccacacactcaccccggccctgtgtaaggaccacagagctcaacccagcaggcaggagagggaagagggctcatggggcctggcacagcaggtggtgggcagggtttggtgaaagtctgatgaaaaagcatgaagccattgcaaactaacaacagcccaaatgtggcaagatttgggccctaaaatctaggctgagatggagtgacaggcagagatgagcaagtggaaaagaggagcacagatcctgacgtcaccacttatgaaagggtgaccactccgttgaggctttcggccgggtgccgtggctcacgcctgtaatcccagcactttgggaggccaaggcgggcagatcacgaggtcaggggctcgagaccatcctggctaacacggtgaaaccccatctctactaaaaatacaaaaattagccgggcgtggtggcgggcacctgtagtcccagctactcgggaggctgaggcaagagaatggcatgaacctgggaggtggagcttgcagtgagctgagattgtgccactgcactccagcctgggtgacagcgagactctgtctcaaaaaaaaaaaaaaaaaaaaagaaagggtgaccactaggttgaggctttctatggcttattcactcggccatgaaagcatcctagctagcccaaggctgttgatgagggaaccaagactcagagaggggaagtgactcccaagaccttgcagacaggatgtgggggagcttcccttgaacccaaggctacctggcccccaggctcccttgatctggcctgaggtgcacagggctactgtgcctgtgcttttcagcctgactgaggctgaaaggctccagctcccaagacaatcagcctggaccctttctggcatctccggttccctctgcaaagggtctaggaggccccagagcccctgctcaccacctcctgcccagctctgctccagataccataggctctccctgggtccccttgcagaggcgctgttaggacagcctgttttcccggccaggtgaaaggtgtggaaacagaggaagagaggtgtgctggtgacggacacccagacatttctgttcccaaaaggccaacgaggcagctgcctgggggtggggctgccctgtccactggaaacctgcccccggggccctcagcagccatcattttcactgataatccactgggggccaggctaccacgtgtcacttggggaagagttaggagctgggccaagaagtcaactggctggtggtcaggtgccagctctgtctgtgacttcaggcaaatgacttaacgtctgtgccttaactccctcccatttgaagctgggactaatcaaagataccacagctcgtggggctgctgtcaggggaccacaagagaagagagggcatgcaatcagcatgacgtgaacccactgcaggtgcttgccaaaccctggagactgtcagggccccctctctgaacttgatggggaaactgaggccaacagcggagccaggcctccctctgatagtggtttcctgattccagggctcgccccttcccgatgtctacctattcaggtaaggcctgtatttttaacaaccctcctccagaggattctgatgagcagcctggtttgtccccatcccgtggtcagggtggcagaggtggcaggatccctggtaccttaaggatggagttgtcctggcgagtgttcttcgtgtcatatccctcgagcaggcagcagcgcaccgtggagcccgagcccgcaaactcggccaggttcaagtcagcgaagcccagctaggaggtgagaggagcgtgtgggagggctgagggagtgtgggctcctggctggcggaagcccagaagggtaacttggcaaaagttggagagggagacagataaagcccctgggccagccccacagcctcgactgactgttgcataactgggacccaaggacagaggccccgggtcggcagcaccaacatggcaaagccaggaactcacatccctgagctgcacaaagcaccctttgtgccacgtcccggcgtgcaccggggccagtgcgcctgacatgaaaggacattgttgtccgtgacacagatgcattgttccctgggaaacaaggccgtgctgtcgggagctgccgggtcagcaggcaggggaggagggaaggcctgtgggaagtgggtgctggggaaagtgatgggacacccccacaggggttgggaggggaggggcactgcaggatgagcaggagccccagggaaggcgccctggtagaggacagagtgaggggctgctgggcagagttcagggtctgaacaggcccttgggacctctggacagaggatcgagggatggggagggaagtgggagtaagtgcgaagagggcatgcgctaagaaggccctgtggatggaggccaagtctgctagacctggaggggaaagtgagattgagacgaggtggtgccagacttggggacttggaagacatctccggttccctctgcaaagggtctaggaggccccagagcctctgcttaccacctcctgcccagctctgctccagatacaacaggctcagaagagatagataatgaaatgtttgaaccaatgtttgaacccaaccgaaccaatcagggatgagtgtcaagtaactgctgcctgcaagtctctactgcagtgttcagggcacacactccagaatcagggaattggattcagatcctagccccgccatggactcagagtgatccccattttatagatgagaaaactaagttcacagaggccgggcgcggtggcacgcctgtaatcccagcactttgggaggccaaggcaggcggatcacgaggtcaggagatcgagaccatcctggcgaacacggtgaaaccccgtctctactaaaaatacaaaaaaaattagccgggcgaggtggcgggcacctgtagtcccagctactcaggaggctgaggcaggagaatggcgtgaacccgggaggcggagcttgtagtgagccgagatcgcgccactgcactccagcctgggcgacagcgagactccatctcaaaaaaaaaaaaaaaaagaaaagaaaagaaaactaagttcagggaggggaagaagcttgcccagggccaaacagctaacccaacagagacaggactgaaactaggcctgatcagcaccacgtccagccacttctcagggcctcagtttcctcctctgtataatgggagtaaagcctgcagtgggagttcaattacagaacagaagggaaggggcctggcagtgcctgccatgtgctgggtgcctggtaaatgtttgccagtggaggtgagatgctcccaggtgtttgctggtaattcctttcctggctgcacagctgtcctcacccgtgtgaatcagagaaatttccactgtgacagcaccctccacagcctggttctagccatactgtcctctgcttctggagagggacgtcagcgccccgggccagggcagagtgcactgcccagccggctgagttcctgagctctggtcagtgggaagggccacgccctgtatagcgcctccctcgggtgagaggtgaggcgaaggcatttcccctcccggctgatgaagcccaccctcctgccactgggctaagcctcaggagctgaggaggggaggccaagagtccaccatggagaagagggatggaaggcagagcaggcttattcaaagccagagctgtcttctccctctttgcccagtagaaaagctcttaatactatgtagggctgaactgtctgtgggtacagtgaaaccctggtaacaatgcacatgtccagcagcagggctggctgagtcaaccatcgccagccatgccacgggacactgctgccattagaaagcacatggaaatttgtgataacacaaaaagatgcccagaatggattaagtaaaaaaccaagctgcaaatctgtttat

SEQ ID NO: 588350 - DNA, 4001 bp, Homo sapiens
tgtgtctgccaggcgcaggggccaatcgggactctgccggccgcctccacccacgacttaaacaccatctcaccaattgcaaccggatcgtgggtgggacttccgctatcattttaggcttaactaccaccatctcctcgcgggcagtgggggcaaccgcgaagacagaatttcacaaactttcagctccagcagtttcaaggaaatgtcaaatgacaagatggaagaccgagtgtcaagagctaagacaacaaaaaggcccccaaaatttgttttcaagaaaaccaatgaaaaaagcaagcaatcagaacgtgaagtccaggatcatggatgtgcttatcttcacagtcactgctgggtcctgaagttctcctctggcccagtgccagctgcgaagccctctgccaaagggccagaggaggccggtgatatagagctctgattacccacccgtcagggcaccgctgaaggtcactgaatacttactgtgcacccgaaaaataaatcctgcgagttcacgcccgcgtagttcgccccctgattttgagcgactcctttcgcatgggatctacaaaaccgaactgccttaaagacctctttcacacggacgtgaagtcacagaactgacaaaatcccatcctgtcaaagtgcacgggtctttgaaatctaacacaaaaagccatagaaagattctctaaacaccctgtactaagaggaacacggacagggcactgcgttctgaagtagaggccagggcactggcccttagacacgtctcgctgtcaccgggctaacaacattggcaagggcggcggcagcagcactgatatttgcagcccccaagggctctggcgaaaccccctctattactctgtatcctgcctgcttccaagatgaacctgttgctgggaaagaacaggctaaattagaaaagggagtattttgtcaaagttgaaggtgagtgatagcctgcccgcctcaaataggatgggaaaaactaaggatattggggatgatgacactgtcgcctccgaattctggtccggggctctctcccagccctcaagtgtccccacgcggccgcggaccccgaacagggacagctggagacgggcttgggcagcgcgcggcctgcacccgcggccatccatcttgcagcccggcccggccaggctatcccgggcaagggctgggggaactcgctgcccccagcgccgccacggccgggcgacattctgcgccctgggaagggggataggggtgcggcgcggccccggtccccggcccgcccggatccccggcctcaccttgacgtggaagcggatgagcgccaggcggatgcagtgggccatgcagacgggcggcaggaaccagacctttggcggcggggtgcccttgttctggacatggctgacgatctgctgtgccgtctggcgctcgttgccctgccgcttgacccactcgtgcagccgggccttctcgagcgcgccgttgaagaagacgaagagctcgatgttgccgccgaagcaggccttggccagcgccgccaggtagccaagcatgtggttccactggccgccgctgacccagtcggtgtagaagccgccgtagaggcggtgcaggcagttgtcggcgtccaccagcaggcgcagcggggtctgcgggggccgctgccgcccgccgcccaccaggctgccccgggccagcttctgcagctccaccggcaccacggcgctcgggcagtgcttctcgatgtagtcctggaagccctgcacgcccatggcggcggcgggggcgcgggcgcgggtgcgggcggggggcggcggggccgggggtggtggggccgtggcgcgcgggcgggctggcgggcgggggcggcggcctctaggggggactggggcgggtcgggggcgcgctcatggccgccgcggccgccatgtgctgccgcctcccagggccatgtctggggagggacctgccgccgccgccgctgccgccgctgcgaggccgaggccgaggccgaggctgagggccggggcggggcgggcgggcggcgctgacgtagcggacccgcccggcgcggacgccgcccaggcccgccggctagcaggcggaagaggcggcgccggcgggacgcggctcggggctcccggaggcggcggcggaggcggaggcccggagttgggccgggacgggatccgggaggcttctgagccggagcaggcagcgcctggaggccagaggccgttcgcccgcctcaggccggtcggccgccgctcccctcccctgcgccctgttcccggcagggccagagaggccgccgcctccgcccggtggttctcgggcgaagggaagccgcgaagcaggtcctggggaagagctcgcctgctcctgagggaagcagcgataagatggcgctttgaaggggagccgaggccgagtcactctgttcgtcgggacgccgcctttctaacgccgccgtcggctcgcaccactctgggcctgctgcccacactgactgcggggtccgggagagcgggatgctggccggccgcgcctggcttcttggaaagagcaggaaggagcgcgagaatgcagttccgcggcaggtgctcatcccagcagcttcgggctctcggttgtggtttttacacctatgacaaatgacatggccaaacacaccataatgtctgaaggtacaggtagccctaagcgcctgctcgtcacggaagagactgtcttgagagcacaggtctgttgcagcgtgggaaagcctgcgttaccactgcgcaatggctagactgaaacgtgcgcctttgcagtggatctcccagctcttctgagggagagggatttgaatcttgttgctttagtagcatcttctggaaggaggtcgtttacgtaaattctgttccaaagctctgtcgtaactgcttctaaaatgaggttgatactgtatgtatattaggcttgcataaaacattttcaaaaagagattaatgtctttcagaatataaatttagaaacccagcactctaaaagttttaaagtgccgcttttacttaccttcatctctccatttgttctttttttggagaaacctctgtagaggagcaggatgcaaccgacaggctgtggccggacagctgctgcccagcacatggagcctgcacgcgcacggtttggccaaagaagcccccatactcccggtgaaaaaggcaagttggatttttctgctttcttttctgatacccacctcaaatgcaagccagtatcatacgtacataaattaaatgctgctggtattttaggaagttacatttaaaagcaggctgacaagttatgccactcacctatgcataaaattagtcacaaagccaggatgacatgttatctaaaaataatacaggccaggtgcggtggctcacgcctgtaatcccagcattttgggaggccgaggcgggtgaatcatttgagatcaggagttcgagaccagcctggccaacatggtgaaaccccgtctctactaaaaatgcaaaaattaggcgggcctggtggtgtgtgcgcctgtaatcccagctacttgggaggctgaggcaggagaattggttgaacccgggaggcggaggttgcagtcagcggagatggcaccactgcactctctagcctgggcaaaaagcgagattccgtctcaaaaataaataaataaataaaagaaataatacagttagccattaaataacgagcaaaatccagaaatatccaaatttgcttttataacccaaggcaggttcacaaggtgaggagtagtagtttttaatcactcgtattttcatttgtagcattgcattccgtgtatttaccttttctttaaacactcttgcttttaatttttaaaaatgcattagtgcggccgggcgtggtggctcacgcctgtaatcccagcacgttgggaggccgaggcgggcagatcacgaggtcaagagatggagaccatccta

SEQ ID NO: 588351 - DNA, 4001 bp, Homo sapiens
gccggcgggcctgggcggcgtccgcgccgggcgggtccgctacgtcagcgccgcccgcccgccccgccccggccctcagcctcggcctcggcctcggcctcgcagcggcggcagcggcggcggcggcaggtccctccccagacatggccctgggaggcggcagcacatggcggccgcggcggccatgagcgcgcccccgacccgccccagtcccccctagaggccgccgcccccgcccgccagcccgcccgcgcgccacggccccaccacccccggccccgccgccccccgcccgcacccgcgcccgcgcccccgccgccgccatgggcgtgcagggcttccaggactacatcgagaagcactgcccgagcgccgtggtgccggtggagctgcagaagctggcccggggcagcctggtgggcggcgggcggcagcggcccccgcagaccccgctgcgcctgctggtggacgccgacaactgcctgcaccgcctctacggcggcttctacaccgactgggtcagcggcggccagtggaaccacatgcttggctacctggcggcgctggccaaggcctgcttcggcggcaacatcgagctcttcgtcttcttcaacggcgcgctcgagaaggcccggctgcacgagtgggtcaagcggcagggcaacgagcgccagacggcacagcagatcgtcagccatgtccagaacaagggcaccccgccgccaaaggtctggttcctgccgcccgtctgcatggcccactgcatccgcctggcgctcatccgcttccacgtcaaggtgaggccggggatccgggcgggccggggaccggggccgcgccgcacccctatcccccttcccagggcgcagaatgtcgcccggccgtggcggcgctgggggcagcgagttcccccagcccttgcccgggatagcctggccgggccgggctgcaagatggatggccgcgggtgcaggccgcgcgctgcccaagcccgtctccagctgtccctgttcggggtccgcggccgcgtggggacacttgagggctgggagagagccccggaccagaattcggaggcgacagtgtcatcatccccaatatccttagtttttcccatcctatttgaggcgggcaggctatcactcaccttcaactttgacaaaatactcccttttctaatttagcctgttctttcccagcaacaggttcatcttggaagcaggcaggatacagagtaatagagggggtttcgccagagcccttgggggctgcaaatatcagtgctgctgccgccgcccttgccaatgttgttagcccggtgacagcgagacgtgtctaagggccagtgccctggcctctacttcagaacgcagtgccctgtccgtgttcctcttagtacagggtgtttagagaatctttctatggctttttgtgttagatttcaaagacccgtgcactttgacaggatgggattttgtcagttctgtgacttcacgtccgtgtgaaagaggtctttaaggcagttcggttttgtagatcccatgcgaaaggagtcgctcaaaatcagggggcgaactacgcgggcgtgaactcgcaggatttatttttcgggtgcacagtaagtattcagtgaccttcagcggtgccctgacgggtgggtaatcagagctctatatcaccggcctcctctggccctttggcagagggcttcgcagctggcactgggccagaggagaacttcaggacccagcagtgactgtgaagataagcacatccatgatcctggacttcacgttctgattgcttgcttttttcattggttttcttgaaaacaaattttgggggcctttttgttgtcttagctcttgacactcggtcttccatcttgtcatttgacatttccttgaaactgctggagctgaaagtttgtgaaattctgtcttcgcggttgcccccactgcccgcgaggagatggtggtagttaagcctaaaatgatagcggaagtcccacccacgatccggttgcaattggtgagatggtgtttaagtcgtgggtggaggcggccggcagagtcccgattggcccctgcgcctggcagacacacagctgccattcctcagggaagttcgggtgagaggaagtgcctgccttttaatttctgaatcggagcctggggcgctcagggaagtaaggtgctgccatttgtctgaagcgatccatctccctaatagagcgtaaaagtgttcatagtttagtcttgttcagagatggaaaagactacttaaaagacaggatgagctgcactgacttgcctttggtaaccgcacagctctctacttaactagtcaagcgactttcaagggaacactgtgaatattacttaggattagaatcagtatgtatgcatatggtcactgtatctttaaagaactgttgagttctttttaattctacagtttctttatctttgcacccctttgaatgcctcgcacacctagtaggtgctcagaattcagaccaatgtgtcagtgttaggaaactagatttaagctccatttaagatcgtctttttcacttaggtttctggacacgggataatgggataattttgtctgtattttgcttttgctaagcttttaattattgacctagggtcatattatagtgcgaattgcacaaaatgaatattgtaataactcaattacttggtggtctcttagctggcaaccttacctttttgaaaagtgcctaagagatttagctactagaaatttctcagcaaccaagcaagatgtcaggaagtttgggtacagtgatgtggggggttggcgggtgtaggggggtgcttttgctttcctcactgaagaatcctttaagctctctcactcatggactggcctcttttcatatgtaattctaacaagcttggttatctattttctaaactcagcttgagaagaggatgaagaggagagtctgccagaggcaggagcaccattaatagcaagaagtgacaagagagatttaaaaagctataaaaagcaaacataattctggggctattttaagaaaaggaaaacaaccctatgtacttccttggtccctgagggtagtacaatgtttattctataaggatgattttgagtcataaaaattaatattcagcattctctgtttaagggattgaaacagtgtataccatttaataaaagatacccataaagtggttaaaacgtttaaaaccatgatatcactacatgcctattagaatggctaaaagagaaaaaaatatgagcaataccaagtgctagcaagaatgctgagcaactggatccttacacattgcttgtgggaatgcagaatggcaccaccactccagaaaacagtggcactttcttataaagttaaacatacatttatcatacgatccagcaattccactcctgggtattttcctaatgaagacttttgtttgtgcaaaaactggtactcaaatgtccatagcagcttaattcataatagcccaaacgtggaaacaaagtatcctttaataagtgaatggttaaactacagtatagccatactatggaatactacttagcaataataaggaaggaattgctggtgtaggtaacaacttgcatgaatatttaattaaggttttatactgagtgaaagaagccaggttcaaaagggatgattataaaactatagtgatagggaccaattcagtggtgctgagagtagaggaggggaaggatgtacacataaaggggacagcaggagagatctttgtggagtgatggaactgttctgtattctgatggtggtgatgctaccatacattaaaatcagaactattcatccaaagtaaatgtgttaattttatcatatgataatttttttaagattaagtaaaaaccactggcaaaggaattgacatgaacaattcagtatatataatgttgagtaaatgagacatttataaaaactttaagca

SEQ ID NO: 588352 - DNA, 4001 bp, Homo sapiens
tgggcagagcagaaaagtagccaaaaattgctgtggctcctgtttggcaataatttctggaactgaggcacaactgaatattttaaagtatatcaacaattgagagagtattgtttacctgagtgcgccaaagttcaacaagccttcccacacgtttcccacatttgaaaaacttttaagtttgcagtagtacaaagagcttagccttagcctatgtatagtgggcaaagactgcaaggcactgtcccatttcactttaggattacacccaagcaaatgcactttccggttaaaaaaaaaaaggaaaaaattttattttctctatagtagttatagttgtatgactgactagaattactattaaaatctcattaaaaatgtttttcttaaaagtttacttttatatacttaatttgaaaagatttgttcaaacttttataatttgttctttaatcattccccctcccatccacttcagtacccagaaaactaaatatccaagaattcctgggtaaaacagacaaccactagatagatataactaacgtatttttttaagctgtatagttcttcatcaaatggaaatcggcaaccactgaaaataacattaaaaattagtgtgggcatgaagtatggaattttaaacatcagtttactatgctgattaagtcaacatttatattttcatcagaacttaataatcccataaataaatagagctctcagttatttaaaaaaatcaagggataacatatgtatttagacatattagcagcgtaaagatgtatgcttcaacacacttattggggaaacgtctgaaaatattactacactgaattcaagggtatccaaaggaacctgacatagaagttctctagaataacatcatttcagggaatttcaaaaaagaaaaggggtcaaataggaaatagcctcaaattaattgacaaagttcagtgtttgccccaactagattattctctctctccactgcaaaaagaaagtctcaggatgagtgaatcacttagacgaaagttcatctagtggaataaatggagaagccgcttgggcaggtgacacaggagagtcggtggtagtgctgactttcgctggtgagttacaagaagatccggcactgctgctgtttccatcaagggtatccgaagatacacacacaccaggatctgacagctgtgcaacgtcagaagaaagcatgttggtgatgccctggaaaaatctctttggctgatattcagtttccatttcacattttcttttcaatggtccaagaacacttggtctaatgcaattgatggggctctggcttctccgggtggtaaatcgggtcgttgggctgggaatagggcttggaggcaatccgttgctacttacaaaactttgcaaggatggcgaaaaacactgcttcccaattccccgagtgggtgacggtgctggtgacacaggaatgaaatcgatgcgcttgggggaggcggatttctccacgtcgttgtcactcaggctgaaactttcctcccaggagtggcttatctgcattgcggtctgcacctcccgttcgtggaccgtctctcggttgatcaagtccatgccctcttcttgtttgatctggtgcaagcggctgctgtgcatgcggacaggggaggccggcagcagcaggccgtggcggctcgggaacgttgtgctgttccgcctggcgctcggcgcctcggcctggaacaccggcgaagtgtcactgaggccgtggatcaggggggcgctgttagacctcctgaggcccccgccgccgccgctgccaccgccctccgccgggctcccgcccgtacccggaggcagctccaggtctagctccatcttctcctgagccatgtcgggggcagggaggcgggggaggtgctcagtcagggacctaggattcccattccccgcagtccagggccgccgccgctgccgccgccaccgagaatctgtcagcgggctggcccctctgcgcatgcgtagcccttcgcgcaggcgctcgcgatgtccgtactcgcggcgcctgcttaatgcgtaatatgtgcgcggcagtggtaggggaggggcgaggagtggtcgggccgctagtccgtatattccttcggcaaatagctattgagcgcaagctcgcgttgacgcatgtcaataagattgtcatattctggattgcatactcataaaacaaagccctgaaagagaggcccatggtgatgtggggctgtatgacgtggagtggcgcttggcctaatcagggagggcttcctcgaggaaggaacaatctcctgaaatctgaagaagtgggcgaaatgggtgcgatgtagaactttgcaggaagcgggaagcaacggctacccagccagttggcaggcgggaaccaggaggggaggagaaagtgtggcctggagtggagagtgagggctggcctgacgtgaggtggtggaccagaccacattctggtctttatcttgagaacaatgaaaacttaaagggttttcaagcatgggtgtaacagcaactgaaaagctcactggcctgcagtctggagaatacatattgggagattaaaaccttacagaaaaaaggccagagaggatggtcatttgcactaaggtgacagtgtggcagtggagatggagagaaaagtaaatctgagaactatttaggttaggggaagaagccaaaacagaggatggtattgctattgatttacagtcatagttccagcacaagcatatgtgtgaagtatgaaggattaaaccagtaggtcctcacattttaaaaatgaaaccacaattcttggctcatgtaattaatataaaaccttgatatctcattaaaagtgagtttatttgttcatttattcagtcagtcaaggtttttttttttcagcatacttactatgtgccaaacactgctaggaaatgggccctagtatgaacttttaattcttactgaggggaaaatagagaaacgcaggctattttcagatagtggtaagccttaggaaaagtaagatggtgtgatggagcactactgatagaagtcaggggacaattagagttgagatctaaatgacaagaagcagtaagtcacgtggacatctggggaatgagtattccaagcagagagaatagcaagtgctaaggccggaggcagccatgagtttgatgagttagcagaaaaagaaaaaagggcagtgccgctgaagcataagagcgggagtgttaggagagggtaagagttggatctcattctgaatatgatgaaacgccactggagggttttaagcaggggactgatattatctggtttatgttttaaatatcacttaggctctgtggaaaacaggctgaaagaagaccagagtggaggcagaaggatgaattcaggacctatggcaacagtacagataagattcttggactagggttgtagcagtgtcaatggggagaagcagagagactgaggatatgtgttgagttagaacaaataggatttgcagatggattaaatttagattgtgaaagaaatagattattcgaaggggactcatagctttttttatttaaactggtgagatggtagtattatttactgagagaggaaaatagcacatttagagttgtagaaattaagagatctgaagcagaagaacacaaggtggaaagaaccaacattttctaagtgcctactccctgctaggcactttaaacactccataatcccacttaatcctcactgcatagatattgttatactcattttacgaaggaacgattgaggttcaaaaattgcaaaaggcactacagccagtacacggaagaacaaagatctgaaccaatttgaatcaaggactcatttcaaaaacctgtattgttttttctgaatttcacatggattaaagagagaatttcgcatgaattagagaaggatggctaattctgagacgaaacaaaggtctaaaacca

SEQ ID NO: 588353 - DNA, 4001 bp, Homo sapiens
tattgttattttattttaaagtaacagatgaggccaggtgcagtggctcacgcactttcagaggccgaggtgggcggatcacctgaggtcgggagtttgagaccagcctggccaacatggtgaaagcccgtctctactaaaaatacaaaaattagccaggcgtggtggtgcacgtctgtaatcccagctactcgggaggctgaggcacaagaatcacttgaaccagagaggcaggggttgcagtgagccgagattgcgccactgtactgcagcctgggtgacagagcgagactgtgtccaccctccccccaaaaaaattaagagatgaggatgagacccatacatagctctgcctactttagagctgcaataccccacgcttcccacaccatcctccagatccaataccccacacttcccacaccatcctccagatccaataccccacacttcccacaccatcctccagatccaataccccacacttcccacaccatcctccagatccaataccccacgcttcccacaccatcctccagatccaataccccacgcttcccacaccatcctccagatccaataccccacgcttcccacaccatcctccagatccaataccccacgcttcccacaccatcctccagatccaatcctagagttcagctctttctcaaacacaaaatgggcttctctgctatatctttttgtttgtttgtttgtttcagggataagacctcttgctctgtaacccaggctggagtgcagtgagttgatcatggcttgctgcagcctcaaactcctgggctcaaacaatcctcccgacccagcctcctgagtagctgggactacaggcatgcaccactacacctggctttaattttttaattaaaaaaaaatgttgggccagtcacagtggctcacacttgtaatctcagcactttgggaggctgaggcaggtggctcacaatgtcaggaatttgagaccagcctggccaacacagtgaaaccctgtctctactaaaaacacaaaaaaattagctgggtgtggtggtgggtgcctgaaatcccatctacttgggaggctgaagcaggagaatcacttgtatctgggaggcggaggttgcagtgagctgagatcgcgccactgcactccagcctgagagacagagcaagactccatctcaaaaaaaaaaaaaaaaatttagctgggcgtagtggcctgtgcctgaaatcccatccgggaggctgaggcatgaggaatcccttgaacccaggaggcagacgatgcagtgagccaagatccagccactgcactccagcctgggcaacagagtgagacttggtctcaaaaaaaaaaaaaaaaaaaaaaagtggccaggcgccatggcttacacctgtaatcccagcactttaggagaccgaggcaggtggatcatctgagctcaggagttcaagaccagcctggccaacatcgtgaaaccgtctctactaaaaatacaaaaaaattagctgggcatggcggtggggccctgtcatcccagctactcaggaggctgaggcaggagaatcgcttgaatctgggaggcggaggttgcagtgagagtgaggcgagatctcgccattgcagtccagccggggtgacaagagtgaaactccgcctaaaaaaaaaaaagaaaagaaaagaaaaagaaaaagaaccccttgtcagtgggtgctgtagtgccttaagcctatgacgctttgggaggtcaagaagtgaggatcccttgagcccaggagtttgaggctgcattgagctatgatcattccgctgcactccagcctgagtgacagagcaaaacctcctctctaaacaaacaaacaaaaaagaaccccgtgtgccttgtgtcctggggacttgtgcacaagtcttacctcccatccaccccatcctccagagtgagagccccaaaaggaagggaccggaactggcccagttcctgactcctagcacgtccttgagagctgtttgctgctgagccagtgccggacagtcactcccagttcctctaaggccagccaggcggggtttcaggccccaccacctccctcccacctcttccatgctagactttgtttcctgctgggctgcagctgcccctcaccagctggtgactcagagcctgggcaggatgacagtgccgattgggccctcgcaaccctctgagccttctgtgaatcagcctgcggtgaggctgcgcccgggctcccgggtggggcacctccaccccagcctggccctccttcctctcccctttaggtcttgctgatttctgtcctccaggtcttctcagtagaatgaggataatcctgaattcagaacatatttcctgagtacggtgagtgcccaggagatgggggctgagagctggctcctgcgctcctgagagcacagtttcctgggcaggagcagagagaaggcccagaggaagatgggagggaggcaaggcaaaggatgctgtggggagagcccagagctgggccgcaggtgagcaaagaccactgtgtgttaaggactggtcagggacctgggagcagagaggttacgaggaccgggccttcccacaccacatggtgcctccgtgagaattagcaaagtcagtgaaaacaggctgggactgtcttgtgccagggccccagctggcttggcaagtgcagtgtgggctggattcagcccccatcacccaacgcatttgtgcagggagccctgagtgaggaggcggggatggtgccgcctcctaggggacatttggaaatgtgtctacggaggtgttttcatcgccactatgtctggtgtttgtgggagtgggggagtgtggggcaaggggaggggtcttggcatttagtgtctgaaatccagggatgctaggtgtcctgtcaaggtggctggtcctgccaagggtgatgaaatattctctgtactcccaaatccaggcctgagacccctctgctgtccagttacatcgtggagaggaccataacaactgtgaccttgtgaaattcttcccagtgtgctaagtcggtttttttgtttgtttttgtttttgtttgagatggagccacggctggagtccagtggtgcgatctcagctcattgcaacctccacttcccgggttcaagtgattctcatgcctcagcctcccgagtaactgggatgacaggtgcatgccactacacccgggtaatttttgtatttttagtacagatggggtttcaccatgttggccaggctggtctcgaactcctggcctcaagtgatccgcccgcctcggcctcccaaagtgctgggattacaggcgtgagccactgcactcggccgagcctggttttctacctatgctacctactttctccaaggatgccctgctctggaaatcttcaagggaatgccttttaccttaaagtagctccccttcctccctgtcaggcatctttgcataactctgaagagttttgaagatgcaaagtccttcctctctgcccattcagggaagcttctggccgccctcggggtgagtgggcagtggcgggtggaagttcctcaacttcattacagctgtgaggcctcggatcggctctcaccactctgggcatccttttttgtaaaatggagccagtaatttccactctcctggttattgtaggctggcaatgagggcatccgcggatggcacctggcccactcatcaaatggcagctaccctctctcgtgatgattgtcagcatctagtgtgaaagatgggaagagcctacatcaattcttttttttttttttctttaagagatgtaattgcccaggctggtcttgaactcctagactcaagccatctgcctgcctcagcctcctaaaatgctgggattacaggtgtgtgcccccaagcccagcctgcactggattctcattctgatgttacaaggtggatggggccatgatagaggtttgagccagcagggagggtgt

SEQ ID NO: 588354 - DNA, 4001 bp, Homo sapiens
acatgccaggggagagagggtgggctggcaattctcagcccaggagacgggaagacagggaggcccagcactgagtatggggagaggaaaaaccccaccgaatgcaaggcacaccccacccaggcccctcgaggggcctcaacaggaggtcctgaatggagggactgttacagagccccaggagcttgctgcgacagggaggggacaggaagactccgccctggcccttcctcctcccacagtccaggcctggtcggataaggaggctttccaggacttaaccccacgctggtcagaggctagagagggtccgattcattttcacatcaccccagtcacccctgtgcccagccagccccaggcctggcacaagggagggactctggccttgggacttggcccgggaccacagtcacttggcagatctccccagcacctccctggtgcccagcatgggtgcggccctggagacatggagttaaaggacacctggccactgctctcagggcttcctgctctcaagggagcgtggagaacacggtggtgaaattctacaggacacaaaaataagtgcaggcggacgcggtgctcagggcccactagacagcgaggggcgacccacctgaaccgtcaccccacatacaagtgcctctcctatgccaggctctgtgctaagcaagccacatgagttacttcacgtaagcctcccaacaactcattaataaggaagaaatcactgaccccatttcaaaaaggagaaaaccaaggtgtacaggacagatgtctgggaagcaaatgctgggattccacccagggcagctccaccagccaggagagatcggccagagaggagtttctcaggcagccgagatcctcatcctatctcactgttctccagagtctgtggggaaaaggaacccaggccccctctgcagctccggcttccccaggagccttggggacagctgtccctgggagaagtggccactgtgcagtaataggctgagagtagggttggctgaagaacagggttgaaggggctggcgactggccctgagggccccccactctggtgaccggtccctgggcccctgctgctagcaggggcagcctgctgtctgcgccaaaggacatgcaaccccaccgcctccggggcgccccatcgatccctggccccactccccagaatcagtcccgggccttcatgggcgcgtccttcaggaagcctccgccacgtgtaccagggctggggcccggcggagctggggacgggacggctggggaggaaggtgagcgcgagctggctgggtctgggagatcccaaagctggtagcggatgggcttgcaacgcttctgggcggggacagccaagggtgggcagcaggctgcgacccctgccccagctcggccaggggtcgtgggctgggggtccgccaagcccgggctccgaaggggttccgggagagaaggagttccgagtccccttgagccgggaaaggtggcgctcagaagagcgcgggaaggggcgcccaggctcagagggaacgagctcggacgcggggcacgctccctggcagctcccaccggcccggcctgactcccccgagcccccggccccggcgccaactgctggccggggcgggggcgtggtccgggggttccggcaggcccctgggcgcgcgtggcgcggcgcgaccctcacctgcgatgtgctggcgccgggcgtcgtccaggtgcgtggacagcacgtcccccatggccaggaggtgtcgcggcccgatccggccgacgccgccgctgttgcccgcgctgctcaggcggacgccgctggcgccatggagcccggcccgccctgcttcccccgctcccgccgctcccgccgctcccgccgcccggctgcggcttccgctccggctccgctcccggtcgggccccgtccctccagccggccgccttggccccctccctgccctcggccctgcaccccggcgccccgctccgccccaccagaccacgcccccgcaggccaaccccgccccctccccgcccgctgccctgcgcccgccgcgtcccaccccgccccgccccgccccgccctcggtcctgcacccccctgcgccccacccagcccctccagggcccgccccgtatgccccgccccctccgctgcctccggcgggcggggcacaggggcggtggacgccgggaccgccctggagaaggagacaaagagaaggtcccagaaagggagaccgcggagagactgcgaagagcgcacccgccctgtacctaagcagagaaagagacggggctggtggggacatctgaaaaactgggggtgctctgggggactccagcctgagtgtcacccccctcccctccccaaccttgcccgcgcgggaaaagaatcgcgccgaggaggatgtggggcactggcaggggacgcctggacctacgggccggaattcggcgttcgccccctcctctaccctgaacagtgccccctgcccccccaagtcccgcccgccactgcccgcgctcaggaagttccctggccttgattcgacctgccccagaaggtgtgcccgctggtcttgcacaacagctataggaagggggtggggaaggctcgggcccgaaggcacccccgccccagtgccaggcgggcttgcctcaggctcagcatatgggcatttcactcgggaggcggcttgggggacagagcaaatcagaaaaggaaaaagcagtagcactttacagtttgcaaaagactaccagaatcaaaacccggagaccgacaggcaccagcctatggggctgggcatgggtgggtcgcagtgccaggggaatgtgtttcagtttcaggacctcccaagctggcaggggagacagtcaggttaaccagtgggatccccagatctcaatcctttggctgctggtgctcagatctcctgatctgcactgggacaaggccatccactttctgcttgttgacccctggtaactaagcactcaccacttctctcatgcatttcacgttgttattgggcagctcttagtgtgactgtggcataaggcaggaagtgatgatgataacagttaaatttgctgagcacctgtacttcaggcctgtgcacaccacaggaggtaggtttgaaatggattaaagtgatgcaggcattcattcatgcattcagtcacttaccagtcattcagcaatgggtggtcaacacctgtgtgccaggccctctgctagatgctgggggtgaaaagagaaggaagcccaagctgccctcccctctgtgaccctggacaagtggcattacccctttgaacttcagctacctcatctgtcaaaagagaatgatgctttttgcgggagggttaaatgatatcacaaagtgcccagcatagtgcctggcaccagggtccatcatctctcaatgaacagaacgtgtcattctattattcatagtccctgccctcaagagcttagagaagcttgaggaaggagcagaacattctgttttaaggaaaatcacagagggggtaggaccagaactggaagttgaaaaacaagacttttgacagcagatactgagaaacagcattccagggagtggggacagcatgggcaggggcccagcctttgagggccgggatgcattcatgcgtcaaagagtcatcatcaggtggagttgaagtcatgctggttagggatcactagtttccttttatagaggtggaaactgaggcccagagagggaaagtgacttgctaagggcacacagtgaggcagagggagaacctggccaaaggccaagtctcctggcacccagtgtctgattctctctgagcaaccagaagcaagtgatgctgataacctcttttcatttttctcatagcccaaactgcagggtctgttctgcccagggaggagctagctggagctagctggcatctggacaccagaggcatcttcttggctgggctggaggcct

SEQ ID NO: 588355 - DNA, 4001 bp, Homo sapiens
ctctgtctccaaaaaaaagaaaaaaaatacattagaggagactccgtaaaatgtgatatccagaccttaggagtattcacatgacagaatagaggaaatacatcatcaaacaattcaagaacattgtttagaattcaagggcatggtttccaaattaaaagacacattggagagtccagtacaatgcaaatttgggctcaacaatgccaattatcattaagtttcagaacactagaataagaaaatttcgaatatgtttttagagaggaaagaatagatcaaaaccaagaagcaggcatcagactactggctgctaaaagacgatggagcaacagagcaatgcctccaagactctgaggaaaaattatgtccaaccaatcaagtgtgagggtaaaaacaaagaaattttcagacatccaatctcttgaaatttttactctcctcatactttttatctggaaactattggaacatgtgttccaccaaatgagccaaaaatgagaagatgtgaaatcaggaaaaagaatacccaactcgaaagaacggggaagggaaaccccagaatggtggtgaaaggcgatcagataagaaggctccagaagaggtagcaccaaggagatgaaactgaatacattgagaggagattttccacatactatattgtattatggaatttcactctatgatttccataaactacagcaaaggccatttttgaacttcttttactgcacacgttaacagtaggaattaaaatattttttgaataaatgaaagaatggaatacctgaatttgtacagtacagtatacactttgataagggctttaggccaggcacggtggctcacgcctgtaatcccacactttaggaggccgaggcaggtggctggcttgagttccagaccagcctggccaacatagtgaaaccccgtctccactaaaaatacaaaaattagccgggcgtggtggcaggtgcccacaatcccagctatttgggggactgaggcaggagaatcgcttgaactcaggaggcgtaggttgcagtgagctgagatcgcgccactgcactccagcctgggcaacagagtgagactccgtctcaaaagaaaaaaaaaggactttaaggtagatacagaggcttcagtatcctgatgactctcattcattctgtatgaacgatactggcgacactgattcactcatctacttgaagaccaagagcagaatcatattatgctttgagaggggcacagggtagcctattgttaggcaaatagaccgcagcaagattgtctaaaaccaaattccatttcatcatttagtatctgtgtaacttggtcaagtgacttaacctctctaacctttgattccctaacttgaaaatagggttattaattcacagggttactgtgaggatggaactaatgcctgggattccacattatcatttcctcgagctttggaattctaattataaattctaaagtctgagattacggaaaagcagatgtgagaaaggaattaaaagcacccactggaagccaggatgtctcctaggagggacttgctattacctagctgcgcagcaacaggcaatcgcttgcctacaagtctcactttccgcgcctgcacagtctccatctgccctgcccttgtactcactgggccgggcaagctggggaggcctaagcggactgggaagttaggctttccctccacttcaccagtcggctgcccctgcggaaaccggcccgacacacctcgctcctaaagccagttgcggtggtggtggcggttggggctttttttggccacgagagggcagcatttcccccggccaaccacacacgtacccctagcaacagcaaacccagctgcaacagaacaaaagaccgaagtcctcgagcttcccttccatcttagggctcacgccgccccggttaggtttcattagagcagcggcttttcaaggctcgtcgggcacggagggcggagcgagggagctctcgcgagatcgccgccggaagtgggtggtggcggggacgcagcggctccctcccggaaagcgagcgtatctcccgagccgttgccactgacagccgcgggcgctcccatctgagtaagagccagcccgtccgcggcctctccagccccgggttcgcgctctcgactctcctgcctgcccagctgcgcggcggagcggagcgaggcgcggcctgcgagtccccggcagcccccgacccctccctcggcgctgcgtgtaggccgcgccctcaggcccagtccgcggtgccccggcgggtgatgccaaatacagccatgaagaaaaaggtgctgctgatggggaagagcgggtcggggaagaccagcatgaggtcgataatcttcgccaattacattgctcgcgacacccggcgcctgggggccaccattgacgtggaacactcccacgtccgattcctagggaacctggtgctgaacctgtgggactgtggcggtcaggacaccttcatggaaaattacttcaccagccagcgagacaatatcttccgtaacgtggaagttttgatttacgtgtttgacgtggagagccgcgaactggaaaaggacatgcattattaccagtcgtgtctggaggccatcctccagaactctcctgacgccaaaatcttctgcctggtgcacaaaatggatctggttcaggaggatcagcgtgacctgatttttaaagagcgagaggaagacctgaggcgtctgtctcgcccgctggagtgtgcttgttttcgaacgtccatctgggatgagacgctctacaaagcctggtccagcatcgtctaccagctgattcccaacgttcagcagctggagatgaacctcaggaattttgcccaaatcattgaggccgatgaagttctgctgttcgaaagagctacattcttggttatttcccactaccagtgcaaagagcagcgcgacgtccaccggtttgagaagatcagcaacatcatcaaacagttcaagctgagctgcagtaaattggccgcttccttccagagcatggaagttaggaattccaacttcgctgctttcatcgacatcttcacctcaaatacgtacgtgatggtggtcatgtcagatccgtcgatcccttctgcggccactctgatcaacattcgcaatgcccggaaacactttgagaagctggagagagtggatggccccaagcacagtctccttatgcgttgaatattgccaaatgctctttctgaaaatgctgaattgccttttttgtttgcatcctttatttttaatattcataatgtcgtgtgcttaaaagtgggctttgaagtgtgtgctgcttactcctttcatctttctccccgcttccccagtctttaaacattggacgctatttactcagctacccagtagagcttgaagctgacctttctgagaagttggtatggtgtaacactaaagtaggtggttcgtgtgtgttctcattacctggttatgatagatatgcacatcaaagcctttaccagtatcttcctgtattccgtatcagattgcaaagacggaatgttactattttatcagcaaggtattaaaatgcatttataaattcttcttggcttcattcatgaataaacgtgttagcaatttaaaacatgtccttatttgaaataacttgaaagtgcttaatatgcaaatctaaaaattctgactgcccacaagtattgcttgactggcaaatttgattctgtgaatttagcccccagcactttagtgatgtttggtaacagctgtagaagcgcttatgctatggactgaagctagaccacctgagttagtattctggtcccttcacttactagctctgtgaacatgggcaaatacttaatttcattacacttgtttcctcattggtaaaatgtgggtcagaatactactttatagccagtcgtggtggctcacacctgtaattccagcactttgg

SEQ ID NO: 588356 - DNA, 4001 bp, Homo sapiens
atgtaaagcatcccagtagaaagaaggccttagtggctcatgcctgtaatcccagcactttgggaggccgaggcaggcgatcacctgagatcaggagttcaaaaccagcctggacaacatggttgaaaccctgtctctactaaaaatacaaaaattagccaggcatggtggcatgtgcctgtaatcccatctactcaggaggctgaggcaggagaatcacttgaaccctgaggcataggttgcagtgaagcgagatggcaccactgcactccagcctgcgcaacagagcaagacactgcctccaaaaagaaaaaagaaaggcggccttagaaaaaaaggttttgcttggtaacatgtagtcctagactatacactgctctggccccacttaacaaagctcaaaagcaagacccacgtttgtacatgatctagttcagtgagtcccagtcctagcaaatggccagaatcacctttagacagttgacagggcccactctgagagtatcaattcaacggcctgagcaactgatagttttcaaactccctgtgtgattctaatcagcagccagagttgggaaccatttattgatgccagagatatagaaggttgctgatccagtttttagagtgccctttaattctccacactactgataccatttttatatgcatgtgtcatatttgcccttttttcagatttcaggacactaacatattaagcacaatccatgtaccaggactcacatacatgatcttaactcttacaatagtcctatgaggtacgtattgttggtacagatgaggcgactatgacctggagtttagttaccaatctaagatcccacaattaatgacagcccaggaaaggtgacctcagaaccctcttgcctgttgctcctctgctgcccactccctgccccagccaagcagaaacccagctgccctgggaagcagatagaaggagcctctaagagatcatgtgagtgacagcagaccagtcagcccgtgggactctgactaaagtccatgatttcccccaggaccacctttactgcgcttccacccaaagatggtccttaaaggttagaagggagacctggcaggccaggcgactgtgaaagtaatgttttcattatccttattcaactctacacaatgtggaacaagttttactaataccttatacttctctgacaaagtaacaatctctctgaatgagaaattcagttatactacaggaattctcctcccatcctatcactttcccaaaaggagcaagactggtcccactgggccaggtgttctccctccttggctgacactttctgggcttcagggaagggagtgcagactgcgcggtcacgcccattttcaaccctcctgcagttctcaagtgaagcggcacagaaggcccgaaaacagccacattcgccagaactgatgtggcgtccgcgggcacaacgctagttgacacaattgtggcttaaaaaacgtagcaagtggacgaacccaccgtgatgccgcctgatgaagcagctgggggaggcttcccttcctcgggagtctgaaaacccaggctcccccagccttgccctgggcgtggccaccttacccgcaggagcacagttcacagatgcacttcgtcttcataggggcgatcctgaggccctgacgtcccctcagagcatcgccagctgcagccgactcctagaccccaaccacctgtcttggggcacgcccaggctcgagggtcttggcaggtgttctgtttactcgaaggaaaatttaagtggcccttttgcaatgtcctgtcgtctgttgccctcctggagctggcctagcgcgaggtagcagcagggggcttgcacgcgcgccagcccgggagacctcaccctgcacgccaccgccccggcctccgcagtccagacttaagcacctggagcggctgactgggccccaggaagctgcggggtccgtgcccaggtagcctctgtgatgtcgccagggccaggaggggcacgcctcaggtggcaattacatcacaagagccgcttgtgaggtcgggaagctcccagcacctcactggcaggcccaggacaggggttccccggtgaaccttggaaaaacctgaaaaaggtggaagtcactagaaagctcctggtgcagtaaacggtcacacgtgcagaaaagctgaaaactccctcaccatcaccttgggtggcatttgctatctctaggatccatggtgccccctcttaggggaatacagccttgacttccaaaaggcttgccttgaacagggtttccagatcttcctgtggaaacctaggcctttggcttcagatgtctgttagaattgctctcacccacagacctgcgctcttgagaacacagtggtttaagagcgcccaggccttcactgctcaggtgggttctcaatcacttctccagatgctggtaatgatgccttgaagcaggcgttctcaaattctagttggcatcaggaccacctggcttgatgaaaaccagattgccagaccccacccccagtttctgattcagtgtttctagggtaggccaaagacttgcatttcttacaagctctcaggtaatgctggttctgctgggccacggaccacactttaagaactacagcttttgaggttcctttacaccccctggaatagtgtttcttcagcttacctgatcccgagagcacacccccacccagaagtctcccttgcatcaaaacctctagtccgggaatctagcttcaacaagaagccaggtgattctggtcatgaagcaagttcaaaagacactgctctggccagttgtttggacttaaaacattttgacttcctgcttatgggaaatgggagcttaaagtattgacaatctttatgcttttctttcctatgcttcctaactctttccattcattttagtgaatgagtcagtcagaggcatcttggactgcaagacacttaatattcagagggtttctttttgtgtggggggggttaggttttttccttcagtaataggctctagaatagaggtcagcaaactattgtctgcagttggccacttgactctatctggccattgagctaagaatggttttcatattttttaatggttgaaaaaattaaaataataatattacatgacaaatgaaacttacctaaaattcaaatttcagtgtctgtgaataaagttttgaattttttcaaaaaatttgtgtaaacattcccgattttgcctcttggcccacaaaagctaaaatattcactatctgacattttacagagagagagttccaaccccagttataggaagtcagcaaggtagattcagacaggagcaaagcttattgatcattcttaagaacagtggggtgggaagctgctccttgccttcccagtaggaagtcagaactctacaggggaggatggaaacatggccagacaaaaaagaggtgggagctattggaagtcaaagcaaaacctgcatgccatccattgccattgacagagaacatcacacagtccttacagaggaaatacagtgctggacaccagccttctcttgatggctgcctaaacattatccataaatctttcagcagaagaatgcctgttcatgccccctgccattcaaactgcccttgtgggtggccaccttgtcaacaatcatggtactccccacttcctccatccatgccctcaatagagggtagagatcttgaaagatgaagatggtgtggacaaaatagcctcaacaatgatatacctaaagatcagtgctagacagtagggacaacctcccctcacctagttacacttactgtccatcttttgttacatccagccaaacttaccctgacccatctgatatggtttggttctgtgtccccacccaaatctaatcttgaattgtactcccataattcccacatgttgtgggagggacccagtgggagataatttgaatcatgg

SEQ ID NO: 588357 - DNA, 4001 bp, Homo sapiens
cctgagaacaactgtcaagccagcatgagtttccagttggaacttttccttttctccccatgtttgtcactgttttaatggacattgcctggctattaaatcccccgatgaactcactttgaaaattatctattgcactgggcaccctttcaggaatcactgagtgttaattttctcagtctgagtgataatttatgagtcaaacaaggacagatctgaagccagaggctgctcctgttgggaaatccctgaggatgatgttccagggaagcctccagccttgggagtcccgtggaactgagccagcccaggtcatgaaaggagctggtgccagacactgactggggacctgctggcctctgggcagaccgctctgtccctgcacttggcctgccaggtatccctgtgcagtcataccaagtcctgtgctcagaagggccccagagtagtttaaagctctgctgccacccctggaagctcatgattttgaacaacaacaacaaaaaaaaccccacattttccactcagccccacacattatgtggcctgcacagctgtcaggctgtggccacagtgctggcatctctcacacaatgaaggctgctggagtcctggcttctagttcttcagtaatcaagagcaatggtcttacctgttcacaggtccccgtggctgctttacagaaagcaggaagtggccacttcagccacacggctgcatttccagctcagtccaggcagaggtgcaccctgccttgcacctctgcagatcctgaggggagtccttaactgagccagggcgagtcctgggggcactctgcccctgggcaggccctgaatctcctctgctcccacactctagagttcaacgggtctcaggggctctgcctgaggactgcccttcaaccaggtattcgtaatttccccaagacccaggcttgctgagtcactcagttacctgaatgcctttttcacaaagggatgactgtgctgctccgtcttccttcttttttgtttgcgaggccacagggaaatctggatcctctggtgaaaaagcaaatccagttgctgctgctgctgctgctgctgctgctgctgctgccgccgctgccggttcttgtaaatgtcctcacttggtttctgggcagcaacttccttgacttgcctggggagcggatctgagctgcatttaccaggccatgcccaggggaagtgatcagtgtgggaccgtgaagctggatttccccaggagctccctccaaccttctgggatgatgataagacttgggatgaaccaaggatctcgaaccatgggacaatgtgaagtctagacctagtggaggaagagaaaggctacgggaagggcaggcttcacgttactgagcatccgctacctgccacacactttcacgtggccttattctgtgtgtttctcacagcacccttgagaaatagagactacgatcacatcttttacataaaagaaaaccagcatccagggaggcgaagtcccttgctcacagactgtcatgtgggaagctctctggatgcaatgatgtcctccagttgcagtaccaggcaagctgtcccagagttcatggagcggaaaggctcgagaagcaactgaggatgctcgaatcacaggtttataaaatccattcgtaaaacacagcaagaagctgagggaaggagatgggagggccgtatgacctgattcctgtgctgtcaacattcatcggttctcttctttctctgctagtcaacctcacccactcaggtgtgaccacgaggaccagagccgaggtctgggcaagagtgctcacagctgaagggcttatgacacacaccggctcaacgggacagacatgggacaagtgtgcctgatcatggtggagttgccaagaagcagctgtcgcactgccatgggttctacgtgtttcttgggcagaggacgcatgggaccagaatgggcaccaggaatggtggtgaacaaaggccccatggttctgcatgtttaggtgtctcttgtataaaggcacattgtgaattgaacatttagtgcccaggagcctcatgcatattaagtatctcttggcccttgtgtctcttccttcccacatgtaacatacctgttctctgtaactatctattctgaacgtatctaaaaaccatgtcttgcctgtgttatacaaaccacatgcatactcacattgtctgatgtagctgaatgtttcctaaggccagggcacatttcagggtcacatagagtggagagagggaccaaaatagccttgctctgtttgactcccagctgagatgtctgctgggcagcactgcctctgtaggctctaatgggggaagggagctcaggggagcctctggggctgggcaggctaccagagggtgtggacatttgggtggaccctgacggaggacttgggtttccttgggaggaagtgtcaggaagggcatctggggctgagagcactgtgtgggcaacagaaggaaggaaactgtggctggctgggaagggatggtacgggggacagggtgagacttctggccctgggtgctcagatgaagacctggggttgcctagtggctggaaacacacaccagctgtggcaacttgacctctgggatgtgagtgtgcaggcagctgccgagaacggctgtggatttggagatgtggctacagggaatgggcagtggattcatctgggaattctgcaggcagtggcccatagaggaaacagcctggaaatgagactgcagatacgtgctaaagaggctggaggaacagtgaccccagtacaagtttatggatcttatccacaatctaaagaaatggaagccaaatggcttttgaaattctaaaatacatgcagaggaagagtaatgcttcatgggagagccagactcttactggcagtgacgctacacggtagagctctgttcctcctgcccatgtctgtggttggggctggggtagtgcataaacatgacgctgatgaggcccaagcattgttggaaaagaattcagcagctgccacaagaatcttgaatccgtgggtgaagaccttgactttctctgggaccaatgtggtcaagaacaaagtaaaatcatgacaacaaacactgttcagttttccaaatataagctattttaaatactctacatttaccctcaaagactgacataacttagaataacttttataacagcaaggatgagaactaaaacttaaattgtaaatacaattttatttataaaaacaaagttagcttcaaatattttatgaactagtagaattttaaccttttgtcacatttcccagcaaagtaaataattctttttttcacttctagtctgtcagaagaaaagtcttagctcaaatggccagaaactctgacgcacactccggaagctgcttccggggcacctcagcatggccgcttttccatgccggccctcacttgatgcggtccagcagggttgaaattgtttgaaatgcttgttcccagtgcggtaaagaaatagcacttgaatgtaaatttaatttcctcagcaaggccatttttatttttttttaatttctgcagaaaatgtacactcgccagcagttttgccacaacagtatactgagcaaaggagacagtgtcatttataacctgacgcatccaccctactgctgtgtccagtttccagtggctggaacgggacctcacattctgtatttgtcccgattggctagcaacttagaacttttttaaagaggaaaaggcagaggagaacaaaggaaggaggaagtaacttgtggaatgctgaaaaaagtaaaaacaccttcgagtaaagaagaggaacaggcaatgacctaaagcttgcttggactagtataagcatgccagggcaaatatttaggctaaattgtgggagctaagaacataaagtacattgatttctttattagggctagcagatatttaagaatgttagcacgg

SEQ ID NO: 588358 - DNA, 4001 bp, Homo sapiens
tctatacatttccacgttgcctctcccacggcagggggactgcgacatggcctctccctctccccgtgcctccctctgccaccaaaaagctggtcagggcggagcatcccaagggccctgatgcccctgaaagtctcccttctagggggcagctggtccatcttcagggagctcagcacgtgtctcagcctaggcagacacttggcccttgaacccggaagagtgtgtgtgtgagagagagggagagacgggtaggggagagagagggaaaaatggagagaaagaggctggagttcaaggtggaggagcagaatccttggtctgcaattgccagggagggccttgctgcagggccctgggcctcactgaggtcatcccttccttgagcaggtgagaagggtgagacccagggagggggtgacacatggagacctcctgggaaggccaggttgttgggtctgagacagaatcatcaggagtaacggtggcctctgtgcctgagagccctggtgcatgcccagccggctgtatggtcacctggtccttctagccccaggccccagctgtgcctccccccaggacacatttgtgttcaatgagccttatccctgccacgagcctgggggctccccaagcctgggcctcccctgaggacagggattccaggagggctcagccaagccccacttggggcctggggccaggtgggtgtgccaaaggaatccccccattgtctcaggaccttcaaggccaggatcccgggggcgggcccaggtcacacgtcggtgctgatgctgcggctcctggcgaaggcctcccgcatggctgagaggcggttggggttgagcgcctgcaggcccccgaagccccccgggggcagctccacgtcctcctggctcacgctcttgtagagcacgcgctccccgccgttcagcacgtcctcttcctcctccggcggctcctgcaggaagaaggtggggggctcgcagtgggagcagctgcggcagagggcgcgggcctgcggggacttctggctgaaggaggtggaggcggtggggtagagcgccggcccgttggtcagcaccaggttgcggttggagtgcagcgggggcaggtgcgagtgaacggcgaagtctggttcctcctcgtcctcctccgactcgtccttcttgcagcagtagtactgcgggcagagggacggtgaccatgcggccgcccgctcccaccccagaaccgacatgtgggaaaggctacccctgactggggaggggagataggcacggtgggagtggggtggcccaagcccaggcctgacacctcagctgtttaaccagtgctatgggtctcactcaggccaggcgcagtgctgagcacttcacaacgatccactcatctcttccgcccagcaacgtgcaggtgtgactgttatctccattttgcaggtggggagactgaggcgtggaggggttcgcagccccacatcagcagagccgggggtcacaggcactggcagctgtgttgcctcgccctgccccgatggctccccctcatctctcagggagacatggagactctggatggccctggagtgcaggtgggaaggattgctcactgtgacactccttttgggcagctggtgcccttggctaagtcccttcccgtctctgagcctctttataagctctgggtgaggggagtcaggcgcatcttactgagccccatggtagggtcctgctgccttctgctgtgtgtcttctctgccacagggctcttccccacttcccgggccgtgacccttgtgaccttcaggcggggctccctcccgaggtaggggcaccctctgggcctccctgccctgtccccttccccgccgcccgggaatacctggagccggcagtagcacagaacagcgatgatgcagagcaaaatcacagtcgccaagatgcccccggtgatgaccacggtcccggctgtcatccgcccccttctccatcaacagcctgcaacacacgccgccagctttagagcatcacgcttcctcaccacaaaagtcactcgtgctattctagagaactgagaagacaagctgaggggaaaaaagcaccccaggatgtgcctgtgagaggcaggggctctgccggggacggggtgcagcaggagcccaggtcctgctctgcctcagctggcctctgtccctgcccctctcccagcctcagcttccacatccgtagaaggtggatgctaatagcacagggttttgtgacacttttacaagcgtgtctctccatgcttagtgtagcatgctgtcaatgaatggcgcccttccagcctggctctacaagcttgcacgtttttaaatttacccaaatgcagtcaggccgaacatatggttttgtaacctgcttccctgcattttcatctcacacagtcaccattattctgccatatccttaaattttcttctgcaacatagtctctaacccgattccattgtttcatgtaactgactccttttctttaaaatgcttaattgtggtaaagcacacataaaatgtaccatcttcaccatttgtacgtgtgcggcttagtagcatgaattatatttcacactgttgggcaactaatctccagaatttttcatcttgcaaaactgaaaaccaattcctgcctgacgtttgggcttcttacattaaagaaatatttttagcaatgttttaataagcgtctttgtagctaagtaatgggaaccacctgaacctgcttcagtggctttcaggatacattcttagaagtgggatttccaggcctagggacatgccctttgcaaactccttcttgtggaaaatgtccatcaaacacaacgcagggaggctggagtgatgctgtcagtggctgctgcattcagctcatccctgtcctgggctgtgctgataaaccagctctcaaagcacccggctgggagcatttgctgatttttgtggtgtagattttcttaccatggccagtttcagttcaagcaaggtttgacaagcggcttacaaaattcctaaattcttcacaatcacctctcacagagcagtgggagctggcgccacttcccttcctcaatttcccaagcctcatttttatttttttttcttgctggggtatggggtggaggaagagattggagtattttaaaggaaatcacagagcatatcactttacccataaatactccagtgcagcatctgacggaggaggattttaaaaaaattacccagcctacgtttagctttctcctgtcgtctctgaaatgccttttttacggttggttagttcaaatcaggatgtacttgcttttggctccttttgctctagaacagctcaaaacccattcacgccccgcacccccatgttgtttattggagaaactgggttgtttatctgacagaattttccaggcactggagctggccgggattcctcgcatggcattgaacatgctcctttatcagtgtttctcctctaaactggcttcctgttgcatcactcccaggggcctggtgtctgctgtccccctcatcttgacgtcacaatcagctaatgactgcagctgctctcggccagttcttccattgccagattccggggggtctcccagcccattgctgcagcatcctgtgcgtgacctggatctgttacttcactaggagttacaaagtagtgactttccaaatgttatccttctttccacgtttatgagctccagttcttcttgaaaaagctctaaagcacatgcctttatcatctgtgtggttaccctagcatgcggcctgcagagggaaggctcagaggttccattcctccctttatcagggatcagaatgagctggtgccctgaggtttgtggctgtgtgtgtgccgagaggacggagaacaggccagcccagatccacacctctcagtgaaccaaaagtgaccctgccccctttgcaggccccgcgtgcctactggtccca

SEQ ID NO: 588359 - DNA, 4001 bp, Homo sapiens
cgtggtacgcccataggtgttccccacctggtagcgcagctgcggaaagaagccggcatagctgtggagggaagagaagaaggcagggcaggtctcaagggcagccccagcactgggcagggccccttcaagccagatgtggattcagcctgctggccacttagcagcaggttggcctgtggcagctcgcctgccctctgctcacctgtaaatggggctgcagtggcacttgccttctagagctctctcagcctgaacaggcggcacacaccacatgctgggaacacgtcagcaccacagcagatggccgcctgccttgtaccagcccctccaaccctctcccacccctcattccaactgccagcaaatcaggggtgctctgccctggcaaagcaagtacaggcacaagacgtgtgggccaggacataggcgagggacggacccttggacacacgcagggcccaccaggagggtgttgcgtgggcttggcctgcacctgtgccaccccaggaggccagtagcctcctgcacgggaagagaactgggaggcaggtggagggctgggcttttccgggccctcattcaacctcgaggggcatggtgcaggtggtcacaggcggttcagcgcctcagggtctatgtgatctttcaaggagtgagaactaccttcgtcttaaaaactgccaaagggccgggcgcggtggctcacgcctgtcatcccagcactttgggaggctgaggcgggcggatcacgaggtcaggagatcaagaccatcctggccaacatggtgaaaccctgtctctattaaaaatgcaaaaagttatccaggcattggtggcgggccctgtagtcccagctgctcgggaggctgaggcaggagaatggcgtgaacccaggaggcggagcttgcagtgagccaagatcgccccactgcactccagcctgggcaacagagcgagactccgtctcaaaagaaaaaaaaaagccgagcaacttccagcctcagcttcacctgccccttccccagacgtagctgttcagaggcaggtgtggtttcttcccagcctttcccctttgcatgtagcgtgtgtgtatgtaggtgcacacacacacacgttccgtagaggggttacttttattttttgtttggggggatatctagtgaggcagcctggcgtttgcttgccttgtctttaaagtgtggagtcctggccgggcgtggtggcttaagcctgtcatcccagcactttgggaggccgaggtgggcagatcacttgaggtcaggagttcgagaccagcctgaccaacataaagaaacctcgtccctactaaaaatacaaaattagccaggtgtggtggcagatgcctgtaatcccagctactccggaagctgagacaggagaatcgcttgaacctgggaggcagaggttgcggtaagccaagattgcaccattgcattccagcctgggtaataagagcgaaactctgtctcaaaaaataaataaataaaatgaaatgaagtgtggagtcctctctggagtgggcgtcgggcacttactagccggcctctgccggctgctggctgacccagtttctgctcgacagacgtgctggccaccaggtatcgagttcgcagctgcacaccagcagggagggtgaggcctgggcccctggcaaccccatccctgagcttcccctgtcccagggctccccagcccacagactgcagtgccccgtggtgtggccttcagtttcctggggtccagctctgggcccctcacagctggcctccatgcctcaggccccagccattctccccctcctgcagccctggccccagccacctccagagctcccggctctcacccagggacatagtgaggctccggcgtgaagagatcgtgtttctgagtagttgtcattttgctttcactctggccttgctggctccagtccctcccggcatccagctcccttccctgaggggagtcctgtcaccgggcaaccattgtgaggggccagcattgtgggcacctcctgggccaggccacctcgctaaccctgtgagggcccacattgcacaggtgagacactgaggcccagacaggtgccaggcaggggaggagttgcggtgaggcaggtggtccgggaggaagtcccattaacttcagagctcagaaaacaggactgtccctccagaaagggcctgggctcttgctgcccccaggaggccaccagccccagtctcagggtgaggctaagggagtccccaggccccctcctctgacaggaggccttgcagctgcagagccttggctcgagtcaggggcttcccggcctgcagggctgtgcgaactctccctccagcccttcatgtggcgcagggtgttatgtttacattttaagcaaatcctgaattttgttctttttttgtacaggaaggacttcctaaccataaaaatgaaggaaggcggccaggcacggtggctcacacctgtaatcccagcactttgggaggccgaggcaggcagatcatgtcaggagttcgagaccagcctgactgacatagtcaaatcccgtctctactaaaaatacaaaaattagccaggtgcggtggcgtgcgcctgtagtcccagctactcgggaggctgaggcaggagaatggcgtgaacccaggaggtggagattgcaatgagctgagatcgtgccactgcactccagcctgggccacagagtgagactctgtctcaaaaaaaaaaaaaaaaaaagaaagaaagaagaaaggctgggcactgtggctcatgcctataattgcggtgctttcggaggccgaggcaggatgaggtgtgcagattgcttgagcctaggagttcaggccagctgggcaacatggggaaaccccacctctacaaaaaagaaagaaaaattagccaggcatggtgaatgtgcctgtgatcccagttacttgggaggctgaggtgggaggatggccagagcctaggaggttgaggctgtagtgagctgagatcgcaccgctgcacttcagcctgggcaacagaaccagaccatttctcacaaacaaacaaaaaaacaactaaaaggcaaactaaaaaactggaaaaaagtttgcagtaagtgctatgaacaaatctggtatcagcataaaaagctctcacaaaacaaagatataaacaacacctccatggaaaatgcagactaatatggtttttttttttgtatttttagtagagacagggtttcaccatgttagccaggatggtctcgaactcctgacctcgtgatccgcccacctcggcctcccaaagtgctgggattacaggcgtgagccactgtgcccggccaatatgacctttttaagaaaaaaagaccgcagtccgtaaatataagggcataaagcaggaccataatcacatacatgctgactgtgtgttgagagcagtttctgaggcttactgccggcagggtcacagtgagaagggcctctaatttgggtggtgccttctggaaaccaagttggtatggatcacgtccatacaagacactgcaaactgggaccattgcttccactcctaagaagctgtctggcattctggtagacgctggttttcctccaccgttcctggctggtaattcccatattcccatagcccttggtagggccttttgttagaatgttgggtgggtgatgcttggggggtgcgggcgggggacttttacctcctgccctcctttcacctgccccaaggcaggacgctaacattctcacctttctgactgtgggtcttaagacccttccaggagaggtcccacctaagccctgggggcaggaatgctgacatcaggaagcttccgtaaaatcccaagaggactgaggctcagggaacttctggacaggggaacacctggaggttcccagagggcggcaactagcgaggacatggaagcgccagcccctccccgtgcctctctctacgcttct

SEQ ID NO: 588360 - DNA, 4001 bp, Homo sapiens
tttctctttgtgttcccccaccctcccaccctcccacccacctctctcccttccaaaaggatggctgggataggatgaaaagggaagggaacttgatgtccagtggcctaagccaagagctgcttctggaaggtgctgaggcccagagcatcatgggtgagatggccaaatgtgtggccaaactggaacttataccctgtgtggccaagagagtctgtcacatgtagcaagtggcatggcaaagccatttaattctcagccagttggctagacctccaaacagccctctaaaatctggccctaattccccactgtgggtagctacctcggtttccttttctgcctgataataaagctgaaccacatgatctgagccctcccatatctattagtttcaacccccacaaaccacccaacccaccccatacccatacaaacaaacattccagtccccaaagcctccccgggggctcttctcacctggcacgtagcccccatagttaggtaaaagacccaggttctgagggtatgttctgggaagtggggggagatgtttggggtcctgggcactgcctggtgagtgcttctgcccaaattcctgcagtgcctggttggtgagcacaggaaagctggagccgaagaggaagcgggcgcagggcacatagccagtgaagcctgaggatggggacactgagccaaggcatcctggggcctccccacgcctctgatcctgaccccccagctctcacctgacatgaagaacttccgagggtccctgtcatccatggagtagggagaagcctgtgagagaagcccctgtgctgtcacacaatctcccaaggaggtggagctgacaatcaagtgcacatcccctgaacccacagccacactactcatgctgcccccactgcccggacacacagtaagacccccactcccacacctctgcactccccaccagcttcttggtctcacttgttccaccacctccagtgtcggctcctccagctgcccctccggctctggcacctggtccttctctgtgtcctttcttcccttggcctcctttggtagctcttcactcccttgcttttcatgcaagtgagtaaagtcactcagagcctcggcccagacctggctgcagttcttggcaaagatgaactgtgcccggggtacaaaacctgggcaggcagggacaaggaagactcgttagtgtttggaacacatgctcctgggaggggcacctgtgcatacctgcgtacaaacctgtgtacccagggatcatgctggagctgagcctttcttgcccacgcctgacaggtagactctccctgggaacctcaggagatcttggaggccgaatgggaggcagaagtgtgcggtggacagggggccaggctaggccaggagggcctcgaagtagctgaccagtcacctgcccataggtctggcccacgctgaaccgaagtagtgggcagtgtccagtgtacctgcagcacagactctcccactcaccagaatcgccctgccccgccatccccagaggcagaagcggagacctctgaagccctgatctttctggactcagcagtgtatatatttggagcaggcatttctaagttctctgcctgggctttcgatccttcctctgctgttaccctgttcccatggagagaacaacacaaagctttggggcagacccggtgtctcactagtcccttgcttctccttttccatccaccaccatagagacctcagcctcccaaaccaacctgtccgcttggccccatgctctaagcagcttaattcctccaccctatacccctactcccagcagcaagcggggagcgctaagtgggagtcttaccctgggatataatgagggttctgagggttgagccctggtatgaaggtgctggccacagccatggggagccgggcatttccttttgtttgcctttgagccaaggctctggtctgtgtgtaccgtgtccagggctgtggggctagaggaaggaggcggggctaagggaggagagaagggagggggcactcgtgtgaggacagccagggcgaaggccggcagaactgtagagcagaggctagcaggtctgtctgtccaggacaaaggtggtcctgctcgtggggcagggcccgaaccgaaggaagccctgaggtgggacgtgggaggtgggacgtgggaggtgagggagcagaaaccattcgggccactgagctctgtctcagcgacttccttcctgagcgcctgcctgagaggtggacactgtgttcctcatgagtcttcatcaaaggagatgggggacctggagaaaggatctttgagggaagccagggcccagaggggaggtgaaagaggacaggtgatgggggaaaaaaaggaacctagacacctctagggagtaacatcgtttattttcaataatttaacaagagtggcttactgaatacctgctataatcagagtcatccattcaacaaatgagccaggctctgccaggctccggccacagtggccgagtgtgcactccatgggagccagaaaagctgtgggggttgagggaaggaaacaggataaagttgttgtaggtgtgggcggtaacactagggagcaagttagaatttgttaaaaaaataaaataaaataaaaaattcggattctaagagaagaaaaagcacagaccaggaagatgagatctcagaggacggggaaacatgtttaaaacccaactctgggccgggtgcagccacgctcacatcaacgtactgaggaggctgaggtgggaggatcacttgggtccgggagtttcagtccaaactgggcaacacagccagaccccacctcaaaaaacaaaacaaaacaaaaagttctggggctgggtcagggccaggctgagggctcagggcccacgtttctgaggcagagctctgctcttctccccacctccagtgaccatgcctgcgctgaccaaggacggcactgacatcccaggggaattacataagagcactgggctccaaggcacacatttcatgttcctcactgttctgccaaggacagccttagaatgtgtcatttagagttgtggggacttacctcacagctgaggaaatatgttagagtgaggatgggagccgaggggcaagcccagaatagcagcagtgtgtcaagcttaacaaccagacttgggattctgtgacagacactatcacagcttatacctattcctgacccccatctcctttcttccgaggagccagaaactgcatcagggaggcttggagagccagcctggaggaatgagctggattagtctaagcgtggtcccatgctccttccccatgaccgcttaggcacgggcttccagcattctggataatatgaggggaaatctgctggggcaggggagggtcctgggaaaagtttctttgctcttaaagaaaagattcacatcaaattagagcaagtgagagagacagagatgcgcaagacgaaacgatgtccattcctgcccctagacttttgggggatgtgaggctggaatgctggcaggcatgtggaagccttgtggaaagctaacctgaagacaagtcctggacacatcaaggatggatggtagaggagaaaggccagggtcctgagggtaatgtagagccatggaattaatcagcctttttatgtcaaatagtaaatttcattattaaggccactttaagttttctttcacttacagccaaaggcatcataactttaaaaaacaaaacagccaggcacggtggctcacacccttaatcccagcactttgggaggccgaggcaggaggatcacaaggtcatgagttcgagaccagcctggccaacatagtgaaatcctgtctctactaaaaatacaaaaattagccaagcgtggtggtgggcacctgtagtcccagctactcaggaggttgaggcaggagaatcacatgaacccaggaggtggagct

SEQ ID NO: 588361 - DNA, 4001 bp, Homo sapiens
ccacccggtgtccatagatactggctggcagcagcttttctctgaagttgggcactctttggccccaggctcagcgttcccggttggaggagggaggagtgggtcctgtagagcagacatctctagctagctgctgggcactccaggacttttggccagctcatccataatgacaggtcccggttctcacaaactgaattctgcacagcagcctgcatggctccaggaacccagtggggttaaggccttcctttaatgaccaggtacaagcgccagttcacacacaccccctcattacctcctgaactcgtctgggggtcgagccaccctacacatttcacatttacgtgtgtcttaatgcagaataaaacaagcgatgtgccccagtcaaactgtcccatctcacaaatacacctactatgtgccaggcattcttgatacatcagtgaacaaaaatgatcaaaatccctgccctcccagcacagacgttgtcagtgcagcaaatactcaataaccaaaagaagtttaatcattttcctcccactttcctgccacccacaccctgtccttccaatctcccaaagagctgggtgtctttaattctattagcttgacagggaaaataaaattcttcagcctgcgcgcaacagacactacccaggtgcaacccaattcacccctgaactcgaccgtcgcggaacatttttctccagcctccaaaaacttcaggtggcgtgaggctcccccaactgcagccctggaggccaacaaaggggcaatggagaggaacgaccagagccccctatcaccgggatgaccgggcgaacggggcgcgcgcgcggtactcaccgaggagccggcccagaacgggcacgagttcttcacctgcggggagctgctcagcgacagcgccccgaagctgagcgccaccatgcagcagcccaagatcagctgaagcagcccaagtgacagcagcgggcgggcgggcagcagcgcggagcccggggccgcggcggcagcggcggcgactgcccggcgggaggagagcgccggcggcgcggccagcaccccggcagcagcggtggccgcgcagcgaggccgcgacgggggctgcagcgcgccccggggccagcgcggccgcagcgggggcagcggcggctcctgagcggcggcggcagcggcgcccgggcccccggcctgcggcccacccgaaagcccagccacggggcagcaggagcccgggagcaccacgggcagggacatggacggacggggaagggtgcggccgggtgcggccggctgcggcgggcagaggacgcggagcggagccgagccgaaggcgcagcacactgggcactgcagacgggctccgaggccgagggggagggaaggaaatgcgcacggcccaaccacttgctgccgccgctgccgctgccctggctccagccggccgcacccacctgccgcctggcgggtccgcctcccgctggccctgggcgcaccctcactctcacccacgcgcactccgtgctcgcgctgtgccggggcaagtgcgccacagcctcagggtccccgccgaacctgcgccggcttcctggggtcctgggagggtgccctgccccaaatatttaagtaagtccctcgaggtgggaggcacctcacggccaggacacgtcagcgccggccaccgagagtctcagcgtctgtccccacccgccgagctggggctagagaagagcgaggagccttctctgtccagccacgagagaggccctggcgcgctttagtgagaagggggcccgcccttaaacttttgcccaaggagggggatgcctggaggaggggctttggggcgactcgatgggaagaggtgtaagccaaggacttcgggaaggacgacgccgagcgcagttaccgctcacagggcgcaggacgtgcctacctcgcatcggcgcgggagtgctttcccggcatctcggtaggagcgggaatgaaaggactgggttaccttggaagcatccagcatccgtaaagaaagtacccggggcagcccggagtgcatggcaagtgtaacgctctgtcctctcattgacttatgagctatatcaggcatctattaggcatcacctgatagaacacggaacccccaaacttccgaggaaatatcctaataaaatcctaaactactctggtaatttatgaaaaatctttagagcaaaaaaaaaaaaaaaaaaaaaaaaaagattcctctttgcaaaatgaattcccttaataatatacttttcacctcggaagaattctaatgcgtagaaagtttcgtgcctaaaatgattataatggactttttttcctgataagaaccagagcagtgttctttgcagttagtcagttccagtattagaaagcttatcttaccataaggtatttaacatcctcctacccaataaaccaagaaaagtatgtgtcagtttttatgctctgcttgtggaagctggatttatattggtcgttacactttaacccaatgtaatatactgtcaatgtgcccaagtttacatgcacacttcttaaattattaaagcacttgtctttaatggtgcctaggacttcctttacagactgctcccatgaataaattcaaattctggaggaaaagggaaatgtctttcaaaataagtgtttaaagtctgttgattcatgcaggggttttttgttttgttttgttttgtttgagatggtgtctcgctctgttgcccaggctggagtgcaatggcgtgatctcggctcactgcaacctccgcctcccgggttcaagcgattctcctgcctcagcctccagagtagctgggactacaggtgcccgccaccacacccagctaatttttatattttttaatagagacggggtttcaccatgttggccaggatggtctggatctcttgacctcgtgatccgcccgcctcggcctcccaaagtgctgggattacaggcgtgagccaccgcgcccggcttcatgcagtttttaaaaatgccatacagtatatgctcttaaattgctgctgatgttaaatgaaaagcttcttggggctgaggttatactctattttatatacaagcttaacagtatttaatttttaacaatgtattacaccatgcaatatagtaagtctgactgagtcttaagaaattctctcagctaaacaaatctatttcattggccagttcttgacacctgaaacttactacaaaaaatgtattatttgtgtctaagaatgttgctgttagaagtcaggatatccactggtccttgaggagggacatgattatgactggaaagagggtttcaaggggtgctggtgactatttctttcttgatgtgggtactaattacatgagtaaggttcattttgtgaaaattcatggagttacagttatgatttgtgtgcatctctgtgtatattatatacttaaatactgtaaagtatttccaaatactttattcttaaaatttttaaagcctttttccccatgcagaaacagatgatagcaaaaataactgaaatccgtggatgattttatcatcttaaaggctttactcattttataaggtgactaaaacttttccaaagctactaattaagggttgttgtacagtcatttgttgttgttgttggccacatttataactgagtttctttttctggttataaacacaaatccatgtaacactaccccaacctttaaaattatgccaataaaaatatcaagtatttgggcttggtatttttgtaaaccaagcttgattctttgcatctcccaaaccctgcttacattaagtctttagttagacctgaacaacctgtatgtaactaagctcttataggataattcagagccattgatttccgtttgtcttaataaaaaaaaaaaaaaaaactgaagacttctgaaaacagtctggcaatttctcaggaagtcaagtatagtgtttgttgtcatt

SEQ ID NO: 588362 - DNA, 4001 bp, Homo sapiens
aattctactgccctatttccctttgctaatccattaacttgtattagggcaaaaatgttctgaatcatttatcaaaagctgctgtatgtaaacacagagatttttaaaaagccatgttgtaaatgtcctgtgttactttgtaaataagcagaaaataatatgtcaaacttctcaacaacctaccctgccctatagctcttacaatggcaactttttaaaaaatgtgtgtgtatgtgtgtgtatttcttccctatctgtctagcacagctcattaaaaaaaacaaattgagaaagtgggcaactgaatatttctaatgaaaacatgatggtaactataatgtcctacaaaaatactggcctgttcattttactttgattaactattacctcggtatttaaaaaccattgatacaggttcccgtgtattccaggtctggtgcttgggtccagcagtgatgcactctcctatgtatactctagctacaccctgacaaaatcagcactgaagaagaagaagcatcccacccatttgacagatgagtaactgaggccaagaggcacagaacttataaaggtgactctgctgatatgcaaaataaaggaccaaagaaatcaataaaactcatccccaaaattatagtttaaatatcccttaaatattaaagtagtatttgattagtatgataaaaaatatttactatcatttaactggtagtaaccataatctttatgttagtttttcgtttagtccattgatttttctttatgtttattcactgcgattttttttacaaaggttcaccctaaagttcaccaatgtctgtctctttacgtgaaagtagaaccttgccaaagaatcatggactcaaaggatgatcatgaatttagatcagtgacttaaagcacagacatagatgtatacaactgataaagaataatagggcactcagagaggagtaaaaaacaacaaccaattctctaccactcatctgaaatatctcccaaggatcatgcatgtcatcaaaggtaggaattttgtttctgaaggaggagagacaacccaatgcaactctctctcctctttcattaaatctagtgcagtgtggccgactgagtctcccataccccagtggaatctacttaaccccagtggaacctagctaactcccttacccagtggaatctagttaacattaactcccataccccagtggaatctaattaaacccagtggaacctagttaactcccataccccagtggaatctagttaacattaactcccataccccagtggaatctaattaaacccagtggaacctagttaactcccataccccagtggaatctagttaacattaactcccataccccagtggaatctaattaaacccagtggaacctagttaactcccataccccagtggaatctaattaaacccagtggaacctagttaactcccataccccagtggaatctagttaacattaacgcccataccccagtggaatctcgttaactcccacaccccagtggaatctagttaacactaaacgcaccccccaaaccgagagctaggacagcacagctgaagacagacactgagatcctcccttagccactcacctccagtcaaatgccaggttgtttttcaagatggctcatctcttagcttcacgaattttgggaataataatatattgagtgatttaccggtgataccaggaagaaatcaaatgctcagagtgctcaaaaacacagactacgttaaaaactctcccttcaagttgctgaaagtatgaatgaaaactatgaaaaaagatgctttatagaatttgttaattcttaagtgttttttaaaatagataaaatataccttcaaagttcaaacaagtgaaagaagcctccaaaatctcaggctcagggctctcttaaggaaatacatatgaaaaaatatccttgaactatactgtgttcaacaaatagtcatttcaaataaatatatttgtctcttgaacctaattttgtatcaaatacacaagcaaaattttcagtgaagcctaaagaagatgtgtgggttcagttgatatagcaggctaaagatcctaatggtcaaagcttgaaatatgaggatattcttctactgtgttcctatgtgggtttgaagtaaccttagacataagttggcacttccattcaactacctagcttcatatgccaataaaacttgtgagtgaataaataaacatggcatatccatacaataaaataggaatgaagtactgagacttgccgcagcatggatgaagcttgaaaacatgctaagtgaaagaaaccaatcataaaagaccacatattatatgatcccttgtatatgaaatatccagaacagacatatctacagagactgaaagtgggttaatcagtgggtggctaggggtgggggtggtggagaatgaggagtaactactcaaaactttagggttgataaacattttctaaaattgtggtgatagttgcacaactgtgaatttactaaaaaccattgaccagtacactttaaatgctaaatgggtaagttgtatggcatgtgaatatatgtcaaagctgtgttcttttttaattctgcagttctcaactcataatcttccaacttttttttttatagaaaccttagtttagctgtctttgaattagttacaatgtcctatcaagcccatttcttttataagtacatactaaaatactaatggctgaagttgtgatacctggaatttgccttaaaataatccaggggtgttaggaagggggagcagcgttaggtataaagtggccatgtgttgatagctactgggtgaagggtaaaatgcgggatcattacacccttctttctacatttgttgagtttttaaatttttataataaaagatttaaaattgaagggaatggttcttcggactgcccactcaatcctatgctggttatattttcttgtgataaaaatacacacattggaatatatacagatgaaatgtgacacctgagatttgcttccaaacaataagagaatttaatctcacaaatggactagggagcacgaaggatctaattcccaccctgcttggaatattcatccttctgaagtttatcagaagacacaaggccagcagcagagcccaggaagggggtgcagatgaaaccattgttgaagctgggtgaaaggtatatgtgggttcatcgtatactgcataaatgtaaacttttccataacacgaggtttttaaaaaacaacctctgtcacatgcataaattcaaaacatgtgatacaaggcttttttcccctaaagcaccaagagagtcatggtgcctaaagccatcctcttaaatttgtatttaattgttctataaatacagtatctactgcttctgttgtcactttgcaaattctgaggtcaatctcaggaacaagtcacaaaaagtaggaatagccaacagttatagagttgcatatagacctgtgtttggagagtatggggaagaatggggaaagacatatagcagagaacttgtcagttccaaatcactgatttctttctctcctctggtgtgcccagacctggagacaaggacatacccagccagcagaccaggagtattaaccttcaccttctggtggaaggcctttttttttcttttcttttcttttggtacttcatcaaattcaactgtggcttgaccgatatctaagtgcatttacctctgaaatgattcacaatagtaaactgatttcagcttttaattttagaagacaaaaaatagtttttaagaatcctaaactagctatgtttgagaagacaatagattatgattttataaagagcaaattcctaaaaatatatgcaagatcattactggcccgtggtatttagagaaatgaaatgcacccaccatttggctggacttagtcagacaaacagaataggtggcataacgggtctaat

SEQ ID NO: 588363 - DNA, 4001 bp, Homo sapiens
tgtctaaggagtgtcccaagtactggcctcactgaagacagaaccggaggaggtcatgtcagcagagtctagccagagtcaggtattttcccttgaaagggtatagctttattcccttgaaagagtataaagagaataagacaaggatgacttctttattcaaaacccattctcttaactgggtaacttatctcatggctgagtgcagctccatgtaatatgttttatgaattatacactagtaaaatcctgaattgtagaactgctgttaccctagcacagaactgaactgggcagctcatctctcctgagacatgtgaaccccactcttccctggcaaccctctcacccagtgtccctgcttccactgtgtatgtctccctcccagccattatctttctccttagtcctgccccaggccaagccaagaaatcatcataggccaggctggttgttgatagagtgcaaagagcaatagatcaccttttaatgatggagagcagcttctgtggcttctcagcttcttcccgggaacgtctcctagctgaggaacggggagacagtgttatatggcatgggataatttcataggcatcctataggaagctgaatagtaaggcctttgactctcatcaagaaaagactacaatcctgaaaagtccgtactctaaggcatgtctgagtacagcatcgctgtaacacaatgtcccatatctaatttcatttgatttttacaaccacaatgtgattgaggcaggattgtcagtgttttgctcattttgtggataagaatgagagatgaaatgacttccacagggtcataaaactagtaagttatacaattaagaacatctgctctactttcttaattcttcatttccagggcattgaggtacaggattttggaacattctcaagttatgatttcccacccatggaaatttcagtctggggaactggagtcttcagtggcagagcacctggctcttggctccagaggtcacagagggacaggattcatgggaaacacccacagtggaagggagtcagaggagagattgggactttacctgttgatgctgcatctctagctctttgcctgactttttggtgacacttagaagacaaaaacattagaatgtgaagctgggacaccattttctttctcatgtccaaaatgagacaaaacttacatacatttttcactcgctttgtatatatctatctgtattttatacactctcctggacttcctttgcctattccacctttttaccccattttccttctctgcttattttggattcacttggaggcttttccaaattctatacctcccatctgattcacagagaagtcctgctggatgctgaggatgacacaggaggaaaagcagaacagacaaaagggtaaatggttctaacaaccaaaggacttctgcttacaaagcccaccaaccggaaaaatcccccatattcagagagcttccgagatccagcaagatagacttcatattatctagttctcaatccaaaccaaatagagaggttcttggcttttcaatcagactatgttgcgggaagggcctggtaaggaattatagtctctgagaagaaaagtattacacaaaggtaactgaaagtatgctataaaaattctggggtggggattataagggagcacggtaagaacttataggcttcttatctgaggcttaattagttcagttgggatcacagccctacccggcagcagctccttttaggttctgaactcaattcatggtggctccttttcacttgccagataattacaataacgatgaagatggagccatagatgtataagggatatccaacttcccacagaacaaaagtagggctcaacatggtctaaacttcattagcatgagatcaaccatccctctatctcggaattcagggttctggtgcctaatgaatcccagtgctaggccttgtcatgtccacctcacagaggacggaactaggccaccagactgcatcacaaagccctcctgtttcataaggtacatgtagtagggaagctcatgtggtgattcagtctgtagatgagggtgttttgagcctgggactgaaggtgccacaagcagtgtctatttcctagtctgtcttcactttccactccctataccagcctgatgcctcggctctctccttcacaactgtatggtcacctgtcctcagaaaactgagtgctttggcacaggggtcacctcataagaaggggtagataggccggaggaacctccactaactctcccactagttttggtaatatacctgagaaacacacatgaatttagggagggcggagtctggttatggcttggaaatggagatctttgatgttttaggcaatgggtgattggtaacagaggtgcaggaaggggaccatggctgatgtggtagggtggtagggagaggccaaggtggttgtacgtatctggtctgtgtggcctcaagcttgcagatgggttgggactgtaaatgctaccttccatggaggcacattcatgctcagggagatgaatgcctgcagagatgggttagtggccgcttctgactgtgggtcacaagtgactagttgctgttcatggttggatgtatgctgtttgcctgaggatgttttttttgtttgtttgtttatttttctcaaatctgtattttgtaaatttttaggcagggcatgtgttttccaattcagcttcaggacccattacttccatagccagactattgatttacctgcctagcttttgtagatattgtgatatgccaccaacacctcagtattcctgaatttccttgagagagttctgctctggtaatggtggtctcaggccaagaaacctttgggctgaaaatctctgaagaggctttggtccttcctcagtatccagcccacccagcagatgtggtaagcacccaatatgtgctcagccctaagctggggagtgttgaggatacaaagacatttgagccgcattggctttctgctttcaagatacttaaaaatgtagtttcaaagacaagactaattcatacaaagcaagagccaacaatcactacaaatagacttatatactcattcgtaaggctctggccacaaacattccatttcagagaagagaaatcatagtgaggatcatggtcatcagagagggctcctgggtagtcgaagttaagtttaacagtgcaggttgtgggtaaaaggactcttcctggtgggagaaaaacttaccagctcatgctgaatctagggaatgggccatggagttcatttggcaataacaaatgcagtgtatctctagcagaatatagaagggtggactggagagcaattgtgagaaagattggaggatcaggatagaggcctcttgatggagggagggcctttgtatctattttatttcaatccctaagactattttttttaaagtaagcatacttacacatggcacaaaatttaaaaggcagaagagtgtatagctgtctctcatccctgtctcctcctatttttcttcctcgtgtatctctcttttaaaaaatgttttatttttattttgtatgggtacatagtaggtgtatatatttatggggtatgtgagatattttgatacaggcatacaatgcataataatcacatcagggtaaatggggtatccatcacctcaagcatttatcgcttctttgtgttacaaacattccaattatacttctagttatttgaaaatgtacaataaattattattgactgtaaccaccctgttgtgctatcaaatactaggtcttatttattctatctaattatattttttgtatacattaaccatctgcccttctcccacccaaacccccacacctcaccccgctacctttcccagcctctggtaaccatcattctattctctatctccatgagttcaattgttttaatttttagctcccacaaatgagtga

SEQ ID NO: 588364 - DNA, 4001 bp, Homo sapiens
tggtactgatctgataggaaatgcttttaattgtttttccactttgaagaactggatgagattctgccaatgtgatgacacatattctacaaggagaaaaagttgatcctgtgtgattgcttggaataatttttcctcccataactcctattggaacaagaatgtatgaactggtatttgtttagtcaaactatcatcttccccctttttcctttggctactattggggcataactgtagaatagagaatacaataataaaagagaaaacaagattgaatttctttcccaggaaagggaagagtaccagaggtctttaggtaggtagcactggggtagaagacaaagaaataaggcatgcctgtgtatacgagataccatacatgtctctaccgtagccctttctgtgggctctgaacagttcagtagttgggcacagactggccacttcaagtagcagctgatgatgtggtcctccatttggatgtttgagtaatcaaatttatatgttcagagtggccaggcactggaatactcattcttgccaaacaaactcctataataataccatttcaacacagtagaagataattaatgcatgtttgtttagtgaacatttgttcaatccaagaccacaagaccataccaggctacaataccaggaaaaaaaaatttttgataatttaaaattcccaatttgcttaccggttagagtgctgtagtatacagtggtcctcacaaaattttcctttgacatctagaagaatacatgagtctgttggtggctgaaatcaatatttactaccactatgtggtactttctttgggtcatatagttgataatgaagactggacacatacatgctgcatgctgatcacgggtatcccttcattactcaaaaagacatacctaaaggtttcctagaaagtatttaaagagatctggcccagatagaataatttattcaacattaaggtaattaactccttgctccatcttactttacactcacttcaaaatgagtacacgtagtatttttgctaggaaaatgcaattagcatcccgttctttatgatatatattttttgttggtggtttccaggactgtcctgatgttggtgcaagtccgacattctgggaaacccctcagtcatgggtgaactaggacaggttggtcaccctatgtttggccaacagaaaatatgctacaatatatattttttaaactgagtataaccattatcactgaatgaaaggaagaaaggagagtccccaacgatgctcccaccactggttctgcttacacaaaacagtacaaaaagaatacctacttctaagtggcagatggcgtctcttaaggtaaatgtatagattcttcttctttctaaatgtctctaatctaacccaccctcttctcgccatccctactgcctctaccttagtttcgatctgatcatttaaataattttatgtatcgctactccctgtgagagtgagcccctcaatccctccaggcacttaaggactgttgcaacctagccctccgcctacctttggggcctccgtttagagtactcatcttactgcgagcaacaccctagagctcgcactgcaatcgccggccccagaatgcgccctgaagtatttcaggccaccaggtctttgcaaatgccattccctggggctagacggaacacagaagtccagtgccttctgacgtggggacggagagccagggagagcgcgcgtggcttatgatctgtcaacatagtctacacagcattaggccagtgcggccaaggagggatcaacatcactccgcacttacccggtttgtaccagcgagtgaagtatcgatccacgagcgaaggcaccaccggctccgcggcttcgggctcggtagccatggcgacctccggcgccgccacccccgccctccgggaccccagcgcttcctccgcgcagcccggactgggcgtgctcttccggcgcacagcgcgtgtcgtgcgcacgcgcgctgctctcaggtccgcaggttccacccccccccccgccccccccaattacagtgctttggggttcgacatcaaaacagagatcaaatacaaaagtttgggcagatgggcaagagggcagagggacaggggacgcggccaatgtagctcctctacctctacggtgccaggcctacaaagaaggccggccgccgtaagtgaccagaagcgggcccggcctcgccccctccgcctggtgacgtcactcccgcgccgcactcccagtgctgcggctgcctagttgacgcacccattgagtcgctggcttctttgcagcgcttcagcgttttcccctggagggcgcctccatccttggaggcctagtgccgtcggagagagagcgggagccgcggacagagacgcgtgcgcaattcggagccgactctgggtgcggactgtgggagctgactctgggtagccggctgcgcgtggctggggaggcgaggccggacgcacctctgtttgggggtcctcaggtaagcgatccatccagggtaggggcacgggagtggacctctccgccggcggtgtccgggtgaaggagacccggagcctcctctgcctgctgcgggccggggactggagtgcgggctgcaccacctctttcctagagccttaaattctttttgcagccttgccacctgctccatcgggggcgctgggaggcgcgacagcccagggatgcctgctgcccctccagccggacttaacccagcctcttgattgcttgcagggggttgataataacgctgaaagcgagagtattaattcacgatggaaggcggcggttaatagaggctcgggtgctgtggtgcgggtcctttctcgcgtgtgagactttttcgtggaggtggtgtcctctgtgcttctccatctaacgtggtgttttacgtggctttctctcccgttaacgatgatctccgtggagacagtggctgagtaatcttcagatcccagtacttagcaagtgctcagtcggtgttggatgtaggccacaaaccggatcgtaaagaattcaactgtatattgacagccacggaactaatcaatgaatagatccgtatgaagagtaagcaaaaaggcagcaaagacagtttttcagcttggggacatagagtagaaatggtctgtccccaaatagtgggaactgtcatttgggggaagaatagcaagttctttgctttccaggtcgcatttgatgtgcatgtgagacatgcttgtgattctatcaggaggttgaaaatgtgggtttagtggtaagtttgggctaattcagtcagggctaggcatttaggcctaatcagcgtattggtgatctacctggtatatgtaatcatgcatgtgatgtctagccaagaggtggatagtcgaaggagcaagggaagaaaatgaagcagttatcaggaaattaagagagaatccacgattgacctttggtgtggagggatctttagcacatttaagaactgcgaagagtttgaatcagtggaggcaggaaggttggaggttgcagatgtccaagaaagagtactaataggcctaggtcctgtggcaatatggaggatattcctttcctagcctggaaagaagtggagggaagtcttcctccgagaagataagggaataaggctgatgggtgtgaaatttcagagaaactagttttgaggcgtttttatgatgtttaaagatgaaaaacgcagccaggcacggtggctcaggcctgtaatcccagcactttgggaggcagaggcgggtggatcacttgaggttaggagttcaagaacagcctggccaacatggtgaaaccctgtctctactaaaaatacaaaaattaactgggcatggtgccgggcgcctgtaatcccagctactccggaggctgaggcaggagaatcgcttgaacccgggaggcagatgttgcggtgagccgagatcgcgccattgcac

SEQ ID NO: 588365 - DNA, 4001 bp, Homo sapiens
gccctgggctgagtgaacagcaatccggcgatctggatcctatcttctgccctttcactgtgacatctggggaatcacagtctctttagccataaatttccaaacctgtaaaatgaggtgtttgtataaacaatgactgctgagggcctctgcagctctacaattctaatgactgttgttcactcatctccatatcagaggatagctccaggcattcgaatgctctgctgcctgtaccaaagcagaaaggctatatcctccagtctcagcacagcaaactgatgccctttctcttcatgccccacccactcacacaaaccgccccagtcctgaggaagctggagagtctgccctaggcccgccctctctgagagactgtctgggaagcagtgttgccatagcaatcagctcctcctcaaaaggcttcagcctgcccttttttaccccaccctaccccagggctttgtctgtcctcagcagacccacccccctccccagccagtctctcagctcctgggtggttgtgtgaggaggctggcttggggccccttttagcaacactgtcacactcatttagccactgtgtggaactcaagcctttcccaccctctcccagccagcccaggggcaaaaagaactctagcactccatcaaatcccctcagggaagcagaggagccctcaagagaactaggtcctagcctgttctgatagtgcttccaagcctggagtgtggggagccactccctcttcctcccctagctgtggctggaacctcacaacccttactgggttcagcttacagtcgtggcccacctctcaaaacagacagaagaccctcaatactcctcaccacttcccccctcccacagaagccctagcgttccctacccagaaggataagggtggggaaaatctgtttgtggcaagtggttaaatgtggctaccagtcacttggggatctatgcgagagacctgggtggtagtggtgggggtggggtctgagccctgccgctggttaccagggtctctggtcattgataacaaagtaccgggcagggcacagctcctagatgggcaagggccaggccaggccctggggcaaggaaggaagtgggaaatgagcacacccagagcataagggcagggcgggggaggggggagacagagaccaaggccggctctgggaggaacaggaactaggatggggggttgacaggaacccagcgggggaagggtcccccgggacctcagcttagggaagaaaccccagtctcagctggacagatccaaaatagactgaggagacattcacacaagccctagtgacaagcagggtctgactcctctctgagtgcccaggccagaaggcggagttaaaagctgagcagacaggagtgcaatagattggcctcttcaccccactaaccccaacacccttgctcttagaacccagaacacaagtgtcttcctgtagttactacaatgccctaaactgttactttgtcaaagtactgggggttctgttctcctgcctcaagttgggcctacaaccccttcccctagatagtgcccgcagaccctccgacaccgctacactccttctccattaaacagccccccttccttcaaagcacctccatgtcccctgcccctcatgtacctcctccaaccccccacatcagacagagacagccccctcacaatgtacctcgcaacccccccacaacaaagcgctcccgcccttcccccatagaggcctctggagaatgcaccttgttgcccacacattgagtccccaactgctcccgcgacttcgtatcttccctcaacacacagcagtctccagatcgtctgcaaagcgcacccccatccgcgtcccttcttccacgctcaccctgccccacacctgtagttccgtgggtcccgttgcacttggggacgtggtagtggttggggcagttactgagcagccctagctgtagcctccgcctgcaaacctcgccccttcagtctgagccccgcccccgcaacgcccgggcccaccctctcccttgtcccaccttccaccttctgtggacttgtccctttcctcgtttaatttctcgagctcctcccctgtagcccgggccccgcccccttctgacctcgcacctccttcgcgttttctttgcatttccccaggatcctcagcttttcccaggccccacccccgatccccgcctcctctcggtctctccgcctttcaccaggacccgccccctcggattccagcctggcagaagtcgcgccaagacccttccaccacgatccccctcccatctcagagcccctcctccttccgccccttctccctcacgcctcacccgggcggtcgcactccaaccaggatccgctggctctgattggcggtggcggccccaaaggaggaaggaggagacaaagtgatggtcgcaggtcgcctgaggtcccaccccggccacgtgcggcttctgtgatgacaagtctagaggggcggggcctcggccggcaggctgctagcctgagcggagcggatcagggcagaggtggggagatggagccagggccaaagccaccagcctgagggctctgagccgggttggggctatctcgctgctttcgcaccggtgtgagctgccgccggaactctaacctctttgtagggatgtctgggtgggcgcgtgcatttgcactaataggggaggtccgtagggattgcaaggtagtgcaaggaatctcaggggtctgtgaaaatgagggaatctgggcggtggggttcaggtctgcgaggttgagcagtttctgaagcctacgctgtgcaggcgggtgtgggttctgggatgggatggacagtaggagtcagatcagtacctactgaggcaggtcagcgagatctgtgaattttacgagatgagtgttgatatggagttaggagggcctgcaattgctggagaaaagtgaggcctttcccttgtacaggtgtctaatgaactgcatgacagttacatatgttctgcagtttaagcggcgccctctccaacctctccccaggagatacaataagggagggcgacgcttcccagacaccggtagatggcagcacaggacacttgcagaactgagacagcccagctcagcgccgatctgtggcctctccgaggagcggaccgtttgggtctggatttgatcaagttctacaaaagtcacattcttttttatttttttttgagacggcgtctcgctctttcgcccaaactggagtgcagtggtgcgatctcggctcactgcaacctccgcctactgggttcaagcaattctcctgcctcagccttcagagtagctgggattacaagcgcgcgccaccaggccgggctaattttcgtatttttggtagagacaggtttcaccatgttggccaggctggtctcaaattcctgacctcaagcgatccgcccgcctcggctgcccaaagtgttgggattactggcgtgagccacagcacccggccaaatctcagattctttaggctctgtgactttgtcagtagttaacttaaactggtttactcaacgtcagtggtgtggaagcgcaaaaaaaagaaagaaaaaagtattttctctggccataaggaacttattatttagacagtgatacaaatgcctacataatcccagaagggtaaactaagaaaggttttgggtagtgggaaaaccacagagtttgaagtcatctaaacttcttcaacttcaacttcaaacttcaacttatgggttcaacttatgagtttgtctcatacctttgagtatttactagctgtatagatttaggtaaattatttgactttaaaaaattaattttagaacaattttagatttacagaaaacttgtaaaaatagtgcagagagttttcatatataccctacacctagtttctcctattattaacatctttccttatatggttcatttattacaattaat

SEQ ID NO: 588366 - DNA, 4001 bp, Homo sapiens
ttagaactggaagggcaatctcgtttgacaagccaggttagctagaaagagaactcagaaaggaaaattatcttcagccagcccaaagtccttctttaagttcatgggatggacttctctccaggattttctggctcccaaataatccaatgatggcatgaggctaggaaaaagtcctgcaacacctctctccggtttaatattgtatgcttctgtaaaacttctttgttttggctcttagaactgtctaagcagtcatgaaagggggaaaaagcctttgtctcctgctaagtggccactaatgattctctctaccatccctcaaaaggtgtgacaaaaaggtggtgatgggtccctgccgaggcccatcttggctgctgtaatgggtaggttactcgcccaggaagctacaaagcacatctgtcagccagggggttataggcccaagggtagacctgtttctggccaccctgcctaacacagaagcagaacttcagaacttggagaactcagctctgctccagccagcacagctcagagaaatggggcatccacactttcggatttgtagcccaccttgcctccttccaattccagctcaggctccagggggataaagcgaacacagcctagacattccctctcttcccccctcactatacgagctggctaggcctccacgtctcccacccggttgcctgacagacaagcgaggtcagggagccccctgggcggtggccagcaagcatggtctcccttaggcctagcctcggtgcacccgagttgccctcccccttccattccctccgcgccagcagcgatgacatcattcctccctgactccgggaccgcggacaggcggcaggatccgcgcccagcaaggacttcaggcacgtaggcctaagatgatgggggctcttcccaaccagtgcgcacaggcagctccagcgcgaccccacttcctctcccgtcggttcccgagcactctcatctgcaccccgattccccatctggtcgccgcgcactctccttcccggtttagatgcccccagcctggtctgcctgcgctccccaccggagaacggaattcccaggttctgcaccaaccaccttcccccactgggtccctcgccccggcccagcgttcctgtccgtatatccagcggacaggcgggcaagcccctcctcttctaaaagctgattcccaatctctcttagcctgacggctcccccgccctaagcatcacaggcctctaggactaaacgcctccccacctcccatcccagacccctgggcctgccgccggcggtgccccatggcagttccctcgccagtccctgctatgggcctccactagcggtgtgcacctttgtgccccctccgttccatccgacggtgccctgcttccaccgacggtgccctccgcccttacaggtccctttgctctcatccagcatattctcccacggttttcttgtcctgcaagtccccgtcccccggcaatacgttttcagggatctctttgccccatccgatggcgcccctccgcacgatccccccggcctgattccctccctccccctcaagcgacgccccctccggccttggcctgcccgccgcccgccccctcaccagcggctgcatctccgagtgcgcggtgggcacctggaaccggtcgatctcctccatcatggtgccggcgggcgagcgggccaggggccgggcgcggccgcggacgccgacaggaccgcgcggggcggcggccccaggagcccggcgggtggtgcagactaggcctccccggaccactcgggcgggcaggggccgggcggatgcaggggtgggcgggggcgagaggttcgcagactggctgaggccggcgtgactccgtgggcttgcctagcactaccgcggctgtggccgggccgagccgcaggtcttgcctcgcctcctactccgctgccgcctcctgtcagcagctcagccactgcggtgactcggcaactccacttccgggtccgggacaccgcccggatcttgcattattcatgaggaggcggtgcctggggaccccagccccacccacatgcgggagttccgaatgcgcgcggccgcccagctgtgattcctgagggggcggggcttagtggagactcgctcgccgcgcgcccaaccccgcctcctttccgggccggctgggcgcgccgaagcgcctgcgccttggctgctggtcggttgctgggtaaccgcgtcagggagttggattctatcctgcaagggcacggggacccacaacgacggctgtccctaaagaaccgttgcgactggtaactgaagtggaagagagtccagatttcttgtgtgtggtcaaggagacggacaaactttttgtcttcagacgagggagcgttttgtaggctctccaggggttgagatgattcctgcttctgcgaaggctccccataaacagcctcataagcaggtaacgtacgcacaccttccttctgatgacctctgaccttcgtcgtcgccagtgaccactaatcatacctctcctactgatccttgatcttttctctgttgaccccagccttctcacccccgtgacctctggtaagtgctcccactgacctctgactctgtcctactctttcccactaatcccggcctcctctcccatactaccccaatccaccgtttcttacctctctccttttatccaccattcccatctcttcacttcactttaccccatggactcattctgaccagtctattctccttaacttccccatccccattcccacgagtcccttcctccttgttctcacattcttgtcccaaaggaatttttctttttctttttctttctttctttctttttttttttttgagacagaggctcgccctgtagcccaggctagaatgcagtggcgccatctcagctctctgtaacctctgcctcctgggtgcaagcgattctcccacttcagcctgacgaatagctggaaccaaaggcataggccaccacgcccggctaaattttgtgtttttggtagagacggggtttccccatgttgcccaggcccgtctctaactcctgagctcaagcgatcctcctaccttgaccttccgaagtgctgggattacaggcgtgagccacggcgcccagcctcaaaggcattctttatccaaccctttgctgtgtgcctagctccaggctaggtgggaacacagctcttgctgtttgggagcccacagagggtgtgcaagagaactaaacagaatacaggacaggctatgtgcaggagtgtgattttattttctgtgctgggagatttatgaggagagaaagggcaggcaaagaggaagaggagagaggcccttttctcatccctgtcctcacccccacagtgcacaacccaaacactctgccccaactatttctagagcctcatatctctctcttccctgcgagcccctggtccactcctatgattcattcagctatgtgaacattatgctcttattaccacctggacagatgtcatcccttctcacaggaaacccgagtcatcccccacttaacccactgagcacagagttctgctttcttcctcagcatcaccacggaaggcaaggcagtcccagtttcccaaggagtcttctgtggtgaagcaactcagtccttcaggaactttttccaaaccctttatgaattaccactcaggctaatgtgtagtttctagctctggaaagcaggacttctatatatttattccagatttaccccactcaagtctaggtacattgaggtttagagagccaatctccatgctacttatgactttgcatattttggtctggccacctccatgttagcctttgctcctctgcctcttttacctgggcttctgtagcagatggacctgactttcttaggtctctgcagccttggggaagctgctagtcccatatgaacatgccctaattttatgtt

SEQ ID NO: 588367 - DNA, 4001 bp, Homo sapiens
agctcagacctttttcaacctctgtacttcacactcatacccacctgcctgctggccttctcttctcttctctttttgtgatggagtctcgctctgttgcccagactggagtgcagtggcgcaatctcggttcactgcaacctccgcctcccgggttcaagtgattctcctgcctcagcctcccaagtagctggaattacaggcgtgtgccaccatgcccggctaagttttatatttttagtagagacggggtttcaccatgttggtcaggctggtcttgaactcctgacctcaggtgatctgccctgcttggcctcccaaagtgctgagattacaggagtgagccaccgtgcttggcccctgctggtcatttctaactgagtgtttccacagacagcaaaactgaactttgggaattatcctagtcttttccttttcccttagactccatcttcaaataggcaccaataactctatttcctatcttctaaatattccccaaatgcattctctcctctcccttccaattttattcaagttctcatcatcttcagcctttgtgtaataactttgcccctctacttccatccacagcattttaatccattcacccattctttcatggatttatgtaacttatacttttacaatgagcctaatctgatgcttttactgacccgctgtgctaagctctagattgagttgagtctaggagagagaccgattaaccaacaatggcaatacaaataaattgatgttgttctggggtgagtctaggatacggtggggagggggatatacctaatttatcctgcaaggatgtagtcctccttcctgacccaatcaggatctttctaaagtgcaagcccaacaactggcactttgtggcttaaaaacattccatgactcagtctaaaggattaagtccaaatttcttggccctggcattcaaggcctgtcatcattttcaacacagcctgaggattcctgccttaactttccgtgctccctactttacccccatgttccagagacgctagatatatcactccttaaatgcatcagagcctttttgaaggggatgtttgggaagggaattaggggcagaggtaggattacagggaggaagatgaccagagtcagctagagagaaaaggggcctaagagtggagaaccagaagatgggaggtgaggaaggggaaagagaaggggaggaggaaattgggtggaggaggagagtaaggatgaaaagtacagaatgtgggccaggcatggtggctcatgccagtaatcccagaatttgggaggccaaggcgggtggatcacttgaggtcaggagttcgagaccagcctggccaacatggtgaaacccagtctctactaaaaatacaaaaattagctgggcatggtggcaggcgcctgtagtcccagctactggggaggctgaagcaagcaaatcacttgaacctgggaggcggaggttgcagtgagcccagatcgcaccactgcactccagcctgggggacagagcgagactctgtctcaaacaacaacaacaacaacaacaacaacaacaacaacaacaactactactactactactactactactactactactactactactacaacaatgtgaagggactgaggggtgggagaaagacagatgtctttgagggaagagggcaagggccgttggagaaaccacctaccctctgggctttggcttggttgttacaagtccttaggtcaagaccttgacttaggatggcagggggaggtgttgatcctcagggaggaaaggctcttggttgtggatgtgcctcagctgcaggtgctgagtgttgaaatgccttgcctgaaagtctgctatctgggaaggggacttggatatctgcagaacttcgcaaaggagctctggcatgacctggggaagtgggtagggacaaggggtctagggccaatgagggagggtcttgactgaagcctccggaacccgggccaggagagtaggcgccggtcaccagggcaaccggaacgcctagtagtctccgtggcaacggcggtctggtcacctccccggtgggtaaggtctcctgaggggcttgcattgggcctcgagggggcgagcccagagggtttacttctgaaaagtggggtgtgtgttgcgggatctctgtgagcgagtgtttgggtaggatctgcggagatctgtgcgtacgtccgggggagtctgggattgtgaggatagggttcctttgagacatctgtggggcggtcgttgggggctgtgaggatctgaggggacctcgggctctgtgcttggggtgagaaaggcagggtctcgggtagctgaggcgggggcggagtctgtgtgtcctcgaagcccagcaggactaagttggggaccaatagagtagggcgggggcgggctttactgacagggaccaatcgagccggccggggggcggggcgtcacgccgacgtcaagtcgaggccgccgccgcggggcctggttatcgccggttcagcgcagcccggagtcgcccaggcctgaactcctacccaggtccccggcccccgccccgggcccgcgaggacaccggaggccaccccccgggggtggggagcggagccgcgggccagctctgcgagcgccccgcgctggcctgtccggccccgcccccgccccgggccatggcccagcccttgtcccggcccctcgtcctatcccaatccccgccttggcccccagccccgccctcgccccgcttcccacatcggccccagcccctgcctgggtccccatccaggacccccttccagtctctgcccctggcctggcccccatcccggcctcggccctcgttccaccccctgtcacaaatcccagcccaggccctgtcccagccccattcccagtgtttgcttaaggccctggctcaaccccgtcccttgctgcagtccccatcacagcccttccttccatcccactccctgcccttgttcaagccccagtgtccagcccagcccaacccattatctcagcctttgccctcatctctgtgtttacccaagtctctccctctagtcccccctatctctcatactctgcccctctcccagcctagactcaagtctgggtttcagctgccgccagccctattgctgctgttgctgttctctgtccttggcccaggggctggtgagtgcagaagcagggaagattgaggcaggaatggggttccggcagggaggggtgggctggagagattcaggagaggtgggacctggggaactagatcattggggagcaagtgggagaaatagagagtagagaggtcttacacaacagggattggcagggtcaaaagagtggtaattaattgggtttgaggctcagcaggtggcttacagtttctagcacagagactccaagattttttctggtgtctgtcctgaccccactttgactcttgcttttccagggaaatgttgtgggctttgctcctgctcacaaagtttgatgggggagagacagtcccacaccagaagcccctagtgtagtgtgggaatatatagcccaaacctttgagatattgggcatgcattcaaacggcatgaagaagagttttaaagataatatgtagcaaatagatgaatatggattagttgccattataatgagttttcttcttgtaatgattcttgttccaaagaagattgatttgcctaggaataattcctgatacttttagagcagggctgaaactcggaggctattttacagatggggaaactgaggctcagggagggagcaatttgtccaaagtcagagagcttgtgaatggcagtgtgctggggctagaaaaaaggtttcctaattcctatttcatactagtgtgtttttttttatccactgcaatgtatacttaatagaaaaatagacccaagtggggaaaggctcaaagcataacctcccttctccccggtctgcc

SEQ ID NO: 588368 - DNA, 4001 bp, Homo sapiens
tgaacgtgcccaaggcagggccatgcagggaggcccagcatgggcggggcctcggaggacagccaggaggagggaggctgcagctggcctcgggcctagggctgaccccagctggggacagtgacaccaagctagggacttacccagttctgctccccagagccccgactgggcttgggccagggcctatttccgcctggccagctctggttcatcccccagctctttcgttgttgttgttcttttgagacagggtcttgctgtgttgcccaggctggagtgcagtggtccagtcacagctcactgcagcctcgaactcccagcttcaagtgaccctcccattaaggcctggcattacaggcaggagccaccttgcccagctctcccctaggtcttgatcttccccagctgccatccctgaccctgctgtggatcctggggtcccaagcagctgctctgcaaggcccccacagtgctccctggcccaccctggctcccgggcctggcacagatggacgggcaaagcttgagtgtggaggtggccccaccatccaggacctgggctggggctttgcaggggcaggtggggaccagctcccggtgtagccacttggaggatagggaaggtcacccaggggatgggaacagcacagtggtcctcagcccagcaggctcagaccgtgggccaggagccccacagcactaacccagaaaagcagttcacaaggccaggaaactgaggccctcgccactagaggggcaggctgggctcccaccagggctctggccccgagccagccaccctgggagcagccaacacccctctgctgccattcctgggcggagctccaagcatcagcatctcttctgcagctgctggtcgaggcctttcctcgggggaggggaccactgtgcaccccacctcccagcgactggggtggtcctcagaccccttagctctcaccctgccccaaggctgagccgggaccaccacaacctgaagccccaagtgggcacagagggtctcgctgcaatctgtgggttgccaggttccatacgctcttcccagaaggggagctgaggccagccaggccctgagctcaggcaggacgcaggcagggttcctcctgctgacccaggaccaccctgcgggggccggggagatacaggcaaatctgaccaggactggcgcctccggcagatggctggggtcctggagggtctgggagggcatcccatccgaggccgggccccggatgattggagcctgatgggcctggcctgcatctccccaaagcagaaggtgaaagggctcctggcagctggaacccaaggcggcccgggcctcccctgcggacccggccaggcccctggaggggacggtggttcaaggtcatcccggggtcagggcagggtccccgcgctacggctggctgatgggatgaaggggcagggggcggggaggtcatgtccttgccagggcgtttctgtgcgtcccaagttttctaccgcagaataacacacctcattttttaagtggagaaaagaagaaaggacttcggtgtggtttctgggcctggggggcagggaccgcctgcaggtcggggcgagggcctccaggccgcagcatccccgcgcccggaccctcctgtcgccgccaccgcccctcccccagcgtcccgtccttccggagccactcgccccctccccgctgcccaccccgggctcatgaacccttcgtgtccgaacccggggccccgctccgtactcggcccactccggggctggagctcggcctccccaggcagaggcggccgggggcggcgggcgcgcaccgcgcttacctgcaggcgcttggagaaggggcagaagagcaccaggtgcgccaggcgccgcagccgccgcatggtgggctccggccggggctgcgcgggccccgcggctcgctcggcctcagccccggcccggcccggcccgcagcggccgccgctccctcgccatgcgggccgcgcgcccccgggcccgcgttaaaggcgagggcgcgcgcctttctgtcggccgacggcggcgcggcgggggcgcgcgggggagggtcgcggcggaggcgcgcgggggcggggcttggcgcgcggcccgccttcgacccccggctcggctgaggagggggcgggcaccgaggccccgcccacccgcagaccccgcccctcatgcaacggtgctgcgggaggggctgggggcgcgcgggatgggccgggaggcggagccggggccgggggcgcgcctgtcgggctcctgggcgtctcgggggctcttcccacgctggagagaggccccgtgcgctacgcaggctgcggggttcagggctccccacgcgcgcccccggttcgaggccgcagagccagggctggtccttcccctgggtcctcaggatggggtcagacgcgcggagccctgggctggccgagcctgcagcccgccccggggtccgacccttccctcctggctgagaccccgcgccttggccactcgccgggaggacacttccttcgcctccgcgtggggtgctcggggatgagccgttgccgcctccataggcaggttccgtgtgaacagaagctttcattgcacttcggtaaacacctgggggggctgagttggacggtgagggatgtggggcgcagccagcagctgccaagactcgctccctccccgcggccgccggcgcttccagctgctccgcatcccgggcggctcttgctatcggcaggtttttacattttagccatttccctggtggtggcgtctcgctggggctgtggttcgcgtgtttaacacactttctgcgtgttcagttaccacctgtgtatcttctccaaagtctattcaagtttttgaccattaataaaaatcacgttgtttctttattattaagttttgagacttatttacattttggttttaatttttaatatctagaatgagactgggtctcagtgttttgcccaggctggtctcgaactcctgggctcaagggatcatcctgccttggcctcccaaagtgctgggattacaggcatgagtcacctggtgcccagccaagacttttttttttttttttttttgagagggagtcttgctatgttgcccaggccggagtggtctcaaactcctggcctcaagtgatccacctgcctcagcctcctaaagtgctgggattacaggcgtgagtcaccatgcctggtccgagacttctttatatcttctggatatctgcccattattacacatgtgatttgcaaagatttttctcccagtctgtggctttcttttcattctcttaacagtttctttcttttcttttccttttttttttttttttttttgacggagtttcactcttgtagcccaggctggagttcagtggcgcgatctcagctcactgcaacctccgccacccaggttcaagagattctcctgcctcagcctcccaagtagctggaactataggtgcaagccaccatgcccggctaatttttgtatttttagtagagacggggtttcactatgttggccaggatcactcctgacctcatgatccgcctggcttggcctcccaaagtgctggcattacaggcatgagccaccgtgcctggccacaccaggctaattttttaatgttttgtagagatggggttttgccatgttgcccaggctggtcttgaacttttgggctcaagcgatcctcccaccttggcttcccaaagctctgggattctgggcgtgagtgagccactgccaccagcccggatcgtgctctgagtgtgtcatctctaagaaatttttgcctaaccgaaggtcacaaaggttttctgtgctttcttctagaagttgtatagtattcggcttcatatttaagtcaatgacccaattccagttaacttttgtgtattgtgcagggtgtggatcagagggttttcagtttggggcttgggggttttgtt

SEQ ID NO: 588369 - DNA, 4001 bp, Homo sapiens
aaaaatacaaaaattagccagtgtggtggcacgtgcctgtaatcccagctacttgggaggctgaggcaggagaatcgcctgaatccaggaggcagaggttgcagtgagcctagatcgcgccactgcacttcagtctgggtgacagagcgagactctgccacaaaaaaaaaaaaaaaaaaaaaaaagacaaacaaaaaaaaaggattatgtgaagttgatgccacccaccttccccccagcctcacctctggtttccaatgaggaaactgaatctcagacaagctaagtcaggagtccaaagtcacacagctggtacttggtagagtcagactttgtgctcagtacaatgcttttgctaaatttgacatgcagcaggaagtagcaagccccagcagaccacagagtactgggcagctttcccctggaccttgggagatactcccctccctgccagggtaccccattgccccttcccaaggccaggaaataagtggcttgatcacacctagcctggaccccaagacccggcagggtcctcccccacttccagctccaagcccaaggatgccttcaaggtctcccgggacctcaagcggaaggaacacacaagccaggacagaccctgtctccctgggatggccgccaaagtcactgggccagcagaagaaacagcttctccccagtgagtgggaaggactgaggagcctgtcagtctcgctctagggctggtgggggtgtgtgagagggcagggcaggctaaggaagcttccaggttgtcaggggtagagacatctgcccaggaggctgtgaattgagctacgtgagctgcagtggtcaggacctaggttaatactgtaagccacgtccccctacccttcaccccaaccccaggctggctcaggtctcagaaagagggaagacaagaacatcagagggccagcagctactatttcccaagctcttattccaggccagatccagaacaggctctccacgacaggctttgggtccagtcctctcagaaccctcgcaatggccaatgtttatctcaaggatggggaaacgcggaggctctgagatgaggcagcctgcctgaggtcaccgagtactaagcggccaagctctgggggatctcaaggctgtggcagggtttcccagcttctgcctgctacaactgccactgctccttccaggccacaactgtaggacttctgggcccccaagtgagaagcccacatggtgttaaagatgagcctgaacaaataaacgctacaggggtgactgaggcccactgtttgcgggagagtccagagcagcccctgctgtccccactgggaggcagagcctgcaggtgcgaggtaacatcaccagcccccaagcctgcttcactccagggatggatccaaatccagtcaacccacactgtgtccgtccccctggcaccctgtccgtcctccagggcctaagctgagacccctccacctcctctccacaatgaaaagcccacggcaaggtcccctaccaaatggacacttctactgctgtgtagggcctggccccacttgggcagccatctcttgtgccctacaatcttaggcggacacctcctcattccaccgtcaccacagcacttacagcaccctcagcctgggtgcctaagcatatcatcctacgcgcctcctcccctgcgctagaccaccccactaatgactctggcctgtgcactcactcattccgtctggaccccaacaacgtccccgactcccttgagccactctgcccagtctcctattcaccccatgccggacccctcaatagtcccaccatgccgggcaccgggcatccccgcgttggacctcagcaatatccccgtcttcagaaattgctcactccaccccaggcatcttgggcagccccttcttctcttgcccccaccccggaatatcattgaaactcacccaggtaccctctggcgccgctcacggcccgcacgcctgctccttccatcccgggtgctctccccgcctcggatcgggtacctgcgcgcctgctccaatccccgccacgttccaggcccgggcatcacctccctgacccaagtaccttctcgttccgctcccaagcaaggcaccctctcgcaccgtccccggcccgggtacccactcattccaaccccgacaccttcctggtcctgttgggcccggacacctgcgcctactcggtcctccgctcaagtcccggccctgccgcgctgcccgcccgccttgggggctcggccggggccgatactcacccgggatgccatcgctgcggaagggcagcgtctccttccccggcggctgcgcaaccaaaccggccgcccgggggcgtggcctagcgccaagcccccaccctcttctggccaatgagcatcgctgagtctctcagggccgccgcagcctctggccaattaggcgggtcatgtgaccaagcttatattccgcctctcccgccctcttcccctcctcctagtgcggttgaagcgcgaaagtggtctcttctcttctactattggtcattcagattagatcgacatgggcggctgggtggggcggggccattcttaaaggggctgaagcggagcagtcagacctccaaggggctttcttggagtacgccaaagcaggctgagccctcgtattaggatcctctattcttgttccacacaaggacaaatccttcccactctccaagcgcccattttcaaatactaccgcccctgacttcccgcagcatgctcttatactgtcgccactctcccccttgttctggagttgtttgcaaaagtgccaggtctcgccgctagacagtgtctctctgagagctggagtcaaggggtcttcagttctggccacctatctgggtcttacactaaataccaggattgagatcaggccgacctgagatagaatcaagtgttgccacttcagctctctagagcttacccctctatgaaatagggatgaggccgggcgcggtggctcacgcctgtaatcctagcagtttgggaggccgaggtgggtggatcacgaggtcaggagttcgagaccagcctggccaacctggtgaaaccctgtctccactaaagattaaaaaaaaaaattagccaagcttggtagcacacacctgtaatcccagctactcaggaggctgaggcaggagaatctcttgaacccgggaggcagaggttgcagtgagctgagatccacccattgcactccaacctgggccaaagggcgagactccgtctcaaaaagaaaaaaagaaatagggataaaatcttccctttcccaaatcatagggctttggtgaggatggaaagaggacggtgtatcagcccttccataactgcgaagagctgggcacaactacgttttaaaattgtaatcgtcggccggtagcagtggctcatgcctctattcccagcactttgggaggctgaggtgagtggatcacatgaggtcaggagttcgagaccagcctggccaaaatggtgaaaaccggtctctactaaaaataaaaaagctagctgggcgtggtggcacacacctataatcccagctacttgggaggctgaggcaggagaattgcttgagccgggaggaggagattgcagttaaccaagatcacgccactgcactccagcctgggcaacagagccagactccatctcaaaaaaaaaaaaaaaaaaaaagcccgggagcagtggctcacgcctgtaatcccagcactttgagaggccaaggcaggtggatcatgaggtcaggagatcgagacaatcctgcccaacatggtgaaaccccatctttactaaaaatataaaaattagcccagcattgtggcgtgtgcctgtagtcccagctattcaggaggctgaggcagcagaatcgcttgaaactgggaggtggaggttgcagtgagccgagattgcgccactgcactccaacctgggtgacagagca

SEQ ID NO: 588370 - DNA, 4001 bp, Homo sapiens
gagagggccggtgagagcctctagatgtgccccccatgtacctctttgggacagtcactgtcacacgctggacttaagggttactgtgatcctcatgtttcctttagaactttggagtcattaagtagagaagccaccagacttggtgtcccgccatcctccacccctctcatttacaggtggcccatgagattcttaaatctgtgataagttccagctcctggggaaattctcctcttttccccacttgcaaaacggggacgtgaagctgcacagggtagacactgagagaggctctgggagtgtcagcggccagtcacggggccacagggtagacactgagagaggttctgggagtgtcagcggccagtcacggggccgcatgggtgggctgcccgccggggcctgcctagctctctccaaagggtccttacgctcagaaacagctattttcaccatccctgtcttagggtgaaccttcagattaagtcactctcccaactctgcctaaatgcagctcttttcaccctggggacggccttctctggggtcaggaagcaggccaggaaaggagccccagggtcccagggtcctcaccgggacccccaataccctaggcacactctggagaccgggctttggggctgcagaggagaggctcctctttgctgttcctgttagggcctcgccagagggacactggacttgtctgcataaagcggtcttctgccttggagacagaaagcgatacactgtgaagaaatcgggcttctaaaactaactgtgctctcaaacacagtgccgtttggaacggggaagcactcccccagctcctggcatacactggtaaaagccagaaagataattgaggcccaatcgcaaagccctgaacacaccggtctgggagttgcagagtgcctgaatgtctgccatgggcccgcacagggccagaggcctggagggcagccctgcagcctctctggtgacccctgatggcacagacactcctcaggcggacggcacacttgctctgccaggaaacactgggagtaatgtctctctgctttctcggcatcttgcagggaaggacacaggaacccggggggaacagtggcagggtagattgcaggaccgtgactccaatctggatccacaggcaaacttttcagggagccaccgggccaatgaggccacctgcatacctgcctaaagcttccctctggcctccgtcctgtcttcatggtatctccaccttccccctatccgcggccccccaccaggcctccaagctcggccatccctagcagttcccagagctggctctcggccgtactcacatgccctgctcgccgtactggttgtagaactccatgtggctgcacgcctggatccagccaactacccaagtctccttcttggggatgggcggcatgaccacctgggccgaggcccggaagtggggtgtccggtagcggagcaccacgctggaggactcatcgatgctagtggggacggggtcgatggaggctttcacatcaatcaccgtgatcccttcccggaagactctggctttgcctccgatgctctgaatacagcccatggcatacaggagcgctctgatctccagggaaggccagcagtcacagaaaaaaccaggcattgaaaggacagaggctgcaggacccagtacagacggcgctgctctccaatctcaactctcaagaccgatatccataggatagaaaactcactgagtagactggggttgcatatatcactaccgcggcctgtttataaataaggattctgctgcatttcatgagccctgggctctctcttcttctcctcgcagtggacaaaaatcaccgatattctttgggttaaaaaaagtttgtagtttaatgaataattatgcggttctgacatccagcccttctgtgcctcacacgcggggacggcagctcgcagactctccctgaagtcttcggaggaagcaggcgagcgccggcagactcataaataaggaaggctctgtccccgcgcggccgcgccaccctcgcggcagaagcctgacttcctgccctccggccttccgcacgcgctccctccgggccccgcacccgcacccgcccggcgcggtcgaatcaattgcagagcagtttgtgttcacccggccgaggtcccggcgccctcggggcgagcgccgacccgcggcttccaggaggcgagctcagggctccggccgctcgccggtgacgggggagcgcggcgcgggtccccgtcggcgcccactcgcgggcgcgggccggacgtccccacgcaggggcgccgcgtcccttcgccgctgtcgctgccggccgccgtgcagggtcccggggctgcgctccggccgccgccgcctgcttcgccgcggccgccgaggacctggtgggaggtggaagggacagcgcgtcaaggccagcctcaaagttaagccgaactttgctgcggggggcgcgcgggggcggcgacgcgtgtgcgctgggcgcgggctgcggagctgacggcgcagctctgggcggtctccccggaggcggtggcccccgccccccgcgcccgccccgtcagtggcggccgcacgaccgcgcgcaccagcgaataatagccgcccgtgacatctccgctgataccgtcccggacgggcggggtggggggcgagcggctgccgctgcagggggcggcgagcacttgccctgctctgtccccaccgccgcgccgccagcgccaggtgccccttccccaccccggtccctccggctccctgggcgcagggccacccaccagtgccgtcggatccggcgggcacccctttcccggctggggtccctcggccctcggagggcatagtgcccccgctccgccgcgtcaagcgcctctgtcgcccctctccagccgcgagcagccccgggtccccacgcgtcgggcgcgctcgccgctgccggggaactttggcgcgcacgcccccactcgggcggcgccgccgactcacctgccccgggggccactccgctggcccgggcagccgctctccggacgcccctgacccggccgcgggcacgttcttggggcgcccccacccccttccccgggcactgtcccttggctctactggagtctggggccggcgtgggcgcccccggcccccaccctcctcccggcttggggcttcgggggggcggccgggggcggagggctgaggctcggggctctctcgcccccaccccgcgcgcctcctttattttatgatcattgtgagcgcgctgtcgccgctcagccccgccgccgcgccgctgccgcctggcgcgccccgcgctgcctcgctctgctgcagcatcggaaaggcaaccgggtcaaactttgcagaaactcggcccctgcgccggcccggcccccgcgtccgctcgccgccgccgccggccgagcgcagccggcgcacgcagggaccgccgcccgctcgccggccccgcggggatgcaggtccgcaggcggcggcggcggcggcgggcgggcgccgcctcctcctccccgcccgcctggctctccaccctcgctccccgcacacagcccgccctccccctggtaatccctcgctccccctcgctccctgtctctgcagctgctcggggagctgagcctctccttgaacaaacgacatttcctttttggccagccccgggaattctgggtagtgtagttccgctgctgtctcggggccaggtgggctgctcccagtgccctttgaactctatggaccagaggctttctggggttcggagcacccgcagaagggctcccttgccctggggttcctgaccgcagggagacagtggcttggtggagacagcgcgggggctttgtaggctccaaggctgggaaggtcgcggggaggggagagcagtttggggagaggtgggtcccctcgagcaggtctgctggctgcctgttggaccccggctgtgtga

SEQ ID NO: 588371 - DNA, 4001 bp, Homo sapiens
ccagcccgatttgaggccctaacactaccaacttggaactaccactcatgtgagtttcctctggctctctccatggcccagataatcaatccaactttctactggccaggctggcctccctgtagctggttctcataaacacgaaatttgtataattgttattggaactacctgctgaaatatggaactggttaaaagtaccatttgttttaaaatgtacatgcacagttgcacatacatgcagcaacacatcttccacaaccagccaatcaatcaagttaatgctttttattagaggacaaaacaaaaaataccaatatagagcctgcttttcttttctgatgccttggtaaacgtttttggagaaatcaagagaaaatatgaccgaataaagcaaaaataaattcgaatgtataatatacaaagtataattagtccagttctcaagaagcaggctctattactgggagtagtgggttggtgaaaaagatctctgatatatctaggaaaacaaattctttttcgatgcagcctttcttgtatatgaataatgtatatgagtgcttatttccaggtgactctggtacagcacataacattgaaacatcaattcaagtttaatgtataaagtcgcaatgaacatgttttccatctaagcttaggtaatgaatgatctcaacacatggtatgaattctactgtttgtaacaacctttcaggggagtaaggagaaaacgatctgtctgagggcatatcactgacagtgagtgacagccacaaagagctgaagttgggtggcccaaaagtgctctgctcatttgataaatgctaagtcaaatcacatcacagtttagatgcattaaatggggcacaagttagaataaaatcagatgcccgggagttttccaagtttcagattagaacaaaagtccaggcacatacaggactttgctagaaaactccttggtctcttcccttaagattctggtacccaatttcccatgttataaaactccaagtcttttcccccattcggtgcgctggacacataagatcatagagggttcgtagttgtaaacgcacccacctaaaaaattaaaaagagcaaaccaacaaacagcacctgaaaaatctctcacgggctttgaagatatggcctggcgtccacaaaaagaatggagggaagacactggcctctgcgaacccgcctccctccgggaataaaaggcggagggcgggaggggtaacagccgcgccccgggctcctctaattggacctcgcccctcctggcgccccggcgaatggggtttgggggcaggggtgtgagggacggggaggacgaggccagctgtagagggcgaccggctcaaaggggcgagcttttcacggctcccacgagtccgaggcagagaaattcacctttgctcctctcctttgaagaagacatagctgcctgcgctcaatgaacaaaaagaaccaaaacgccaacacccggctcccgcctctccgggggctcccttccgcgcgaccccagcgccggctcccgcccccgctttccccgccctggccccgccccgcgggctggcaccgcccgccaccttccgcctcccgcctcccgcctcccgcctcagccttagccacagccctgcgccggcgggaacccctctcgcccaccgcaaggcgcgcctggcccacccgctctcgcgagccttccctcttgcccctcgcctcctcctcccgctctcgccgctgacgtgtcggccagacccccgagggaagcctccgccctcgctgcgttctgcggcctgccgcttaccgggtggtcctcgcgggagctgcttcagcagtttgggcagtggcggaaaggaagccaccgcccgggatctgtggcttgaaaatttggctttgcctcgtattggctttttgagtttttttggaattttcccgcggtcgcccggcagtggagccgcgcgcgcgcacacgtgtcagcagtgcattctggggcctggctagcggccccgcgcgctcccgcggcgtcgcgggaaaattccgacgaatctcgggtccgtggggcggggcgggcgcggccagggctctggcggaagtgggcccggctggggcgggttctaggcgagcggagtcggtactgctccagtgttcccggtttcgcgcggaagccccggcgggagcagggttgcagcagcgcccgcggagaaggggcgctggcttcttccatattctgttcaaaatgtaggggaggtaaaatggaaattagttcttttgaagaaaagttgaggctttgtcaacggggtaaaacctctaaaataagattttctaactgcgttctaaacaatagcaacaaaaaaggcatcttcagttaatgatttcccctaccgtacattagttccatacagtgtttggtcggggttcaaatcagttcaacgctgtacataaaccacccaaacaaatattaataaaattttctccaaactcccatttatgacaatggcattagcttgtcttggtgaatttttttttcttctaggatctgacgacttaagctttaaaatgtcttaaatcaatgcctcacaaccataaatcataatcataaaactacagcttaggtcgggcgctgtgtctcaggcctgtaatcccagcactttggaaggccaaggcgggcggatcacgaggtcagaagatcgagaccattctggccaacatggtgaaacgccgtctctactaaaaatacaaaacgtttaaccgggcgcggtggcgggcgcctgtaatctcagctactctggaggctgaggcagaatagcttgaaccagggagtcagaggttgcagtgagccgagatcgcgccactgcactccagcctggcgacagagggagactccgtctcaaaaaaaaaaaaaaaaaagctacaacttcacatatacgttcaaaaacacactacaggccgggcgcggtggctcacacctctaatcccagcactttgggaagctgaggcgggtggatcacctgaggtcaagagtttgagaccagcctggccaacatggcaaaaacccgtctctactaaaaatacaaaaattagtgtgtactcccggctacttaggaggctgaggcaggagaattgcttgaacccaggaggcgaaggttgcagtaagccaagatcgcactactgcactccagcctgggcaacagagcgagactctgtctcaacaaaaaacaccacaaagctgtgtgtgcttgtaataaaaatagctctcaagtatttaaacatgtccaactattcctatggtgaagaaatacccgttttaccaatgaatactttcaattcagagactaatttgcagaggttatacatttataagtgatacaataagtatatagcatagcaatagcaacaatctgtttaagaattaaaggtagttaaaaaaaggaaccgatccagaggttgagacaaaactggcagaatctgcaactacattaaggaattcggtgtttacatccattctcgaaactattccatgccagttaaggaagtcggtgctttttgattgttttttaattttagattcgggggtacatgtgcttgcttgttacataggtatattgtgtaatggtggggattgggcttctggtgtacctgtcccccaaacattgaacattgtacccaatagctaatttttcagccctcacccccttcccaccctctccctttttggagtccccagtgtcttgttattcccattcttatgtacatgtatacctattgtttagctcccgcttatgagaacatgcaatatttgattttctgtttctgagtttgttcacttaggataatgtcctccagctccatccatgttgctgcaaaggacatgatttcgttctgttttacagcagagaggtcgatgtgtttttgatgtgtgcatagtgtgacatggataaatcaaaagcaagtcctgggtagggaaatacatgcctgaggggcactcatcg

SEQ ID NO: 588372 - DNA, 4001 bp, Homo sapiens
tcagtctgctgcccagtgtggagtgcagtggcgcaatcacagttcactgtggcctcgacctcctgaactcaggtgatcctccacctcagcctcccgagtaactgggaccacagccccgcatcactatggccggctaatttcttaactttttgtagagacagggctctctctgttgcccacgctggactcgaactcctgggatcaagtgatccttccgcctccgcttcccaaagtgctgggattacaggcataagccaccatgctctgcctgttatctgaattgcctttccttctccacttctgcatttttattaaaacattgcaaaacttccaaggtgcttctcctgtatgtattttttcacattaagtcaatcactcaagatccacaaacaagacagagaatgcacatatcccagcctaaaataaaacttttaaaaatcatttggtgctcatttccagcccgatttgaggccctaacactaccaacttggaactaccactcatgtgagtttcctctggctctctccatggcccagataatcaatccaactttctactggccaggctggcctccctgtagctggttctcataaacacgaaatttgtataattgttattggaactacctgctgaaatatggaactggttaaaagtaccatttgttttaaaatgtacatgcacagttgcacatacatgcagcaacacatcttccacaaccagccaatcaatcaagttaatgctttttattagaggacaaaacaaaaaataccaatatagagcctgcttttcttttctgatgccttggtaaacgtttttggagaaatcaagagaaaatatgaccgaataaagcaaaaataaattcgaatgtataatatacaaagtataattagtccagttctcaagaagcaggctctattactgggagtagtgggttggtgaaaaagatctctgatatatctaggaaaacaaattctttttcgatgcagcctttcttgtatatgaataatgtatatgagtgcttatttccaggtgactctggtacagcacataacattgaaacatcaattcaagtttaatgtataaagtcgcaatgaacatgttttccatctaagcttaggtaatgaatgatctcaacacatggtatgaattctactgtttgtaacaacctttcaggggagtaaggagaaaacgatctgtctgagggcatatcactgacagtgagtgacagccacaaagagctgaagttgggtggcccaaaagtgctctgctcatttgataaatgctaagtcaaatcacatcacagtttagatgcattaaatggggcacaagttagaataaaatcagatgcccgggagttttccaagtttcagattagaacaaaagtccaggcacatacaggactttgctagaaaactccttggtctcttcccttaagattctggtacccaatttcccatgttataaaactccaagtcttttcccccattcggtgcgctggacacataagatcatagagggttcgtagttgtaaacgcacccacctaaaaaattaaaaagagcaaaccaacaaacagcacctgaaaaatctctcacgggctttgaagatatggcctggcgtccacaaaaagaatggagggaagacactggcctctgcgaacccgcctccctccgggaataaaaggcggagggcgggaggggtaacagccgcgccccgggctcctctaattggacctcgcccctcctggcgccccggcgaatggggtttgggggcaggggtgtgagggacggggaggacgaggccagctgtagagggcgaccggctcaaaggggcgagcttttcacggctcccacgagtccgaggcagagaaattcacctttgctcctctcctttgaagaagacatagctgcctgcgctcaatgaacaaaaagaaccaaaacgccaacacccggctcccgcctctccgggggctcccttccgcgcgaccccagcgccggctcccgcccccgctttccccgccctggccccgccccgcgggctggcaccgcccgccaccttccgcctcccgcctcccgcctcccgcctcagccttagccacagccctgcgccggcgggaacccctctcgcccaccgcaaggcgcgcctggcccacccgctctcgcgagccttccctcttgcccctcgcctcctcctcccgctctcgccgctgacgtgtcggccagacccccgagggaagcctccgccctcgctgcgttctgcggcctgccgcttaccgggtggtcctcgcgggagctgcttcagcagtttgggcagtggcggaaaggaagccaccgcccgggatctgtggcttgaaaatttggctttgcctcgtattggctttttgagtttttttggaattttcccgcggtcgcccggcagtggagccgcgcgcgcgcacacgtgtcagcagtgcattctggggcctggctagcggccccgcgcgctcccgcggcgtcgcgggaaaattccgacgaatctcgggtccgtggggcggggcgggcgcggccagggctctggcggaagtgggcccggctggggcgggttctaggcgagcggagtcggtactgctccagtgttcccggtttcgcgcggaagccccggcgggagcagggttgcagcagcgcccgcggagaaggggcgctggcttcttccatattctgttcaaaatgtaggggaggtaaaatggaaattagttcttttgaagaaaagttgaggctttgtcaacggggtaaaacctctaaaataagattttctaactgcgttctaaacaatagcaacaaaaaaggcatcttcagttaatgatttcccctaccgtacattagttccatacagtgtttggtcggggttcaaatcagttcaacgctgtacataaaccacccaaacaaatattaataaaattttctccaaactcccatttatgacaatggcattagcttgtcttggtgaatttttttttcttctaggatctgacgacttaagctttaaaatgtcttaaatcaatgcctcacaaccataaatcataatcataaaactacagcttaggtcgggcgctgtgtctcaggcctgtaatcccagcactttggaaggccaaggcgggcggatcacgaggtcagaagatcgagaccattctggccaacatggtgaaacgccgtctctactaaaaatacaaaacgtttaaccgggcgcggtggcgggcgcctgtaatctcagctactctggaggctgaggcagaatagcttgaaccagggagtcagaggttgcagtgagccgagatcgcgccactgcactccagcctggcgacagagggagactccgtctcaaaaaaaaaaaaaaaaaagctacaacttcacatatacgttcaaaaacacactacaggccgggcgcggtggctcacacctctaatcccagcactttgggaagctgaggcgggtggatcacctgaggtcaagagtttgagaccagcctggccaacatggcaaaaacccgtctctactaaaaatacaaaaattagtgtgtactcccggctacttaggaggctgaggcaggagaattgcttgaacccaggaggcgaaggttgcagtaagccaagatcgcactactgcactccagcctgggcaacagagcgagactctgtctcaacaaaaaacaccacaaagctgtgtgtgcttgtaataaaaatagctctcaagtatttaaacatgtccaactattcctatggtgaagaaatacccgttttaccaatgaatactttcaattcagagactaatttgcagaggttatacatttataagtgatacaataagtatatagcatagcaatagcaacaatctgtttaagaattaaaggtagttaaaaaaaggaaccgatccagaggttgagacaaaactggcagaatctgcaactacattaaggaattcggtgtttacatccattctcgaaactattccatgccagttaaggaagt

SEQ ID NO: 588373 - DNA, 4001 bp, Homo sapiens
aatccaggttttccgaccaccaacccagccgcctgtccagtacatgatgatgctactgcagctggagagaaaggaggaggaaggaaggaggagaccctcagcttcaggtcactttccctattacctggctgccattcagggtctctagtaacaaggccaggtccccaagacggtcagcactcaaccagagggcagcctgcaggccaaccaggcggtgcagggcagacagcagctccggcagaaggcaggaagcacgaaggacagagtcccacagctccctgagcccctgttccaacctgggcccctgctgctcctgtgtctccagcactgtagagtatacacacacacatagacacacacacagctgaagtagcacctcatcctccatctccccacacactctggctttcctctcctgcaggaccccaaaggtcacaataataatacctcaacctggtctgaagagcacagagaagggcacctctctccatggaggtgacagatgttgtttatcctcccatctccctgcaataacttaaacccagactgaagatggcaggggaatcagggacaatctctggccctcacctctctctaggctccgctggatatcctgggcctgatcctctgtgaaaccctgggccaagcttgccctcaggataatgaagttgcaggtgacagtcagctccaagggaagaacaggaacagctgcagggagccctggagcaacaatgttggtcttacagactgctcccccatggaagatcctccaaataaaatcccaactcagagatcaccccactccaaccaaaacagctacaataaagaacccaccctccagccaattagctaaggatttaaaaaaagaacccaacctttggacagagagtctggaaagggcaaaaaagttatccagatcagaccatcttggaaaccatttttcaaatgccactctgtgagtgtgtaaggaagagagggatttgcctgtacaaagatgattccactccagtctcctctgtgccttaaacaggactccctgccccgagtaattatatcgatcccaaaaacgcaggagcggatgtttctctggctatggaagaggggaactgaccatcctggggaggacccgcctaccttgcagactatggaggagccctctgagcccttccagtgcatcctgagccaactgctgtcgcctcagagtcagaccggagttctgagccacctgccacatgagggaggggttgtcactgaggatcaatccttttttctccccttgcagcagtggcaagggatgcattctccagtcatttctggctctttggtcaagctcagtccctccccatcggttggggtaaatccactgcaaacccgctttcagggatcttgaggctgcaaaccgagggtgccagcaaccgtgttaccttggcctgtcgaacgagccggtcattcttttccctccacaggtccaggcagctggagcccacagaggtggtctggcgggacatggtggccgaggctgggcccggagaccagaagcggacttaggaagggtgaagctggcctgcccaagctcccaaccccagcggggaggggcctgggcacttctgcaccccgccgagctcccctgcttctctcggggtcccaatccacccgcccaggctttccaggacagatgggacgctctctccccgcggcccgccgggctctcaacctcgcctctggttggccgggtctgcgaagctctgggctgcggttggtcctcttgaagagttagttcccgcgggaaactcggggaggaaacgagtcagcaaccccaaacaggcttaggcgggctagaagccggggtcgtgtctgactggggcagtcgcacggccggcggtgcggcccgctcggctctcgcggaggccacagcctcgagaaagggtgggcgggagcgagtttcggccccacagtccgtggctcggcccttcctcgctgccacacccccaggtcctcctgggttcccgcttccaccgagggccgactgcgaggtgcatgctgggagtcgtagtaccgcaccggggcggaacagctccgccccggcggatggtgtttccagaaagcggtaactggagacgagggcgctccgtaatcgtccatcctttctctgctcactgtcgagcaccaacacgctcaccaaggtcggctttctaccgcgtgtagtctgctggcagtgccgctctgtacttgcactgctcaaaagtacctgcccaatcatttcaaattaaatggagctaggagaattgaatatccatatgcaaaaaaaaaaaaaaaaaaagacaggaaagaaaagaacgcgaccatacatacgtacataaaatcaactcaatggatcacaaactaaatataagagccaaaaatataaaacttctaaaagaaaacgtaaagcagcctaactaacatggtgaaaccttctctacaaaaatacaaaaattagcagggcgtggtgtcgtgcgcctgtaatcccagctaccccggaggctgaggcggaagaatcgcttgaacccgggtggcggaggttgcagtgagccgacatcgtgccattgcactccagcctgggtgacagagtgagactccgtctcaaaaaaaaaaaaaaaagaaaacgtaagagaacagctttatgaccttgggtttggcaacaagttgttagacacagcactaaaagcttgtacaatttaaaaaaaagttaactttattaaaattaaaaactcttgtactacaaagacatcattaagaagtcatacgctggggccgggcgccgtggctcacgcctgtgatcccagcactttgggagaccgaggcgggcggatcacgaggtcaggagatcgagaccatcatggctaacacggtgaaaccccgtctctactaaaaatacaaaaaattagccgggcgatgtggcgggcgcctgtagtcccagctactcgggaggctgaggcaggagaaaggcgtgaaccccgcgggccagagcctgcagtgagccgagatcgccccactgcactccagcctgcgcaacagcgagactccatctcaaaaaaaaaagaaaagaaaagaaaagaaaagaagaaaaatcataggctggatgtggctcatgctgtaatcccagcactttgggaggctgaggctggaggattccctgaagccaggagttcaagaccagcctaggcaacaaagatggtgtcttttgtagagacattatctctacaaaaaatttaaaacattaaccctggcacaataacacacctgtagacccagctacttgggaggctgaggtgggaggagcccttgagcctaggagttccaggttgcagtgagccatgatcacaccactgccctccagcctgagtaacagagtgagaccctgcctcaaaaaaagaaaggtcacagtcacagagtgggagaaactacttgctaattatatacctcataagggactggtatccctaacacataaaaactcccaaaactcaagaaaaagatttttaaaaacaatcttagctgggtgtggtggttcatgcctgttatcccagcactttgggaggctgaggtgggaggatcatttgagcctcagaagtttaagacctgcctgggcaacatagcaaaaccccacctctacaaaaaaaatacaaaaattagctgggcatggtggcacacacctgtagtcccatctactcgggaaacttaggtgggaggatcacctgagctcagggatgtcgaagctgcagtgagccatgattgagccactgcactccagcgtgggcaacaaagtgagaccctgtctcaaaacaaaacaaaaaacaattttaagatggaccaaaaaaaaaaaaaaagacattttaccaaaaaagatctactaatggctaagaaacacataaaaagatgctcggcattattagctattagagaaacacagttaaaaacatggccagggccgggccatgttatgcctgtaatcccagcac

SEQ ID NO: 588374 - DNA, 4001 bp, Homo sapiens
cggcctcccaaagtgctgggatgacaggctagagcctacgcgcccagcccatcatgtgtcatttttatagtgtgcataagtgcggggaatgttagtaaagtgtatggacaatctgaaaacccagttacacttcagttaaaagtgtggatcagttagctagaaaatacctgcgcacggcggctcatgcctgtaatcccagcactttgggaggccaaggcatcaccggaggtcgggagttcgagaccagcctgaccaacatggagaaaccccgtttctactaaaaaaaattacaaaattagctgggcatggtggcacatgcctgtaatcccagctactcgggagactgaggcaggagaatcgcttgaacctgggaggcagaggttgcggtgagccaagatcgcaccattgcactccagcctgggcaacaagagcaaaattccatctcaaaaaaaaaaaaaaaaagaaaagaaaaagaaaatacctgtgcacaccaacacaaacgaaaggatgttgtgtgacttacaaaaaacctcacaagaaggggtcctttgagtctccactccacttgaccccttgctactcacaatgtgatgagtagacaaacagtatctgatgggcagcacccaccacaggagaacttcttagaaatgcagaatctcaggacctgtcccagagctatggaaggagggcacacatcttaccaagatccccaaatgattcctgtgcccagtgacgttcgagatgcactccatagcgcattcagaaccattctacaaaccacttttgagctttccactaattgggcagaggctgcacacaccatcattgcaaatcgataggggttttgaagccctgggtgtttcctgtttctggcacagcatggcaactgtcccagcaaggggcagcccacgggagctcctttgcacacaagccctgctgctcctaaaggctctggacacacaggagacctcccagcctgcttgcggggggggcgggggggacactcgctcctaacaggtcttgtttcaggtcagagataactggattagaaacctgacttgggtccctaattgcagaaagagtgaaggaggacaaagaagaaatggggaaggaaggcacctgagctagcactttcctgtctgaggctagggcgggtatgacgggcaggccaggtgcccacacttggccggctgagaggggtacgaggcaggctgctcagggcagagaagaggaatgcaagatggaatcaggtgtacacctgtgagacggacccccaggtgggcccctccaaggtcaagggaggagatgaggacttgagtgaggctgagccagcttctggagagaggggctaccagacagagagcgagagaggcgctcagacatcagacggacagacagaggctgacggcaggaggctcagagggcccaacgtcagcccgccgggcaggctccccaggcagacagacaggacggggcccaccgcccaaggcccgactcacaggtgcgcgatgcccgccttgcgcaccgccgaagagatggctttgactgctgtgcagagcgagttgagcagctgggtcaactcgcccgtgccgcgggccttcctgccctcctccatgacgaagcgggtcagggtgttgacgtccgtgtcgaagggcgcctggtcagccatgcttgaaccgggtagagcgcggggctgcaggtgcaagcggcaggtgcggggctgcaggtgcgggcggcaagagagggcagtaggcactggccgcaggtgcggagctgcaggtgcgggcggcaggtgcgggccgcgggacctggcgggaggactgacagaccgactgccgccccgagtgtccgcagcgctcgtggtgcaactgggccaggccaggcgccggcgggtgaatcgcggaaacctttagacgcgggtcggccccccgcccccgggaacactcttgcgccccgcctaccccgcggaccagaccgcggctccgcctgcttggatcttcagacaaggtcggggatcctccctgcggtctcccaacccccgcccccacgcgccctgccgccccctagtcttcctgggctgtcgccccccacacacacccctccgtgccctccacccgcactgtggagcgggactcgggccatcggactctgccagagagaaagctatgactgtttcctccaaaatcataaaacggaagttcagaaaggttaagtaacttgctcaatgccaccagctaggcagcgaaacccgcagccagtccacatggcctggctttagctctgcagctcctgccccgtgtggctgcctgcccccgccccctgcccaagccccgtccactctgcctggcctgtcacctggcccttctgtccccgctaggagacacagagtccccgtttctcacccatctgagggcccacgtctgaatccttaatccaggcctcttctcaagattcctagaattcgagagctattgagtatttgaatttccaagatgtgagtctcgcccggaagtttcccggaaaacggtcgctgacacagagtcctcggctaccacacaaaggccagagggctccaccgcccgcatcctgaccccctggtagccacaatgctgcaattgatgtgctgattcacgaaacaacacctattgagcacctgctgtgctgaacactgtcctaccttccaggggtggagcctgatccaaacagacaaaactcctgcccttttcgagtgtacgttttcacagagaaacagtaaaaataaatatataaacaatagattagtttgttacataagccataagtaccatagagagaaacgaaatagaaaaggaagacacggaatgtggaggggagaagagggtgagcagaggcctcagtaaaagcttctctgagaaagggatatgtgagcaaagaggtgaaggatgcaacgcgccggtggagatgggaaggagagcggtttcctcaccgggagagccagtgcacaggccctggggtaggagaccatgtttcaggttcagggaatggccaggagaccggtggagctgaaatagagctagcaagggtcagaggtggaggagataaggccagcgggaggatgcagaggtgaggtctagagggccaagtgaggtttgactttgactaggaggaacccactggagagtttggagaagaagagaggcatggtctaccctgtgtcttcatactgcggctactgtgtgaagatcagactgaagacagtgccctccaggttactaggagatagtgagccaggtgttagcagtggaggtggtggattctggacatattttgaaggtagagctgatgggattcgttgacagatgagatatgtgagagacaggagtctcggatgattctaaggtttgaggcctgagaaactagaagaatgcagttgtcctcgactgcgatggggaacaccgagaggggcgtgtgctggaggcaggactgacaattaggagctaagtgtgggacctgctaagtttgaaatgccttctagacatccaaggcaatgtcaaatagacagatttatgtatctggagttcagaggagagatccatgctgcaggtataaattggaaaagccaactggaaaaaccaaccaaaaaccaagagatgtgacatccgggaagccagatgaagaaggtaagtaaaggcgggctgacccatgtgccaagcggtgtggatggggcaggcaggacaagctctgaaaattgactgctggattcaccgtggagacctggggtgcagattcctgtgcccagggttgtcagatgcggcggcgttgaatgaaggaaggtggtggtaccaccaggaaagacagcgactgtctcctcaaagccccagaggggacttagatgcctggcaaagagagttgatcctttaagggtcttatttaactctttgttcctcaggcaacttttcaggaaaaaccctgtgttaaaaaaaatagtaagagaaatacatccttaaacataaaaactcaaa

SEQ ID NO: 588375 - DNA, 4001 bp, Homo sapiens
tctgatgggcagcacccaccacaggagaacttcttagaaatgcagaatctcaggacctgtcccagagctatggaaggagggcacacatcttaccaagatccccaaatgattcctgtgcccagtgacgttcgagatgcactccatagcgcattcagaaccattctacaaaccacttttgagctttccactaattgggcagaggctgcacacaccatcattgcaaatcgataggggttttgaagccctgggtgtttcctgtttctggcacagcatggcaactgtcccagcaaggggcagcccacgggagctcctttgcacacaagccctgctgctcctaaaggctctggacacacaggagacctcccagcctgcttgcggggggggcgggggggacactcgctcctaacaggtcttgtttcaggtcagagataactggattagaaacctgacttgggtccctaattgcagaaagagtgaaggaggacaaagaagaaatggggaaggaaggcacctgagctagcactttcctgtctgaggctagggcgggtatgacgggcaggccaggtgcccacacttggccggctgagaggggtacgaggcaggctgctcagggcagagaagaggaatgcaagatggaatcaggtgtacacctgtgagacggacccccaggtgggcccctccaaggtcaagggaggagatgaggacttgagtgaggctgagccagcttctggagagaggggctaccagacagagagcgagagaggcgctcagacatcagacggacagacagaggctgacggcaggaggctcagagggcccaacgtcagcccgccgggcaggctccccaggcagacagacaggacggggcccaccgcccaaggcccgactcacaggtgcgcgatgcccgccttgcgcaccgccgaagagatggctttgactgctgtgcagagcgagttgagcagctgggtcaactcgcccgtgccgcgggccttcctgccctcctccatgacgaagcgggtcagggtgttgacgtccgtgtcgaagggcgcctggtcagccatgcttgaaccgggtagagcgcggggctgcaggtgcaagcggcaggtgcggggctgcaggtgcgggcggcaagagagggcagtaggcactggccgcaggtgcggagctgcaggtgcgggcggcaggtgcgggccgcgggacctggcgggaggactgacagaccgactgccgccccgagtgtccgcagcgctcgtggtgcaactgggccaggccaggcgccggcgggtgaatcgcggaaacctttagacgcgggtcggccccccgcccccgggaacactcttgcgccccgcctaccccgcggaccagaccgcggctccgcctgcttggatcttcagacaaggtcggggatcctccctgcggtctcccaacccccgcccccacgcgccctgccgccccctagtcttcctgggctgtcgccccccacacacacccctccgtgccctccacccgcactgtggagcgggactcgggccatcggactctgccagagagaaagctatgactgtttcctccaaaatcataaaacggaagttcagaaaggttaagtaacttgctcaatgccaccagctaggcagcgaaacccgcagccagtccacatggcctggctttagctctgcagctcctgccccgtgtggctgcctgcccccgccccctgcccaagccccgtccactctgcctggcctgtcacctggcccttctgtccccgctaggagacacagagtccccgtttctcacccatctgagggcccacgtctgaatccttaatccaggcctcttctcaagattcctagaattcgagagctattgagtatttgaatttccaagatgtgagtctcgcccggaagtttcccggaaaacggtcgctgacacagagtcctcggctaccacacaaaggccagagggctccaccgcccgcatcctgaccccctggtagccacaatgctgcaattgatgtgctgattcacgaaacaacacctattgagcacctgctgtgctgaacactgtcctaccttccaggggtggagcctgatccaaacagacaaaactcctgcccttttcgagtgtacgttttcacagagaaacagtaaaaataaatatataaacaatagattagtttgttacataagccataagtaccatagagagaaacgaaatagaaaaggaagacacggaatgtggaggggagaagagggtgagcagaggcctcagtaaaagcttctctgagaaagggatatgtgagcaaagaggtgaaggatgcaacgcgccggtggagatgggaaggagagcggtttcctcaccgggagagccagtgcacaggccctggggtaggagaccatgtttcaggttcagggaatggccaggagaccggtggagctgaaatagagctagcaagggtcagaggtggaggagataaggccagcgggaggatgcagaggtgaggtctagagggccaagtgaggtttgactttgactaggaggaacccactggagagtttggagaagaagagaggcatggtctaccctgtgtcttcatactgcggctactgtgtgaagatcagactgaagacagtgccctccaggttactaggagatagtgagccaggtgttagcagtggaggtggtggattctggacatattttgaaggtagagctgatgggattcgttgacagatgagatatgtgagagacaggagtctcggatgattctaaggtttgaggcctgagaaactagaagaatgcagttgtcctcgactgcgatggggaacaccgagaggggcgtgtgctggaggcaggactgacaattaggagctaagtgtgggacctgctaagtttgaaatgccttctagacatccaaggcaatgtcaaatagacagatttatgtatctggagttcagaggagagatccatgctgcaggtataaattggaaaagccaactggaaaaaccaaccaaaaaccaagagatgtgacatccgggaagccagatgaagaaggtaagtaaaggcgggctgacccatgtgccaagcggtgtggatggggcaggcaggacaagctctgaaaattgactgctggattcaccgtggagacctggggtgcagattcctgtgcccagggttgtcagatgcggcggcgttgaatgaaggaaggtggtggtaccaccaggaaagacagcgactgtctcctcaaagccccagaggggacttagatgcctggcaaagagagttgatcctttaagggtcttatttaactctttgttcctcaggcaacttttcaggaaaaaccctgtgttaaaaaaaatagtaagagaaatacatccttaaacataaaaactcaaataggcccggctcactggctcacacctgtaatcccagcacttcactttgggaggccgaggcgggcagatcacctgaggttgggagctcgagaccagcctgaccaacatggagaaaccccgtctctactaaaagtacaaaaattagctgggcatggtggtgcatgcctgtaattccagctactcaggaggctgaggcaggagaatcgcttgaacctgggaggcggagattgcagtgagcagagatggcaccattgcagtccagcctgggcatcaagaacaaaactccatctcaaaaaaaaaaaaaaaaaagaaaaacaaacaaactggaggctgaggcgggcagatcttgaggtcaggagttcaagaccagcctggccaacatggtgaaacccatctctactaaaataaaaaattagccgggcatggtggtgtgcacctgtaattccagctactcaggaggctgaggcaggagaatcgcttgaacccgggagacagaagttgcagtgagtcaagatcctgccgctgcactccagcctgggcaacagagcgagattcaatctcaaaaaaaaaaaaaagaactgaaatgtgatgactagtatttttggcata

SEQ ID NO: 588376 - DNA, 4001 bp, Homo sapiens
aaatcacgcccattatcacacggtaggaaatgccaaattaataagcacctcaattatccagttcctagggccactttgtctccttgctcaaccgccataaagtcagagttttgcagcagataagcaagacccctaccatggcagccactgcctagccaagagccctgcacagagggggagcccaatttatgtggatgaatcaccctgagatggactcaggcaaccgcattgaggatagcagggtccgcacagggagaggcaaagtccctgtctaccgtcactcagcagggctgtcacccacaggagcagaacagggcaccgcctgccctcacattctggaaggcgattaaatgcagagcgtggctgttattgccaaatgaggtaaaaacagagctgaagcatccacccacaggaaaaaagcaaggataatgcaccgttaacctgggtcctgctactgggtcaccacccctaaataaatacagtctgtggtgatcaaatgataattacatcttgtaatctaatgctatcactttttgtgttaaaagcacttaattgctcagagtaaatattttaaatgattggactttgttagctcctcattttgagtctctttcatccccaaaatatgtgttccttcagctcctgagaggacctcccctggaattactacaagggaagcccaaagaaagctggggttttgtttgtttgtttgtatgttttgagatggaatctcgtcctgtcacccaggctggagtgcagtggtacgatctcgactcaccgcaacctccatctcccaggttcaagcgattctcctgcctcagcctcccgagtagccgggactacaggcgcccgccaccacacccaactaatttttgtatttttagtagagacagggtttcaacatgttggccaggatggtcttgatctcttgacctcatgatccacccaccttggcctcccaaagtgccaggattacagacaggagccaccgtgcctggccaccggattctttttattacagacttaaactggacactgggctgtgaccatcagcagtgtaatgtgaacctggcctcatctatgctcggataaagcaccaaagagaaccctgtggaagaaacctctgcgctcccctcccaggactagcacctcccggcttcctgcacaccaagtggaggtgaagataaagaaagagtcacagagaagaaataaaacacgtagccagcaaaacactcctttagatgatgagagagcagatgcaggaaggggctctaccaagcttcctatgtcgtacataatttccagctcctaacatatttgcaaagcttattacaataaaacactcatgtctgcaagaggcataaagagatatttcacgtcacccctctacttctttgttccagtgagactctctctgtgcaagtacaagtcatgataacacaatacatattttaatgcaacaagccactgcacttggtatcattataataactggaaaaattatatgtgtatttcttcatagcatgttttcgttcctttctcaaaacaagtcaaaggcccctttatcaaagcacacatgataggaacttgaaatgcagcttccatctagggcacacagggccaataagctttggacccagtttcttgccaaagcacctgcagctcccacacccctgcctgggcctggggtgctctgtgccccatgcctgctccccaggactcacaggtgggccagaccggccttgcgcacagccgaggagatggctttgatggccgtcagcattgagttcagcagctgggtgagctccccagtccctttggcctgacgccccttttccataacgtagcgggtcagggtgagcatgtcggtttcgaaggggcttctgtccgtcattttggctggaatgcttcaaatccttttctcccggcaggaaaccttgcttacttctgagggctgcagctccgcagtgtggaagccgataagaaatctgtgctggccctgccaggatctctaaggaaaagggcccaaaacacatgactcaaacaactgctggggccctcaaggaactccctctggcctcggggactgtggcagctgccagggagccgcagcagtctgtaaataggacgggctgcccagaaacatggagctgctttctcctgctgagcaccccctttcaagataccaagaagccaccatttaggcacaggtgggaggtgagaaatccagttgattaaaaaatgatgcataaaaccctcttattccaggctccaaaggattcttcacatatagtgactgcagggcctggctctcccgagggcggaggtggcagattcgcaggttccttatctgggacgtaggtcacatagtaacataatggcaaccccagaattcctttagccagggtttggaataagttaggaaagaatgctttttatttccagtaggcatgtatgaccagtggatatccacagtagagatccagatccggaagaaaactattatattcctagcacagttcctggcaccagtgttattttgtcaatatctctggatgtccacttttgtaacaaaaattgcttgttaaaaaggaaacactaaagaagtggataaagacaaacctcctcaccaccagcccattctcccatcccactctccagaaatcactgctgctagggctggtggcggtctgtgcagccagtaggcactggtggggtgcatatggtggtggaagcactttctctagggccagccagacctggctgtgagtcccaagctagctatctgttggttgcatgatttgagaaagttattaaaccccttggaacctcagttgtctcactcttaaatgagcataaccgtgaagcatccatcttatagagtggctgcaatgagatgtacctagtatagtaggtgctcagtactttgttacctattattgcccttccagtttttttttttttttttttttttttttttgagatggagtctcactctgtcgcccaggctggagtgcagtggcgtgatctcggctcactgcaagctccgccttccaggttcacgctattctcctgcctcagcctcccgagtagctgggactacaggcgcctgccacgacgcttggctaattttttgtatttttagtagagacggggtttcaccgtgttagccaggatggtctcgatttcctgacctcgtgatccgcccgcctcggcctcccaaagtgctgggattacaggcgtgagccatcacgcccagccgcccttccagtctttcaatgtgctcacaactattgtgcaatcatacataatctcatttcacaaaacagtacaacatgcacatttctctgaaggtcttttcccctgacagttatgtcgattagaatgtgttcagctgcaagaaatagaacaactagagcaatttacacgtgggggtttatttcctcatagaccaggagtgcactaggaggtggtggctggtgttcattcagctgttcttggttccactgggacccctctctgtctcgtctctgtcatccttggtcggctggattgtgccccttgcttggcatcctgggggcacaaaatgtcactgcagttctgaacatctggcccacgttgaagatgcaaagaggggagcaagggcagctccaaccacatcagttcctttttattaagaaagaacagtttccctggaacccatcctcccacccccgtagacgtccctgtgcacagcgtctgccagatcagggtcgtgtggtgatgcctgcagtgggagctgggcgctggcattggatcaaccaaactggttgaggagggcaaccaaatggttgagatgggcattggtgctcacaatttatgtggaaactttcagataaaactaacatctaccagtagatcttaatatgcaggtttaagatcccaaatatatatatatgttatttatatatgtttttagttccagaaagcaaatattatgggaagatgtccaagtcagcaca

SEQ ID NO: 588377 - DNA, 4001 bp, Homo sapiens
ccaccaatgcacgtttattgaaggaaaaaaggagggagggaaggaagggatagtgtaactgcactgcaactgaaagaaaccagagaacggaaactcatggtgacctggtgactgcttgagcatttattgcttaacagctacttgtgcgatcataaaaatacaattcccctgataaccacggcaaccaaaatgatggcactatggtgaaggcggctcttctcagaaatctaaaaacaataataggcttgaaaccagaaagacaaagaaatccaagtgctccagggcagaaggaaatcctttcttaaaagccctgataaagcagctttttctccagtctctcaaatctcaccaggctccagcaagggctctggaactggtgtgagggatcaggaaacaattcaggcctctctgtgtgctcctatccctggaggccagctgttatgaggtaagctcactgggagctgcagcttattgttattttaaaatgtactgagaacgggcagggagatggatatatatataaaacattatataacctcaaactaacatagctagctctggaaaaagccccttgaggacagggaccatgtgtgtcttgttcacagctctatgtccagatcctagtaggtgtacaagacagagtaggggttccatatagctgctgaataaatgcggaatgagattagaactgagggaaagcacagtgcctggtaaaaggtccatcctctccactacccactgccagcactctgttgggtcctgagcaaaatcaaagtcctgtcgtccttctgggtccagtctctccatttgcaaaggagacagctggattagatggtttcccaggcatcctccagctctgacagtcaatcaccgtactgtgttttttttttcggtggctacacatgcctggcacttttctctcccctcagagggaatctgataccaatctgctcaagtaaattgatgttcccatccagcctgactcatatggtaggaacaacaggttcatatgccaattgtaaaagagaaggcaaagggggcccagaatgagaaaaagaaaaggtcttacaaaccaaaacggcagttttcaggactaaaaatatagaaacaaatgtgattattctgctgaaaaagcccttcacgtggggcaatctctagcttactaataatgcttatattaacagcattatctactgaggcttttgtgccagacactgtgtgctaaaccctttacaattaatcctcccagcaacccatgagcttattacctccttttcacagatgaggaatcaatctggctgaaggtcacaaagccagtaagtggcagaactgtgatctgaaccagagctaactgactccagagttctggctcctcaaatgactttcccctctgttcttcactgtagtcctaagagcgaggcaggacaggggttatcactttttgtttaaagatgaaaaaaccgtctgagaggcttgagatttgcataaaatacacagtgggtgcccagccccatatttgccccttgagatttgcataaaatacacagtgggtgcccagccccatatttgcccctgcgttcctaggtgaaggctcttcccatcccaagagtcagcttcttcttcttcgactttacttacacactcgaaaaatctcagggctggaggcaccgcggagatacatgctccgcgtccggtagttttacgggagggtaaaccaaggcatagctctccgtcggcgcgcctgagcctccggatgccgggggaccgcggagccgcgggcggcctgagggtacgcctcatggtcctgccagacccctgatgcccgaagcccgaccagacgctcagcctcggccaggactgagcggcgcctcctgggtcggtcgcctggggaagcgccccgggtcccctcccccggccgcccaagttcgcccgcagcctctgcgcaccggccgcttacctcacagggcgctcgcccaccgcggagtccgggccgcggccgccggtgccctggaagccacccgccgcccccgctggagccgcagcagccggtaggattgcggcgtgcggccagccccgcccgggggcggacagctgcctggggatcgtgcggagccgccgccgtcatgtgacgcgcaaggcggcgaaggatgccgggagcagctggctggccggggctgggcttcccgaccaccgcgcataaaagctgtatctgcaggaggggcaccgggaggcgggaggaaggcagacgaggagggggcgcgtggggcttcgggtactgcaaaggcgagcttgcggaaggacgattcaggctcgtgttgcgtggccccagaaggggcagaaatagaaccagtgggtggaaactgcagggaggcatgctaaggccaatacagtgtaaataagattcctgcgagcaccagttatctaacagtataaggagcagtttcctggggtgctaggcaccctgtagatgagcatgtagggtctgggttcattcactgaacaaactgaccattggctacctgccagacaatgtactaggagtacatattaaattagttgtatgtatggcgcttagcataatgcctgccacaaagtaaatgctgtatgtttgttgctgctggtgccgttactattatgggcacaaaagtgaacaaagcagatatggttcctcttctcctgaagttaattctgtagtggagaaggtagacggtaatcaagtgtcatttaaaccaatatgtgtttaaaattgtagaaaatgcacggaaggagctgtaatttaaaaataggggccaggtgttcatgcctgtaatcccagcgcttttgcaggccgaggctggaggaaagatcacttgagctcaggagttcgaggttaacagtgagccatgattgtgccactgcactccagcctgggtgacagggcgagactcttgtttcaaaaataaaactaaataaattagggaccaaggaagggtagtcaaggaagacctctcagagtaagataaagagttagccaaatggaagaggggcagggtaagccctgtgaaaactcttggaccaggtgggttgggttggaggagaaaagatcgctctttgtggaaatggaaaacgtctagcttgtctgaagctttttaacgggaagaacaatataagtgaggtcagaaaggtaggtaggggccagatcacgcagcacttaataggccatgataaggattttaaaattgtacgtaacaggaagccatcgaaggggtggaggatttgataccttttaaagcagtatgtcagctactatgtgaagacaggagttaagggtggaagcagagattggtagcttaacctattaactgggcccgtggaggtgctatttattgaaatgggaactattgtaaggggaatatatttggaagcggggggagatcaagaactcccatttgaacttgttaaatttgacactgccagttagaatgactattaacaaaaagacaaaaaaataacaaatgctggtgaggacatggagaaaagggaactctcatacactgaattatacagccagtatagaaaaatgcatggaggtttctcaaaaaagtaaaactagaactgccatatgatccagcagtcccactgctggatatttatccaggaatggaaatcagtatgtcaaaggtatgcctggatccccatgtttattgcagcactattcgcaatagccaagatatggaagcaacctaagtcttcatcaacagatgaatggataaaaagaatgtggcatatatacacaacagaatactattcagcctgtcatttgcagcaacacagatggaactggaggtcattatgtaaagtgaaataagccacgcatagaaagacaaatatcacatgttctcactcatacgtgggagctaaaaagttgatctcatgcagttggcaagtagaatgacagttaccagaggctgggaggggaaggggatagagagaggttggttaatgggtacaaacatggatag

SEQ ID NO: 588378 - DNA, 4001 bp, Homo sapiens
gtaaaatggaagccatcatccaacttgaagggtgaaactcagaaatatagcagggacatgcttagcacagtgtacagtctagcgggtaaaaactcaaatggtactttttgttagttttactactatgaacacctggcagtaaagatttctgtgacactaagggtggaatggacatgaccactaacatctcttttgaccctatcatcttatcactaagtttctcttcaaaatacctggaagaaaaactcaagggctcaaacttactaggggtttaattttataaagaagagcacctgtttattggaggctctagtttcccagtaggtgccttattctacccacattccctgctgtttggcccccttaccctacgtccctaccccagagttaacattcaacttgccctcttgccttcagtatcaataatcacaaagtgggtcatgcaacaaaaagactcctaaattggaaaatgagagcctgggtttggtctcaggttctgccattaactccctatgttacctaggcaactcacatatttatattggttttaaagaaaaagtaccactggtaaacattatctcatttcatcttcataacctcatggaaggtatcagtaatgccgcccttaactaacattaatgaggaaatttacggctcaagaagtggagtggccttcccagaatggcacaggaagtagcaggctcaatattttgcccagtacccattctcccaaaacctatactcagaggtattagagacaggaccttctggaaaacagtgtaaatgtgttttcccctcctcctctatcagaacctggcctagtcaagagtgaaagcaacataattgttagtggtagagggaaggaggcttcatttcccccttttcttatcaaacaaagagcacagaggcgctgaaaatgtatacacacctataaacttacatatgcataaaatgtattctgaatattcaagaaactgataaccctggttgcctccagagagaactggagagctgcagaataggaatgaggggtccctttttattgtataccttttaaaactgaaaaccatgttaagtataatatactatcaaaaaatagcctttagttttaaggtgaatttttttaaagctttgaaagaatacaaataatgtttataaaatatgtgttctgcaactccacttgttgctgggtgaccttgggcaaatcacttcacctgtctcatgccctgtttcctcacttgtaaaatacagccaagagcattacctacaagggtttttatgagggttaaacaagacagtgcaagtaaagcgtttagcacagtactcggcacgctgtaagcctacagtaaatgtcagttaccattattacttagcattaatattgttatctttgctttacttcaagcagcaccccacatacacacctgttttcatggcatacccacaattatggcgcagtatagcgctttgtacttcataaaccacctcatcacacttcatcgtctttcaaacgtttggtagccctgggacatcactgttaactcatttcgcagctaaggaaatggaggcagtaggaggcagtaactccaaaaccctgttttcccgtctctaaaatccagatcccatcaacccattcgttgctcccaggtcccttgctctcggaatcgtgttccgcgcggcactgacctgagcgagcgccccggggcccgggacctcgcgccgggttcacagctactaggcacgctcggaccgccagagccttgcagcggccgggtccgctccgcagccatggcgcctgcagggaaagaaaaacagccaaggcgcggcgggtcagcagagccgcgggcgcctaagagtcccctccccgaccggccccgcctcgcatacagacccggacctgcggccgctgctcccggtccgcagcctcacaggggagcggcttccggtgctgcctgcgtcatctccgcgcgtccctcagctccgcggctcccggcggaagcggctgcacttccggtccccgcccggaggtgggtggtgggaggctggaggccgggagtaggggtggggagaagagcgtcccgggaagctgaacgcgtgccgcgcggccctcacggtgcttaggctgggtgcaacctagaacggaggttcctttcgtaccgtacatccaggtttgcacagcgcgcttatgtccctcctccaatctgatcttgcaccagctctgcagtagtttttcttattatcctcattttacggaggagagggagctgtggcttagagaagttaagagacgtgtccaaattcatacaacctgttgggcacctctttatcccgaacgctgttctaggggatagggttagtgaacaaaaaacgcaaaagcccctgaccgcctgggccttacatctattaggaggaggaagacagataaactaaggctcgtgcaaaggagaaaaataaagcaaggtaaggaggttgttgaatgaaaagagacagtcaagtgatgtagatttgaatgaatcacaacgtttacactctggctgtggcccggttacttaacctctcagactttgcttcatctgcatagcaattatagtgaggtccccatccgaaggctctgaggattgaaggaaatgaagcatgcaaaccttttggcgtcaagaactaaaactgagctaaaaaatcccacgcactctttctcaacattttttgtgtaccatctcactcagttcccacaacaaccccacaagctagtaactattattaggcccctttttagagatggggaaactgaaatcaaaagaggtttaggcatcttgcctaaggtcatagtaaatggctgtcataggatttcaacccaaaccgacttcagagcacaagttatcctttttttttttttgaggcaacgtatcactctgtcgcccaggctggagtacagtgacacgatcttggctcactgcagcctcgacttctccaggctcaagcgatcctcccacctcagcctcctgagtagaagggaccacaggcgcgtgtcaccatgcccagctagttgtgtgtgtgtgtgtgtgtgtgtgtgtgtgtgtgtgtgtgtatttttgtagagtcagggtttcgctatgttacccaggctggtcttgaactcctaggctcaagtgatccacctgcctgggcctcccaaaaagtgctgggattacaggggtgaaccacaatgcccagcgcacaagttatccttgtttctctgtaagggttcctaagccatacatgcatacacgcacattcacatacatcttataccaacactgtccaataagctttttgccagtgatggagttgttctgttggtgctgtccaataaggcagtcactagtctcttgtggctactgaacatttgaaaagtacctgatgtaaatgaactaaattcttaattttatttaattttaatttaatagccacatgaggctaatggctaccatgcttgatagcacagtccaataatatagacaataagagagacacatatccagtagatggtagagcatggccaaggttccaagcatcctgacttcatttagggtacttgaaacatgggaaataaaaattgattatgtggggtggaagtcaactacggtgtcctaaaagtaaggtctcaagagagcaaatttgatttgctaagcaacaggatgtcactctagacttctaagtcagaacgtgactgatcacagcattataagacatttaggaagacagatatacagattggatactctctatgaaagggaaggcagtaccagggtaatcaagaaaatcaagcacccatatctctttggagcaaacattctcaaccccagtacagtttgatgaatcaaattgaaaagtccagatggagctgccccagagataatattgtttggacctctcataacaaagaaaccaaattgtgcaaatttaagcccagaggggatccaggagcaaaattcatgactataaaaaaatttttaaattgcaaa

SEQ ID NO: 588379 - DNA, 4001 bp, Homo sapiens
ccgcccgtgctcacctaggctgatgacagcaatctcgccggatgaggagttgtgcggccccaggaacacccccgaggccagcagtagcgagtcgtccttgttgaactgggagaactgggtgtagctccagttgtagggccgcatgtccgcgctgtgcagcagcgagatggtcaggtcgttgctccagatctgttcggcaggggcggctgtagtgatcgcctggccaggtcgcggggcgggggcctgctactacacagccatgaggccccagctctgccagccctactcagaggccaccagggagcagggaccccttccagccactgtcatccactcggggggcattggtatagagcggaggagcctgcccctgaagcaggcggctgtgtgtgggaccctctcctcagcactcagggccaccctgcaccgctcctgatcctctgtggtccctccgctggatgcagggaggctgctgtcacctctggcctgacccacccccccccccaccaccacctggttggaacgcctgggtcctgggacctccgtgctgcggcagagctgggtggggtgtgcaggacacctggccgtcctcaccttcacagtgcagtccttggagcaggacgcgaactggtacccggaatgggagaagctgaggtgcaggacctggtctgtgtgttcccgcagcgtctgcacctccacgcagggcaccgtgtcatacagccgctggaactcctcgtaccaggacatggccgctgcgggtgggcagttgtcagtcctgggcccgggccttcctcgcagtcacggccatgagccgagtgtggccccagcagtcctggcaggccccgtggtgcccctggaacccactagtcatggcataggcctcggctgggggattcaaccctgtagctcacagagacccctgtaccccccaccccccaagtgacccaatgaaccctctggcctccaagctctgaggggcgcctgcgctgtgtcctgacaggcctctatcagggtgtgggggggtgagcatggacacgcggggccgcggggcgggcccccagccaggctgacccccaagcgcaggggcccggggccctggctgcagaacgtgggtaggggccccacacgccactgacctgggtgtcggggcacgtcgcgggccacctggtagtagcggtagaactgctccctccacaggaactcgtcccgcgacacggcctgccattggcggcacaccagcccggcggccagcacgtcggccgggcccaggctcaggaagatctggtagaccaggctgtcggggagcaggggcgtgccgccctcgtccatcgtgacattctgcccaggcggccctgaaacccaccaacggctgccctcagcccaggcccgggaagggaggccgagagcgggcgtcctgttcctccagccccaaccgtcccgccgggagttccacggggctgcgtgtctgcaggggacgcccgggtaccgccgcccaaccaaggacccggcagctccgggcgggccgggccggcccctctccgccgcgtcatcccccggcctcctgcggccggcagcgggcgcccctcagcccgccagggcccggaccgccgcacgcgaggcacggggacaccaggcgccgtccggggacgggcttccgccgagaggaagctcggggcggccaggcagtggcctccgccctgcggccctggagcagctctgcccggcgggctcggggcggacggcggggacgagcgcacgggcggcctcggggctcctgcactcgcccaaggcgggcggggacgacaaggcgggacccccgagggccgcaggcgcactcaccacggccgcctccgcccgctgcgccgcccccgccctgcgcgacccggacccgcttccgctgccgcagccgctcggaccgccgcccccgcccaacggggagcccgccaggcccgacgccacgagccccgaggcatcgatggccgaggaaggcagagcgcgcgggtagcccgcatccgcccctcgtgcgcctgcgccttgggctccggcggcctggccggcttttctttgtgcgcctgcgcgcactcgggcgcattgggaacagcgccccttgtggccagcgggcggcggtcgtgggcggggttgcaggcgaggctcaacgaacgctggttcgggacccgcctccggcgctccctgttgccgggccctgagcaagtggcttcatgaaccccgtgacgttggccatggagataagaccactgggtgatggtttaaggaagataacgtgtaaagggctaaggactgtcggtggaaatcaggggtgcaggagaaatggataaacagccagaggtcaactcggactttgtacataggacatggtgccagggccctgccaggaagtgcagatcgaagctaggctcacgaggaggctggaggtggggggtggggaggcaacggatggacatggacttcctgggctgggctctgtgacagcagagtagactctgtcctgggacttggtggtgctacccttggcctcccacagtcctgccaccctgctgccgccaccatgctgccccctgggactgcgaccctcttgactctgctcctggcagctggctcgctgggccagaagcctcagaggccacgccggcccgcatcccccatcagcaccatccagcccaaggccaattttgatgctcagcaggtagaagttggggggggtagagggaggcaggtagaagttgtgggaggggtagagggagacaggtagaagttgttgcgggggagagggaagcaggtgaagttgtggggggtgtagagggaagcaggtgaggggccctcccacagtgccctcgagttctcccatggtctgcccccagtttgcagggacctggctccttgtggctgtgggctccgcttgccgtttcctgcaggagcagggccaccgggccgaggccaccacactgcatgtggctccccagggcacagccatggctgtcagtaccttccgaaagctgtgagtcccagagcagccctgcaccctaaccccaaccctcctctcagcccccggacttcagccctgctctggcccctgaccccaccccggctgtggcctggactaggattcctggttggggtctcccagcctgtggtgcctcctccccgcccccccagggatgggatctgctggcaggtgcgccagctctatggagacacaggggtcctcggccgcttcctgcttcaaggtgaggcaggggctgcagggcatgtgggtgggggatgacgcagccactgtggctctctgacatggctactgtggctctgccccagcccgagacgcccgaggggctgtgcacgtggttgtcgctgagaccgactaccagagtttcgctgtcctgtacctggagcgggcggggcagctgtcagtgaagctctacggtatgtgggggccagcctctgtgaccaggcaggcgctcaagctctgcacactcactgggccaccccgaggggctgggtgagcccatggggacacacttcctttctcccatcctgatcctcctgctaagcaggggcccagggagtagtgacagacaggcctggtgtgggagcagggagagggccccgagggggcaggggacacacagaccccgtttccagagccctccacgccgcctggtgccaggaccccaggaaccctgtctgccctgcagcccgctcgctccctgtgagcgactcggtcctgagtgggtttgagcagcgggtccaggaggcccacctgactgaggaccagatcttctacttccccaagtacggtgagtgtccccagcaggtccccagctcagccacccccactctctgggctgatgtccagcctgacccctgccttgggcccccaggcttctgcgaggctgcagaccagttccacgtcctggacggtgagtgcacagcggggcaagcatggcggcgtggtgaggggggccactgccaccggctgagtctcg

SEQ ID NO: 588380 - DNA, 4001 bp, Homo sapiens
ctctttgagtctcagttttcccatatgaggcaggtgcagaagaaagcggtcacctcaattttcaggtgagaaggtggagggacacagagcttagaagtcgtgccagtagctgagcaaagctggtattggatcaaggactaggagacagagctacagaagcatgtccaaatgtgagctcatgaaatagttaggaaagaccctccctccatttcagaaccctgttgggccctgggagtcagctctgttcctggctctagcaggggcctgacccaggctcttgatctaggaaccacggtgggggtgttgcccaactctgcatccagtttcataaagagcaagagccagtgcccctgccatgcctggcctccccacccggcccgcacctacctctctctccaatgacacctgcctctccctttggccctggggccccgggcagccccgggcagcctcggagaatggtgagcttgtcagagccctccaggcccaccaccttcacctctgcagagaaacacaggtgcccactcagtgcctggcccaacagtggctgggaagtgaggttttctgctctgctggggccttggtctgtcctcacccctcaggcactggtgaggcggagatgtgatggggggcagagctctggctttggaggccaccccgacctaggggagccccatctcctcagtgctgtgtgtcctgcagcaagtaacttaactcctctgagctttgtgccctgggctgccaagcggggataataacaaggttgcggccaggatttggttaaagaatgtgcattttaaatctcttattgtaatttatggcatttagaaagagcttaataaacagcgggcactttcaataactaatgacaatcaatatttctaagaaacttggggaattggggctgacaaagcattttccctcccagaccttgggaatgtggttgtagaattactgggctggaaggggctttctaggtcctctggagaggggcagtgtggggtccaaggacacagagccaggtgtggcacagctgcagccaaaccaaagttgtttacttctttgaaaaaatatttttcattttgttcattacaaaatctacacgccctgctaagggcgctcttagagaccatggaacggagcagtgctctcaccggagacatggcactgccatttttggggtatttcctttctgtgtttccagtcctccttccactagagcaggctgtaatttactatttatgtttccttcataaatatgttatcagccaggggcaccaggccgtccttaggagcagtctcttgctgagcgtcacagaaccacctgctcctgaatcagtgagggaaacaccttaccaccgttcaaacccttgtccctatcaactgattccgactctcttggaggagagccagaaatctgcctttttaacaaaccccccaagtccgtgtggcagccaccgtattagagggtcttagagtgcctccctggtaagcccgtaagaagataaagtcaacagtattttcttccttctcagtgacagattccagacccacctatgaagctccaatgggcaaatcctgggctttcgaggcagacagacctggtgacatccctcccctatccctccatgaccctgggcaatgcctcagctgccctgagcctccatgtccttgcctgaggataaaacagatctgttgggcatcttcacaggaagatgtgcataaaaggttttgcctgggacacccgagtgtcagtgagtggggttgttaccagcttttagggaccagaaaacccaggtctgtctcacctggacatgtgtccgcagcctgggcaggcaggttcttgatatgcaggaacaagactagcaggacagcgagcccccgggccatggtggctccactcagctccatgctctctggcctttgactctgaagagtcccccagctctaacagggcagaggaaaccagctctcgccttgtgccacagtttctcaactccctgggggacacccacttcctatgggctgcttagttgcaccaacaggaggtatgaggtcatctcaaaggatgtttccttccactaggctccagcaagatgcccaccccattgggctctcttcccccagcaaagacaccctgctcccagtccagagagctcctgagactcctctgctggaaagcatcggctttgcttgtggcttaaggagaacacagcccccacaccccctttccattccccagctgtccccaagcaatactcggaaaccttgaccttaaccttgggggataaggaaggttttgctgaagacgcttccttgcctcatctgttcccagaaaattcagggtttgtccgtcatcaggcacttatcatggatggagaggaaaaaaatgttgagcacttgttatgtcccaaatactatttccatcatatcatcttgcaccagccccattcggtggagtaaattatttgaaagttacagctggagaaattgaagtcactccactagtaagagccaggcattggactcaattctgtctaacgccttgtagatcactgggattgctcatttcacctgaaggtggggatgcctcttgttcccccaaatccctgaggccatgttcctactccgcatctcgtgctgtgaatcatgcttagccaggccacgctgtggacactttgtgcgggatttttagaacgtatagaaatagtcactaacgagagtcagatggtagcaggactaaggagcagggagaggtgttgttttgtggtttgcaacttctctgagccagcgtgtgtagactgggtttccaaactcaagggctccccaggtgggagagaagtggaggggcggcccaggggtgggggatccaggagacacaggaccttgtgtccaggctctctgggcaccacaacgactctcgactgtgtgtgtttgtgtgtgttggctccagcctgttgagagacaacggcaggaggcttcattgcctcagacaccgcttagtgtccctgagctactggcccaggcgggagaggtctgggtgtcagtggtgcggcctcctttcttggagaggatccaattcaggagcagcactcacctgggattgggtcagaacagggagaaagccagcaggtctgtgcccctcaattccatttgccagctgccccctgggtgtgaggggacctcctcttccttgcaacatcaataggtttatttcaggtgagaagtcaacaccaccttcagatatcaagtcaatgttcccaagagtatgaaagaatgcaagattctggcaagttaaaatatcttaacattggatcaacaaaagtcatttgattcctggcaatggcagtttaggtatttgggggcatcctattaaggacaaacagacaaaacctttaaaaagagatttgctcgaaggcaccgtcaagctagctatgtagtaaaggattactttgccaagctctcaggagccacagaaatcttagagaagtgaaactagtagtggggacctctttttgcacagggatttgccaatctccaaaagagaggtgagaagttgggcagtgatttcaccatcttgcagagctgaaggtcaaagactggggcctacggcctgccaaaggtatgggtttggggttggctttcagaagggctgcaccctagcaataggatgagtgagcaacaaccaacattcacaagggctgcaaactggttttgagacatctaagtgtcccaggaaaggaatctcaactcctggaattattgctcatgcccccaggctccttgctgaaagaaacaaaaatcttctctgaaggagaatgacatcatcccaggtcattatttctgcaaagtgttttatttttttcaaatgaaatgttaaaacacaatcaacgataaccaggctcatgggaataaaagacaatgtgtataaggaccaacagaaacaacagaatatagaaagaggtctttggaagctgtggatacagaagttacaacataat

SEQ ID NO: 588381 - DNA, 4001 bp, Homo sapiens
acgctccctccatgtcagaaccctgttgggccctgggagtcagttcttttcctggctcttgcaggggcctgacccagctctcgatctaggaaccatggtgggggtgttgcccaactcagcatctggtttcaaaaagagcaagagccagtgcccccagccatgcctgcacctacctctctttccattggtgcctgcctctcccttgggcccaggggccccaggcagccccggacagcctcggagaatggtgagcttgtcagagccctccaggcccaccatcttcacctctgcagaaaaacacaggtggccactcagtgtcacctgggcctgaagactccactgagccatagatataccactcaactgaaaggcatctgccatcttggtgacatcaggactgggcagatggctatagccacagccacctccctcagctggagggtcacctggaagggaggttttcctgccctggtgggcacttggtctgtcctcacctcttgggcactggtcaggcagaaaggtgatttggggcagaaccctggccttggaggctaccctgcctgaaggcaaaccttacttcctcagtactgtgtgtcctgaaacaagtcccttaacccctctgagcctctgttcccttacctaccgaggggtgcaggttcatttcagctcctaccatttaagacagcatcctaatctcgtctgttctcatctatcatatcattgtaatcaatatcgggtgagaaggacacagggagagaggctaccattgcaactcccacgcctgatcttggagcagatctgagagtggatgggctcctgtgggtccaccttgttcctccacagagggaggcgtccttcaaggacactgaacaagttggtgcgaaactagagctggaatgcagcttgttgtttttaattagataactcaaattcaagtgagtgtgttacaaaaataacacgtgctattatttgatcatttagaaactctagaagtatttaaggaagaaaataatgccaccctaaccccaccactccacaacgagccactaggagtttccaagcgaatccccgctgttcctggcctgtgtcacacttcacgccacggattgctccttgaatgcgatgctagtcacagcacaccgcagagctctgtgtctcacatgcattccagaaatcctgacacgaatctctgcaagcatcaggagcatcacaaattcctgaccctgcatcccagccccgggtagacggagtcaggacctgactccagaacctgcattttcaacctgccctcgcatgcgccggagcccatggtttggcacccgagtgtcccctcgggagccccgaaggaggtccagaactcacggggacaatgccacccttattgtgccgcatcagggacaccatgggaactgccatctccagagcccagcaggtcctggatggaaaggtcctgcagtgctcatccccgcctgacaccctgtctttccgggtgcttatccccacctcacaccctgtctctctgtgatggcgaccatggcagaatatctgactggtgtctacccagctggcaccacaagcctcacctccccacacaacaccatgactacgctttttacgcttagagggggacatgtggcccagggagactggaaacctgcctcggtttccattatgggagggcaagcagaggaagctccgtctctgagatgccacatccattcggggcctctgcgtttgttcacataagatgaggcatgcagagctgctgtctcgttagacgatgctccacacggcctggtgcaaggcctggaagccaggaagccaccaatcacgaagctgccagctttcagggacgagaagtttccaggaggaggccctggagtgcccttacctggacaggtgtctgccgcctggagagcccaggccatgcccaggaaagagagcagcagggtggcagcgcccaggacccccacagctctgtccagctccatctcttctggtctttgcttcaaaaggtgcctgccctcttatagggctagagaagccagcctccctcagactccaatttctcatcttccgagtgacagccgcttcctctccgcgggcttggtgacgccagcaggaggtgcgagatcatctccagggctgctccctaccccccgccccttggggatcccatggcgactgtcatccctgcagggggacggtctccttccagggaacaggctgacttgcttgtggccttgggcaaagagcccaggcccatcctcccacctttgttcagcggtgagcagatgtcaccatgagctgagaacggggaacaaggaagggtttgctaaagatgttctgcttcaaagaggtctctctcccttatccgaatacctagagtcctcatggccagggctggtcatgggccactggtgtgggccttacacagtaaccctcaccacatcatgagcagacttgggactctcctcaggaggcttggaaactgccactatgaggtccaggcaggctgccagggtgaaaaggagaggaaaatgcgtgtgtgtccactgtttcctggggcagtatgtagagcacaggggcacatgaacaggagggaaaggagagaagagtggggagcctgggggactatgacccaggtacacatctgaaggggagaccttgagtgtgaatgcaggggcttagcctgtagggaggatgagagtaggtgaatttcactcctagggcccagggaaccccctgagccctgaggccagacatcccacctgtaggatggctgtggacttacttcagtggttgtgttcgccttttggagaagagctggcctgaaggtgcactctcgccttggactgagccaggttagagacagagacagtagcaggtggggccccagaggccgtatacctaaagcccccagagacggaaccagcactgcacctcccactaccaccaccgcaccctgccacctgctgccatcgggatgccgaggtgccttcttccttggcaagatcagtagaaggattttaaactgtgaccccagcccagcaaagccacgcgagaaacaaaatcccatcggattttccttcaatgcccatggagatgtgtggtcctgagactatgactagttaagacccccctcgggttccgtggtgtttagggcagacctctcaagacttaattaaggctatgccagatgcagatgaggtccagggatgaacctggggaagacacaggctccatggagatgcagatatggaacctagaaagatggcttgggggcatcttcctcaaagtcctgaagtcacctgcagaggagccaggtccccagagctgcccagtgaaaccccagcagccaaaattccgagtccttaggcaggttcctttactgcatgctatttgtccttcctaatagaagcatctttcaaacctagatgacttaaaattaagtctagaaggctttaaaagcccaaagacattatattaatattttagtgttcagaaatctaaaaaaatatgctatttaaagtacttgcaataatcaagagaatctggcctattggagtgggtgcaggataacttcaacagaaaatggccaattgagtaattgatttggcagagtgcatttatgcggaaaacttaccgaattcatataaactattgaatcactttattggaactctgagtttatcacatgctgaatttaaatgattacatttctagcagttcatattcagaaggattttttaaagttagacaaggtactaaaggataaatgtggttctattaaatgtataaatgcagtaacaatgtttgaaggtgtttagttggctaagttaaggaatggaccaagaattattcacaggctccttataggtggttattaaaagatagaataataaggtttataagtcacacttttaaaatgaaggcagaatgcagcttttaaagtacacttttttttttgagacggagtttcgctcttgttgcccgggctg

SEQ ID NO: 588382 - DNA, 4001 bp, Homo sapiens
cccaacagcaagccaccagtgggtgacacatagccccatttacaaatggagaaactgaggcactggtccacgggatgaggccagatttccttccacactgctcccctttccaggcaccagtccctcagcacatgtgcttcatggtgacaggaggatgcatcctgctctgacctcccccagatcatgtgtgaccccctctctggggtgtccagagaaaagccagtaccacgatgggcttgaagaagcctgcagtcccctaggagcccaactaaaggcccaagggatgagctgtcataaccctcattttgcggataaggaaactgaggcctccagtcccagcccaacctctgcccagtgagtcctgaggtttgaggatgaggagggatacttgggacacagcccaatcccagaacagatggtgtgagctgctaactctcagtgaatgagctgggaccctgggcacaacacagagaaggcgttgtgtccaaagccagctggccttcagctgaccacccctgccccaacacaagggcctgggaagaagagctatggacagtggccagaaagcagccaggtttccctgctgttgagaaatgtttaacctttctgcacaatatgaaaaagagggtcaacctcactggggctggagtttgctgtcatcctaatagttcacaacattaaatcctgtgcacacacatacatagatgtaacacacacacacgcactcattgtttacacttcaaactgattttaggcaatgatacctgtatttcccagccatcccagaaaatgacaacattctaactgccctaattcacagacacagagcataggaaacatgcagtcaaagagccgggacaacatggatccccaaggaccagaggcacgaactacaaaaagggacacggccagccttgcggcctctttcggcccatgtctatccgaagaactggaggtcttaatgaacctcaaacttctgcctagcagctccaaagcacccgctttcgccctggttttatattctcccttatgagaagtgacacttaggggaaatgccgagtggcaagaataaggtaacaaaaagaaaagacaatctcagcatccgacatggggtccccgttgccatggcaatcgcccaggcaatgatatgtgttctttttttcaagcagactattttcctttcccatccatttgaaaagaaatgggaagaatggggaagggtggagaagtccagaaataaaacaggtctcatcacagtccagcccagcacttaatcattcagtaggtatcctggagaatcctgttcccgagccgggggtcccaggacccaccgcgaggactgccaaggtggttttcttcagctcagtctccactgggctgtgctcaggagggggcagaaagctgattaaaacccctcttcaaagtatacaccaggcagtcacctcctccttctgcagaagggtctcaccagcccgccccctggagaagccctgctcagccgcagacacccagaaaaatgagcccacacaggatctcaaagccacctgaaacaagcgaaaattgccaccttttccaatgtaacctactcaccgccttcctctggggacgaaaataattaacaaagcaaacaggaaagccggaggctcccccagctccgcacaggcaaactcgatacttgccggagccgcttccagaggagccccggggaggtcgctcacagtgggcagcaggaggctggggtctccttggggacctggagggccgggctgtgcttcccgcgccaatcagcccaggactgaagcccctggggttctgaggagcggtcccgcctccctggcccgccccgaaggtccgcggcacccacaggcagccgccctgtctcctcctctcccggcagctgcagggacgctgagccctgacaaagccgcctgcggagagccagtgggagggctaggggcgccggctcgggtgcacaggccgctctccatgacaacaagggctgggggctgagggcggagcgggtcccttaggccaagggggaaatgctgtttatttttcctgacacctctgcccggagccattacctctgccagactttctagagggtcctggggcagcagtaactttctttgctccttcaccacaaggaaacccctttttaggtgtgtgcactttcctccaggcttagagagggtggagtggaaaataggcacttgcttaaagaggtgttggtgcagaggctgtgcgtgcatgtgcgtgtgtgtgccgtgtgtgtgtgtgtgctgtgcatgcttgtgtgtgcggtgtgtgtgcagcgtgtggcatgtatatgtggtgtgtgtatgtgtggtaggctgtgtatagtgtatctgatgtatggtgtgtgtaatgcgctttgtggtgtatgtgtgttgtgtgtatgtgttgtatgtgggatgtgatgtgtgtatggtatgttttgtggtttttgtgtggtgtggtatgtgttgtgttgtatatgt[450 bp omitted]gggtaaatctctgttcgaggctttcagctctgaaggctgtgagaccccctgatttcccactccacactctatatttctgtgtgtgtgtctttaattcctccagtgccgctgggttagggtctcccggacagagctggtctcagcagtatgtgtatgatgttcaaatcgcttgaacccaggaggcagaggttggagtgagccgagattgtaccaccgcactccatccagcctgggtgacagagagactctgcctcaaaaaaaaaaaaaaaaaaaaaagcaatgaagagaaaacattttgaaggaaaaggatgtccctaagtgccaaaaccgaggtccgagcctcggcccacacctcaagcgaggggccttgttaccctcagctgtaaagtggacatctacatctagccgggcctccttcagcattgccagagaattccatgggacacaaatgcacacacagcccagctcccgctcattgctctgttcatgccagctggtaccattctactactccagtatttacatgtgctttttattttttaatcagactctaccaggcctgttattttaggtgtgtttttctcaccctgaaacatattgcaacatttttgcttttaataaatgttctcctatggccatgggattcttcccaccctgtccttcctgggtcccagccagttctttgctggtgcttctctactctttgcccttgcggtccctgacaggaggtagacatgggtggaaatcagcaatcgagcgctttttcccttctccgatgggggcctctctctcaccaagccctgagccacagaccctactctgcccagatagtctcaaggcaccatgaacaatggctcatttttacactctcacacgcctatcttacagagggacagagaaattcctgcaaacccaggacaccacataccacccagagcatgtggacccaagaccctccagacccattgttcttttttttttattattattattcttgagatggagtctcactctgtcgcccaggctggagtgcaatggcgtgatcttggc

SEQ ID NO: 588383 - DNA, 4001 bp, Homo sapiens
tgcttgcctccgagcctccttgttccacaagcccagtctcatccttgtctaggtttcacacctgcccagcactgcccttactgaggggcctcagtttccttatctgtaaaccaggctcctgatagacctatcggggcaggtggggaggatgctttgggagctcccagcacatgcaccagtgactcccaggtcactcttctagcccagggactaacctgggagtcctcaaggggcacaggccaggaaggtcaggcccatcctcggacagtggtgaggcttctcaggaaaaggtcatttcagctctaacctctgtacaacacggctgcaggcctctgtgtgcagggcactcggcctcgtgtcattccaaggggtcttgcacactgcatggtgctggtttttgtgtagacgtggacctccgccccctgaggagtggaaccggggcctcctctggcctcctgtaacagcccagctggggacaaaccacttcctccctttcacacccagctggtcagccccacccggctctggggccactgagcaagttgtgaagatttgtactggggctcagtcagacactttgcaggctggggggcccagggcaagtcagctgtgtgccttggtttcctcccctgcaagaatggctgaccagcatccgccctgggtgttggcaagcaccgatctgaatggcagtggcacctgctaagcacgtccagccccgaactacagtgagcctggcacgactcagtcaccactttacagatgagtgtggccatgctgtgtgacccgaacatgcctctgcccctcgggccccctctgcacagtgggcacaatcacggtggcatcgggttgtgccgccactgccgctgggaccctgccatcagtccatgcacctcttgaggtggccccgccactgtcccacactgccaggcacagcacggggtgctgaggaggctttggtgggcgcagcactccttcctcacagccccatgctacacaggcccgcatctgctaatatctaacctgcagagtgcagaggaagcttctggagacacactgtgtgggaaagcctagcccccaggacacgtctgggaccaccctcctctgttcaggcagaggaaggctcgcgctaccccccgccccccaggcctgggtgacatgagaggggctggccgtggtctcgatgccctggctggtgcgctgccagccgatggaaaaaggctccctgcatctggtcagcctcggacccaggcccctgccagccttcgatggggacacgggcaggcaccgttcatcttgtgagagcctaagccacccccagacgataggcaacactgtcccagcactcagcagtttacaaaggcttttcacacttgccattcgaggcccacaataactctgaatttttacacatcatgctacaggaacccagagaaagacaacagaacaaaaacaagacaccattccgtgccaccacagccacttcctgccttgaaaacatccgtctccctcaaatggctcctgccctgaatgttcctaccaccccaaagttccacaaaagcagttaggatctcagggctcggccaacacctcaggaccaagcccactcacctgtcttctgaaggcgagcgagtttctcctctgggctgaacttcgtgcaatagcgaaacacaacttccttttttctaattttcgcaatatgggtcacaacatgatggtgcatttgcatttccgcatcattacgctgggtgagaggagcttggcttgctgattctagaaggtgcaacttgcagggtggcgggggcaatggcaaacaaacatgcaatccacagctctccactgatcaggtgctaggctcacagctgcggcggccgtgctggtttaaaggttaacagggctgctcacagaggacccacaaccaccatcctcctgcttctgctgggtggacttttgtgagtagatctgctgtgtagatcttcagggaggaggggcccagcagggaatgagggggccggccctagaccagacaagcccagagtgagcccagaaacacaccatcagaggcttcctcagaccctcttggttgggaacaatgaaatggccacaagttagaaggtgaagaggccccctgcaaacagatatttcaagatgcttcctgggagacctgacccacgagggctgctccagcaggcccagcacctgccccgctgagcagccccaccaggagggcaccctcattgttttagggagagaatcaataaataataacaccaggtcctgaagggcttagagtgcaaagtctgactcaattttaataatgcttgttaatccaggcttatattcattttttttaaagcaatttctcacctgggcatggtggctcatgcctgaaatcccagcactttgggaggccaaggagggaggatcacttgaggtcaggagtttgagaccagtctggccaacttggtgaaaccctgtctctactaaaaatacaaaaatcagctgggcattgtgacgcatgcttgtaatcccagctactaaggaggctgaggtgggaggaccgctcgaaccccagaggtggaggttgcagtgaactgagattgcgccactgcactccagcctgggggacagaaagagactgtctcaataaaaataaaataataaataaataaataaaagcaatttctctgggcctcagtttccctgtgccaggtgctgccgcaggtgccctgtgaatggttactcattgggccccttcatgcccctgtgaagtatggttatccccgtctgacaacagggaaactgaggctcaggacacagtggtgtgcccctccctcccaaaagctaaaggctgaggtgatgtggagtttgtccctaagttccctgcctgtgtgaggatgcagagctacacccagccgtgacaaggatggggtggacagtgtcacctgagctcggacgcatgggtgctgtggcctcagccatattgctgaacttaatcttttcttttctttttttttttttttttgagacggagcctcactctgttgcccaggctggagtgcagtggcgcaaagtcagctcacttcaacctccaccttctggtttcaaagattctcctgcctcatccttccaagtagctgggattataggtgcccaccacaatgcccagctaattttttgtatttttaatagagactgggtttcaccatgttagccaggctggtctcaactcctgacctcaggtgatctgtctgcctcggcctcctaaagtgctgggattacaggcatgagccaccatgcccggacactgatgaacttcttgaagactccattcttcctccatgaaatggagaaaatgtgggatgcatgtggtggagtttttgtgagaaatgagggctttgcctatggtaggtactcaagggatcccagccaccaacatctgaatcaccgttgctgtgctgtcaatgccggggccctggagtcttggctcctgccccctgaggaggcagccctggaccatccagatgcttccagcccaggccaggaaggacagcagtgcctgccaccaccacctggttcagccttctcctctacagaggtcccctgtgccagaaggccagcagtggggtcccattaggaccagggacacaaacccaggtacactaggaatacacaactgtcgtcctaagagggtcatgataaattctggcagcacagcagcaggctggctgtggtgacctgaaaggtgaggggttgtggtaggtaaggaacaaaaagaggatggggaggggtttgtggcttgaaagtagaactgaggccaagtgtcctgtcgtccctggttggggtgagtgggaggaagtggtgcctccacctgggagtgacatcattcaaaaagaaacatgtttttggcagcctgccccccaatggcccagtgatcatcaaatgctggttatctgcctctcccactgtgaatagagctgacctgtggacactactgtacaata

SEQ ID NO: 588384 - DNA, 4001 bp, Homo sapiens
gcctatgtctggagagccgtcccctgctgcagccaggctgacagggtccccacagtgggctctgggcccaacagggagcgcctgaagcttccctagggaggaactgccaggcccagtgtctggcatccctagggcagcaatgggtcctggaggggttgaggaccccctgcctgactccatccttaaagctgagctcactgggctcaggtggaggctggccaggggcttcctgtaggggagaaacaagccagagtcagtgctagccaggcatggaccagcaccctcaggtgcaacccccaaatgcagctcccaggcagtaccctccgccccccaccgaaagcctggagcaggtgggctgggggttgtgtgtgaagtgtgaatgccctggtcagcttcagctgggtcttgtacagacaggcttttaaagaacagaaaatggaaaatgttttgttttaaaattgtttgttccgcataaaaaaaattaaccctgtggtgtgaagctatctgctgttcaataaattcaaaatagatgctcaaggtagtgaccataaccaaaaggaacacagtggcttctgtttatagcgcatccgtggtgctttttcaatcctctgatactcccaggacatgaggccggtgtcctcctcctcctcctcctcaccactgcctgctggacaggtcagaaaacagcccccaggggtccagggtcccagctgtctctactatctccctcaggggagggctggggcaggaggtgcgtcttgccagaggatgtggaccaaggtctttgccccaaaactcctcctccctcctgtgcactggagccacctcacactggcccaccatgcctctcatggaccaaattcaagtgtcaattataagtgcacagaaaattcaccgggcgcctctgaggaggagcaaaggtgagacgggcctagagggagactgtcatccctcaaaatcatcctcttgaaccgaagacgcagctgccgaggagcctaggggctgcaagtggcggtcacttatccccatacctgatgccaccagcctttctgaggaggatgctgagggtcggcgggcacaggcgcctggctccgtgctggggtctggggttggccggcaggagcttgcacacggtagatggtttccttgaaaatctcttccttgcccagcaggttcaaagtagagccatttaggaggtactgaaaagacattagtagagaaagaaaaccaccttctccaactggcatttggagcagccagaggccccggctctgcgggggtgcggaggagggaagctccatgccaccacccagcatggtggactccaggattggggcatggccatctgcacagtcatatcctcagcccccaggctggcacacaatgcctccaaaagggtggggcctgcaccagcagccatgcactgtagggtgggcagtgtcttgctcggctggaaactctggggccagggctgagcttgtcccttgccatgcagcatcctgcggcccaggggaagggtcatcttgaacatgcaggcactgtccagtgtgaggtgagccggtgggcatcgccaggcccctccctagcccacacctcacaccctcccccaggcacatacagagaggctctctcaaacattcacactgacgggctggctcacactcacagtcacacacgcactcacactcacaattagatattcctctgccagcagctttacatgctcctgcctcacttgctaagcgaaataaagaagaagcaggcttcacacagtgacaggcacacagtgagctggccctggctgccttgagcctgccctggttgccttgagcaggcaggtgtgcctctgggcagggcgtggcgcaggcctgggctctggcagcgtcctggtggctgtggatgccgaccagctctatggtggagcacccccaccacacacagtctcctgagtgctcactgtcttggggcaaaaccccttttgagtggacgtttctttaaatgactccagaatcgctcaggtgggcatttatgattggctactgccgcattcctaacgagttcaatggggggcaatattaagatttctaaacagaaaatacatgttttgctgcattcttctcatagcacaagagataaactcaggtttccagaggtcaaacatggcagagcaataaaaatacaccagatggaatgtgagctgtgctcagcctcggtgtgttcaaaggtagctgtctggcaagacagagcctggttcaaccccatctcgggggaattatgcttctggtcaggatggagtaatagaaaccagatttactctcacctggaacaacaacaaaaatggacaaaacctacgaaacaagtttgcaaggctctacaccaagcggtaaaacactgtggtccctgagagacgggaatgaatgaggtgagccctcctattgccccagctcactgcccagagaccatttctgggccatggatcagggaagggaagccctgtggggcccagtggactctctaagttgagaagacaaaactgggaggcccagaagactaaggtggccagagtccacagcatggagccctgaagatgagagagctgcagagagagagagaacccagagatctcagaggggctcctcgaggaccgttcagcatgtgtgcggtggggagagcacatgaggccagagaaagaaccacctgtgaggaccacagggagctttcacagggcagggacacgcctatgcccaccagccagccctaaaagccccacaggtcacggggcattgcgttgaatactcagagggtcttgcttcaggaatgatggataattagccctgcagtgatcactgctctggtcccacctagcaaatattaacaaaacttaacaggaagaagtccatatgtttacccaactgcatccttgaacaaagctaaaaaatatttatagaactacaaaaatatctagtgcatggcaaggtaaaattcccatagtctggcatccaatcaaaaatcaccaggcagaggccgggcacagtggctcacgcctgtaatcccagcactttaggaggccaaggcagatggatcacttgagggcaggagttcgagaccagcctggccaacatggagaaaccctatctctactaaaaatacaaaaattagccaggcatggtggtgcgtgcctgtaatcccagctgcttaggaggctgaggcaggagaactgcttgaactcaggaggcggatgttgcggtgagctgaaattgcacaactgcactccagcctgggcgacagagcaaaactctgtctcaaaaaaaaaaaaaaaaaaaaaaaaaattaccaggcataaaagggactataactaatgaagagaaaaaattcaatataaactgacccataactaacacagatgttggaattagcaaaaagggacattaaaaactactatcatgtctgtgtcatcctatgttctaaaatccagtagagacgtggagaatgtaagaaggcccacattaaacttccagagatgaaaactacgaagtgtgagaccaaaaacacactggaaggaattaacaaccaattagacattgcagaagaaaaactagtgaatttgaagagacaggaacagaaactacccaaaatgaaacacacacacacacacagagaaactgagcaacagtgaaatgtgggaaaacttcaagtagtgtaatacatgtgtgatcagagtctcaaaaaggggtggacaaaaaaaatatttgaggaaataatgacaagttttctagatttgatggaaactataaatctacacatctaagaagctcaatgtaaaacaagcacaagaaatccttgtagttaaaacttttcccacatggagaacttcaggcacagagatcttcactggtgaattctacaaacatttcaggaaaataatgatgctaattctatacctacatctaatgatctttcagacctttttttttttttttttttgagatggagtctcgctc

SEQ ID NO: 588385 - DNA, 4001 bp, Homo sapiens
gggttggcaaataacaaacagtcactgcctgtaagggaccaatgggaaggcacagtatgccaggttagggatggccttggaggacaggtctagaagttaagacagttcttgctaagggggagaagtcagatctcagcaggaggggacttgttattttggggtggcttaggtgcagacctgacctaaaagaggggcgcgaccaccccggagaagcagtgggataggtgtgtggttagaccagagtttgaatccccactctcttgccaacgtgctgtgtgacttgggcatgttccgaacctctctgatccctggtctgtgatgtgggaacgcactggcccccagcctgtttggagaagtgaggtagtgccgatgaatgggaaggggctttgcaaaccgcagagggctgggcccttgtgccacggcagtgtcacaccaggaagaatgagcaggttgcagctcctgagaggaagggaccaccaagggctgcccgtgccgccccctcctgcagctgcaagcacgaactgttccttccccaatgacatctgtctggaagaaatttaaaatttaaaatgggcagccctattctctcctctccttggtgagcgagcggcctcctcgttttcgcctgcctgccccagtcccttggcagcccagcctggggcagccctggggctcccctccgccttggcttcgggactccagcccccttgctggccagcccaggtgttctgccctcacccgcttccaccgcacagccctgggcaccctccaagccccacctccactgcccctgaagaggcagcaggaagggaggaatgagtcagccctggagcacacagacaagggttcaaatcccgacagagctgcgtggcctcaggcaggagccaaccatctctgagccctgctttccttgtcttaaagtcagaaaatcacaatacccagcgttcctgcaggagatgaatctttattgatcccctactgtatgcagggccctggctaaagggaaggatgcagaggagattcagggggtcaggttcaggaccaggtgcctggcacagggtagcgcccagagtggagattctgtgggtagttaagatgcccattgtagaggtgaggaaacggagactcagcaacggggctgatttgtctgtggacacacagcgaactgtaagtccccgcctccctctgcacccgcgtgcaccagggggctgctgggggtgcggggacgcgggagacctggcccgcagcgcgcgtggctcctgcaggggtgccgcccccaccgaacctcgagttcaagcctcggctcggggaggaggagaggagggtccccatcccggcccgggcctccggagcctcgaaggggtgcgccccaaactccagcccccgcaatgggtgctcgccccgccggcccgagcggccaccgcctggccagccgcccaggccccgtgtcccagcgcccgagcgtacctgcggcttgtcgcgcggccggtcctcaagttgggcagcgccgcccatggtcttccaccggtcgttgaccatcttccggcaggactggcgggggcgccgggcgaggcgcgccgctgcggagcgcaaaggagacggggtgggcgcgggcgcgggcgcggggcgcgctctgtccgccgggtccccgcctctgtgccccgcgccggggcggcccgggagcgggcgggcgtgtgaggatgagcgcgccgctgtgtgcgggcgggagcaggagcgggagcgcgaaagccgccagcccaacgcccgccgctcgcgctgcgcgccgtccccgctcccggctccggcgcctccccggcgcgctcctctctctcctccctcgtccctcctccctccttctcaatctccgcatcttttctggtctcggactctctttgctttttattgctcccctcggcctcccccgacacactcacacacacgcgcgcgctcacacccgcggacttggatactaaactccgcctccgaaaagacctagggaaaggaggccgaactggcccccagataacgcggccggccggagggcagcaaacagccgcgggcggcccggctcctgctggctcccggaggggcctgagagccccccggcggcgcctctgcacaaacttcctcccggaccggactcacacaagtcaccatgcgcggggcgggccccgagggcgcccccgccggccggttcggcgtctccggggagtggcgcggcgctccttccggctccctcccggctcaggacgcagggctcgccccaagacccaggctgcgccgggggcagtttcggtggggtgcgccccctgcgggcccccgaggtctgggtccaggtcccggggcaagtgcgcccagctgtggggtctccagcccccggggacctccctgcgccggaccccgacgcgtgagcctggccggtgggcgtcccagtccgcgtccgcagacccgtgccctcgcgcccgcggtcggaaagcccacacgacgcccccttgcccgggcggcccgtgggcgaaatgggggtccccaccactgccacagccgccggcgctgtggtcgcgagtaccagccgctccgcgctcggccgcgctcccggccgatcgcccgcgctccccggcgcgccccgcgtggtcccagcccccgccttctcctccgccgggaggggatttgtgccaggagggggcttcttagttgccccttcccaccagcagcacttttaaaagcatttaatccgcccggagcggccttcggaggtaattgacaaagtccttaatctgcgcggcgaacgagctgctattgtggcttctgaccgggaggcgcccacactgcccgacgccgcgctcccctcccgccgccccgccgagcccgccggccgcccctcctccgcccctttctgcgtccccatctttttctgctcccccagctccagacagacccccgttccccgcccccgcttctccccaaagctgttttccggctcccggggcgccttggccgccgcgctgttccctggcaccgtctccgtctctcccccactggctgccagtctgtcgccccatcttcgtccctctcccgatccctctacgcgtccggcactggcggggcagactggttgggggtgggggccgcgtccagcctgggctggggcactccctggaccccggagcgggggaccctgtggcccggtgccatccgaggagactgccacccgccaggcgctgggttcacaaaccaccggctgtttgtccccagccgccttttccttccaggacaaccgctggcctcacctacggcccgatcccggcttcccggactgaggctgcccgggagttggagaggatcccacagcaatggctgggagtcaggagacccaggttccaattctggcctctggccctttctggcccctcggcctttcctatgaattaagagggtcagcaggtgatctagagggccctcagacttgggaagaaggatgtggtggagggcacagggccctggctgtgtggctgagggcaagcaacatacctctccgagcctcagtttccccatgtaagccaaagggttgactgcacacgcttcagaagggctctgccacagtgcatcacagcacctgagcagggcaaggctcagatgttcctgctgtgaccttgggcagattccacgtcatccccaagcctcagtttcctcgtaaacaaggacttgcctattggtggggagtggcgaggtttgcaggcccttgtgcagttacaggcacaaagcgggcaggtggcggaaatgcaaggctctgactccacagtttggcgagaggatgtaaactccagacgcatttgtgcacagatgaaagatcaccctggggggtggagcgggggtggggggctgaactgagaacccacgggaggggtgctaaggaccaacggaggaggtcttggagatgtgctcagagtagtcagggaggcatcctgggatggaggggtgtgagcccgcccccaaggcccatg

SEQ ID NO: 588386 - DNA, 4001 bp, Homo sapiens
caggctaaacactactagaacttagagacatagccacagggcatcaggaagtcttcctggaggaggtggcagcatttgagcttgattttgagtatatgtagggtgtccctgagtgaaggggtgtgtgtgtgtgtgtgtgtgtttgtgtaaggctggggaagcaaacaagatgacacagaaaagatctggaaatggagcggcgtggtgtggggcccagggttggcaaataacaaacagtcactgcctgtaagggaccaatgggaaggcacagtatgccaggttagggatggccttggaggacaggtctagaagttaagacagttcttgctaagggggagaagtcagatctcagcaggaggggacttgttattttggggtggcttaggtgcagacctgacctaaaagaggggcgcgaccaccccggagaagcagtgggataggtgtgtggttagaccagagtttgaatccccactctcttgccaacgtgctgtgtgacttgggcatgttccgaacctctctgatccctggtctgtgatgtgggaacgcactggcccccagcctgtttggagaagtgaggtagtgccgatgaatgggaaggggctttgcaaaccgcagagggctgggcccttgtgccacggcagtgtcacaccaggaagaatgagcaggttgcagctcctgagaggaagggaccaccaagggctgcccgtgccgccccctcctgcagctgcaagcacgaactgttccttccccaatgacatctgtctggaagaaatttaaaatttaaaatgggcagccctattctctcctctccttggtgagcgagcggcctcctcgttttcgcctgcctgccccagtcccttggcagcccagcctggggcagccctggggctcccctccgccttggcttcgggactccagcccccttgctggccagcccaggtgttctgccctcacccgcttccaccgcacagccctgggcaccctccaagccccacctccactgcccctgaagaggcagcaggaagggaggaatgagtcagccctggagcacacagacaagggttcaaatcccgacagagctgcgtggcctcaggcaggagccaaccatctctgagccctgctttccttgtcttaaagtcagaaaatcacaatacccagcgttcctgcaggagatgaatctttattgatcccctactgtatgcagggccctggctaaagggaaggatgcagaggagattcagggggtcaggttcaggaccaggtgcctggcacagggtagcgcccagagtggagattctgtgggtagttaagatgcccattgtagaggtgaggaaacggagactcagcaacggggctgatttgtctgtggacacacagcgaactgtaagtccccgcctccctctgcacccgcgtgcaccagggggctgctgggggtgcggggacgcgggagacctggcccgcagcgcgcgtggctcctgcaggggtgccgcccccaccgaacctcgagttcaagcctcggctcggggaggaggagaggagggtccccatcccggcccgggcctccggagcctcgaaggggtgcgccccaaactccagcccccgcaatgggtgctcgccccgccggcccgagcggccaccgcctggccagccgcccaggccccgtgtcccagcgcccgagcgtacctgcggcttgtcgcgcggccggtcctcaagttgggcagcgccgcccatggtcttccaccggtcgttgaccatcttccggcaggactggcgggggcgccgggcgaggcgcgccgctgcggagcgcaaaggagacggggtgggcgcgggcgcgggcgcggggcgcgctctgtccgccgggtccccgcctctgtgccccgcgccggggcggcccgggagcgggcgggcgtgtgaggatgagcgcgccgctgtgtgcgggcgggagcaggagcgggagcgcgaaagccgccagcccaacgcccgccgctcgcgctgcgcgccgtccccgctcccggctccggcgcctccccggcgcgctcctctctctcctccctcgtccctcctccctccttctcaatctccgcatcttttctggtctcggactctctttgctttttattgctcccctcggcctcccccgacacactcacacacacgcgcgcgctcacacccgcggacttggatactaaactccgcctccgaaaagacctagggaaaggaggccgaactggcccccagataacgcggccggccggagggcagcaaacagccgcgggcggcccggctcctgctggctcccggaggggcctgagagccccccggcggcgcctctgcacaaacttcctcccggaccggactcacacaagtcaccatgcgcggggcgggccccgagggcgcccccgccggccggttcggcgtctccggggagtggcgcggcgctccttccggctccctcccggctcaggacgcagggctcgccccaagacccaggctgcgccgggggcagtttcggtggggtgcgccccctgcgggcccccgaggtctgggtccaggtcccggggcaagtgcgcccagctgtggggtctccagcccccggggacctccctgcgccggaccccgacgcgtgagcctggccggtgggcgtcccagtccgcgtccgcagacccgtgccctcgcgcccgcggtcggaaagcccacacgacgcccccttgcccgggcggcccgtgggcgaaatgggggtccccaccactgccacagccgccggcgctgtggtcgcgagtaccagccgctccgcgctcggccgcgctcccggccgatcgcccgcgctccccggcgcgccccgcgtggtcccagcccccgccttctcctccgccgggaggggatttgtgccaggagggggcttcttagttgccccttcccaccagcagcacttttaaaagcatttaatccgcccggagcggccttcggaggtaattgacaaagtccttaatctgcgcggcgaacgagctgctattgtggcttctgaccgggaggcgcccacactgcccgacgccgcgctcccctcccgccgccccgccgagcccgccggccgcccctcctccgcccctttctgcgtccccatctttttctgctcccccagctccagacagacccccgttccccgcccccgcttctccccaaagctgttttccggctcccggggcgccttggccgccgcgctgttccctggcaccgtctccgtctctcccccactggctgccagtctgtcgccccatcttcgtccctctcccgatccctctacgcgtccggcactggcggggcagactggttgggggtgggggccgcgtccagcctgggctggggcactccctggaccccggagcgggggaccctgtggcccggtgccatccgaggagactgccacccgccaggcgctgggttcacaaaccaccggctgtttgtccccagccgccttttccttccaggacaaccgctggcctcacctacggcccgatcccggcttcccggactgaggctgcccgggagttggagaggatcccacagcaatggctgggagtcaggagacccaggttccaattctggcctctggccctttctggcccctcggcctttcctatgaattaagagggtcagcaggtgatctagagggccctcagacttgggaagaaggatgtggtggagggcacagggccctggctgtgtggctgagggcaagcaacatacctctccgagcctcagtttccccatgtaagccaaagggttgactgcacacgcttcagaagggctctgccacagtgcatcacagcacctgagcagggcaaggctcagatgttcctgctgtgaccttgggcagattccacgtcatccccaagcctcagtttcctcgtaaacaaggacttgcctattggtggggagtggcgaggtttgcaggcccttgtgcagttacaggcacaaagcgggcaggtggcggaaatgcaagg

SEQ ID NO: 588387 - DNA, 4001 bp, Homo sapiens
aaagtagctgcagtattcactgtcatatgttctacttccttagagaaaaccaaaaaaggaatagctaaatcagagaattgtggtgaaactttctgtattctcagtgttaaatttgatttggttttcctgataactgtggggaacaaaaataaactataactttcctcagtatgtcttttaccatcaaattagctgttgtctatgtctaggagcacagtcacatgcctagaattcaagtgtctcagatccttgagaagcctgctcaggaaaaaagaatagttgagccaccaagaatttatctctggccaggaatctggaaaagagcacatggctgtcattacctatcccataattttcagtcagcttggactgattgttgcatgaaaattgggagccctaacattacagacttctcccaaatactttcacatagtgaagaatgcgaatttaaagtggaatagggaaaaaaggaacaaaagcacagcttaactgtaaaataactgagaaacggaaagaactcaaagtggaactaagtgaatgcaggccatctaaagacggggtaggaagggaacagagtggtgagagtgaaaaagactaaaaggtaggtaatatagagctagtcagtgtaaatcaaaaattcctacttaaggacaaaagaaggccagtgtcattttatggtcattcatctattaactcatttgtttatgtattgtctatgactactctcaccctacaaggcagaactgagtatttgtggttgcaatagaaaccacatggcccaacagatctggaagcaacttaagggcaggcacagcagtttaatcatttttgtaacctcttagcatttagcagaataaggggcatatgtggtgcatttgtcatttttccagtacattcttcagcacgcacaaaatttgttaagcatatgttcaaagaaaagctctgcaatgatcagagcttggtagctcacaagtttggaggaagtcaagctgtccactggcacaacacaatggaaaaggctaaactgactactaaaagagacaaaacccttcctctctttaaagatttctattccaggctggtatatattaatataatgcttggggaaactggagaatgacagaagtctgttacgttggttttaagctttaagctttacaaagtgcaatttcgcagctattattcattcaacagccacttcctgagcactcactatgtgctaggtaccatgctgcatgctagacagaaatgaacaccataagcagtccctgtccggtgaggactcataatctaataggtgcggggtataagaatagaggcaaacacacctagctgcaggaataaggaagagaaagcaattcattctgcctgaggttgcagaaggaaaagcatccaaaacgtgacatccgagctgggccttgaagaatgctagagctgacccaccaaggcctggttctaaagtgtcttcgccttctccatggagaaaagaagtctcacatcagccccagctgactcctataaaaattctgaggcaggaagtctcatcagcaatcattcccatttcaccggagaaattgtgacccagaatgcaaaaggcaaacccagggctatcttcccgccaagagagatgccgggtcccgaacctcagatcggcagggtcagcacagttgcaagttctgcccagattctgagaggtgtagagcaccggaatgtggcaagggtctccccccggaagttgggaaaaggcctgagaagagatcgacccccctccaacaatccgccggtatctctcagccacgccctccagcgcatacttctcagtcactcacccgccgctcggcgagaggaaatcggtgtcgtcctcgtcccccgcaccgaacattgcgttggctttcaccgggttgcggggaggaagctgggtattcccagagtcccagggcctgtcaccgccgacgtcgtaaaatgccgcggcggcgtgctgctttccggcagggcgaactccagcacggtctctggaccgaaagtagactgggctctggagaaggtggggcaaaggcaaatgagaggctcgcgcgggcacgagcgccgagtgacgtcaggcctctccagcccgcagcggggcggagcttcacagccccttgcagggattggtcggtaatgctagggggcgggagggggcgggaaatcctcggcctcggtggcggtggtggacacgtcgagccgggtagaagtggaggggccgttcgaagagtcgtgagggggtgacgggttaagattcggagagagaggtgctagtggctggacttgacctggaaaggtaaggcttctctcggcccctctttcgcacccctgtgcatgggtaccgtccttttcccagcgggacaaggaccttcctcgccgctttcctcagctccgcggaaggagaaagagctcgggactggagggttaaagactggggcttcggcccggcccctgcagtggcatagccagagtgaccttgggccggggtgctcggtgcctcagtttccccgtgtatgcaaccggccatttgtccagttcttccatgtgcctgctggtccagaagattttagagctcagaggccatggatttcaatcccggcctcctcgtaatctcagaatttacagatagggagacgaaggaactaagcacccgggtgactagtccgaggtcacaaagagtaaagggcagactgagactggattcctcgtcctttgattcaggacatagtgagctagtgggtgaacaagaaccttatcagcccttaagcactgtgtgcccttacagagtgactattgaaagactgtagcatacacctcgaggaaagtcccctttctagagtccacctgtattctacgcggatgaggtgcagaagagctaagatattctggcggtgggtgatggaaaggaggatactttggaggcagacacatccccaccccaactttggcgtgggtttccctgggtcttcctgcgacagccctaaatcaacatcaattgtggcggactcctctgcctccagtttccaccctatctgtatcttacataagtatttctttggttaacctggtatcattctcgaaacaatcctggggtagtcctggcttagacaaggtgtggctaaggagatagtgtcccagcgtagcgtccacagactcactggagttcttgggcttcccctcacagtcaggttggtactacaggtgtcccttacgtgaatgtttcaatctgtcagtatgaaattgaaatgaaatgattggtagctccctcccagagaactttgcacctcctggcaaagatgttaaagcagcgaaggctcacagttggaatgatgcaactggaatctaagcactagaaccggaactggaactagaatctaaggactagcactagaactgttgcagtagctctgtttagtgtgtgaacttggctacctcttggaggtgttgggggagtaactggattaagtaccatggcactttctaatccctctccccaacaccggtcactgtgattgcagcactgaaacatctaaatgtttaacagaaagagcttgctagcccctggcttacattatctatggtatttttaacatggaatgaatacttaaagtcacttgcaaagcagtctcactgcagaatctttctaggtgtttatgacatgtccttccagccttttctttaaaaaaaaaaaatggccaagggaatatttgaactcttatcttgtattcttgggtggagctgattttatcctggatgtttaagtagcttttgtaggtactcaggaatcctaaaatcaatagcctttttggtgattggaacatcacgaacatgcatacgcagattatcactgtagaaacacagctgctgattctcattagcagtatgaggaggaggaagatgatggtgagtcttgccaggctttgaactgcaggactgggtgcacctaaaaaaaaaaaaaaagaaagccactgtcttcctaa

SEQ ID NO: 588388 - DNA, 4001 bp, Homo sapiens
aaatgataccacttctgggtagacaattaggcagtggagattatatctatttgaattatttattttctgccagaattcccagaagtaggtgcttattatttgctgtaaatgctgttaaattagcttaataacaacactgggcccctgagaatctacaactatatgtaacttttttaaaaagaactccttccttgctcttagctctgagatccacatgcctccttcaataatttctccaacctcctctctgtgggtatggcctatagttactctctctacaatctctccctgaaaccaaatccattctcaagattttaactaccacctgtgagagaaaacactatttaaattacagtccatgcactctatctgcctatattttcaactctatttcctgcacctcacctcaaatttaacatgttcaaaattaacttttttttttttttgagacagagtttcgctcttgttgcccaggccggagtgcagtggcctgatcttggctcactgcaacctctgcctcccaagttcaagcgattctcctgcctcagcctcaggagtagctgggattacaggcgcccgccaccacacccggctaatttgttgtatttttagtagagatagggtttcaccatgttggccaggctggtttcgaactccttggcctcaggtgatccacccgcctcagcctcccaaagtgctgggattacaggcgtgagccaccgcgtccagccccaaaattaacaattttattctctgtcaactatcgtcctctcccagtccagaagaaagtaactagctctccatcctcacagtctctagttttacaggctttagagaagagagatcagctggcccaacatcaccttatggagaataggctctagaagaattaaatgacagccaagaggctagttattggcaacctcagcactctacgatctaaatcactttattcccagtacactattgcatgctggaattcaacagaattcccatttttgccaacagcacttaaacttactttttagaaacgcaggttaaaaatatcatcacccagatccaagaaatcaagtcctgcgtattgttctttcggcatttccccggttcctttcttcttccttgtcagaacaccctgcacttcctttccactaagagttctttcaccgttcaatgccagccttcccaaatcctctaccctcactaaacttatgtccacaaatagaatcgctaaaatataaatgcttattcctgcatttgatatctttgtccatggcccaacagagatggtttccaatcgttcaaaccctatttatcctcagagtctagctcaaacacagccttttctactgggcttccatctgcccaatttctaatatactgctctatcattcactttgtcatttgttcacagcttgatttttaccgactggaaacgtgctatcttcaaaagcataaagaatctgatatatcatctaggtccttttttttttttttccacatctgacaaaactgaagccaagagaaatgtggcttacctcatgttaaatgagaaattgtaaatttcaggccgggcgcggtggctcacggctgtaatctcagcactttgagaggccaacgcgggcggataacctgaggtcaggggtcactaccctaacccggctactacaagagtctcgatcgtcctccaacctttcatctgtcccaggattaagatttcacctgatgacacgcccagaagtgcgggaaggactggccaagtggaagtctaccacgcgatgctcgtggactgactgaggagtacccagcccggagcgcgctcagcctgtggccggcctcctcaccaaggggtaggcaggtgcccagaatgctggaggatgcccggtaagggcacccgagtcgccagcggtacctgtctgaaggcgcccacccatccccgggtaccgacctgagcctcccgtaccttacctcactcaacagcaggctgcagccgctccgctttacggcactcacagcaaccgccgcaaaagccgccgtcaagtgctgagcggcggaggctggcttggttcctgctgggacgttcccacggtccagccccagcctcggctttcctgtgactcttgtcgcatcctcaccgccagaagttcactgagccctggcgattcctcgcttttataatctagccacttagccaaagcccttttttatctcttgcctaattgacaactacagcagcgcactgaggcaatctgagagtttaagttctgaaacgctttcgacagcggaagatgaactggaggcagcagctgagccgttttccaagcccgttaaatgtgaacttctgataaacgagtggtttttttagtgcgtgtgctttgctagagggattcagcataactccctgaagtttggtttggatacaattagtagagctaggggatagagtggaaaatagcagctgcgttcactattcctcatgaagttgaggtgcctttatgacattcaagatttagcgacctgttgccctccagtttaaggctggatacaattttgtacctgattaacttttttcttttctttttttgtagagacgttgggggctagcagggcggggtgtggcgggggtgggggggagggcgtcctcaccatcttgcccaggctggtctcgaactcttggcctcaagcgatcctctcactttggttcttttaacggtgtaatccaaaaggtggttgttaaggctcagatattaatcttcttataaatttttgaaaaccataattcactaaaccagttactgtaattataatttatttctacaaaacggaaaatactcccatcatatatttgttttctaagctttgtttttaattctatcagtacagaaagaaaaggaagaaaaaatcttcctcacttcctacaggttatgacatttaccaactttttgtttttccttccagaaatttcctatgcacatacaagcttactgttgaagtcctctcatccaatgcactcagaacgggtaggtactcagtaggttaataaaaaaaagtggaaggttacaccaagaggaagtaagttatcaaagcttaatggcatcattaacacaggtgctaacgtgatgggacatgggaaaacttgagcatcacatacttgctattgattgaaacacatcaaatataaaaattcttgagtttataatgactccttaaaaaataaaattcagtcgtgattgaagattgccaagttgaagattaaatattctaaaacttgataagggaaaacatcaagcatttatcctgcctttcttgtatgaattgaattttagtgtaaccaaagtacttataagagttccagctaataaatggaggatgataaaacaatcacgattttgtaactcctaataaaataatcgaaagggcaacatcaatagatgataaaattaaggtgaaaggttgatggggaactttataatagactggcatcacctaaacccactgatcttaatctcactaaatttgggacaagcatatattatgtacttcctgatgtgatagaaagtacacagccacacctgtgaaggattcttgcctaaaaattgaacctgcatttactcaaactctagatctaatacaggatatagagaagcaactaaattcagaaaacgggacattctaccagacaaattcctcagtttttttcataaatggcatttaaaagcagagggaactattgtaaaatcaaatatttaagagatgtaacggagtacaatgtgtggaccctgtctagatcttgatttgaacaagataactgtaaaaagatacttctgagacaactgaaattttagtatggactgatccattagataatagtacagaattactgttaattttgctaagaatgttaacagaatgtggctgtttttaaaagccatcatggatgcatatagcatacttacaggtgacattttaaaacaaaatagatagcacaaacatggcaaaatgtt

SEQ ID NO: 588389 - DNA, 4001 bp, Homo sapiens
aaaaagaaatgtacagaataatgcaagcaattgccgctgttttagcagttttgctcatagccactgcctctctttggaattatattctatcccattcaccaacatcactgaactgtccaccaaggtattgtgttcggtccctatttcactcagaaatatattgtacattttccctccataattccatccacctgtctgaacaagtgaaaaaaaaattgtgccacaatttctactgtcttgacaaagattacttctgatttgcttccccaccccagataagctaaagagagctaaagggagtggaaggattagaagaggaaagaaacttcaatacggtactcaaagtcatagattttgcctaaactggtgtgtgcaaatattttaaactattttattttcaaaatggatacttgtaaacatcagcggaaattttgtcatgaatcccttttaggcagaagatgtttataaaatgaattatcttaatttaagggagctattgccctcaggattttggtaataacaaccgtagctgcttctgtacctaacaaatggttatgtaaaaacaattaaagcaaaagaaaacaaaacaaaaaacaagggaggatgtgctctgtttctgtaattgctctaaccttgttttattttgatatgagatttcttggcctcatctcagatagcaacaccaccctacactttctcctccacaccctttgcaaatagaattccaaaaggtagttcaggcactttagagttcatcctgggaaatggctcatcttgagggcatttcagtgcagtaactgagatttcgtctgctccttcccgggccgccgcactgcccatcccctgcccagtgatttccccaggaatccggggacggcaggaaaagagctccatccacagccagcccctcgcctttccggggacggccctcagccctgagggctgcccgtttaccgtgcgcatcccccggccaagcatccccgcaaggcgcccctcaccgccaactttccccactggaaactattctccgagcaaccgttaaagatcattgaccccgcgaacgcctcttcctgaggtagatcacgtaagatctctccctaactcccactttcccctccagaccagacgtcgcagtgcccacatcccactcaggattgagctaccccgaaagaacaagtgcgcccggagccgccacgggccagaagtcctcgcctccagagcgaagaccgcactctcgccccagcaccccaaaacccgacccccggcgctcgccccggccgccccgctcccggggaagtgcccgatccgccagcgcctccgcggagccaggacagaactcgcggccggggcgccccgagacccaacgcagcgccgcgcagccggggcctccacgcccccacgcccggtcccggccctccccgggcatccgcggctcgccccgggggattagggctcggcccgacacacacggcccgctccggggcgccggggacagggaggcccgcccgcgccgttcctcaggccgccggggacccgcaccaactcccctcgcctccgaaggacaagccggcccgcacctcctgctcgggccaaggcggacgaggggcattggaaccccgcctcctccccaggccgcgaggaccccgaccagcgcgccctcgcctccgcccagcagcgcggcccgcgccccctccccaggccgcggggaaacgcagcgcgcgccccgcatctgcccgcgggcccagcccctcactcacccagagctcggtgccccagctcatggtgcaggggacgcgaaggggcgctccgcgcggcgggcgcggctctctggtccccctccccggcgatccctttgccccccgagatccccgcgacggcggaaagcccggagtccgcgcggcctcctccggctcgcagctcctcgcccggggtctcctcggcggctcctcctccccgccgctccacagcaaaatggcccgaggaagcagcagccgcggccgccgcagcgcccgcccgccctacacccggagagcgggggaggggcgggaggggaggggcggggccggtctgacagctcgcgcacgcgcgcccgccccaccccggcccggccccctcccccgggctcccccggccgggtccgcgtcgccctggggtccggaaggacgcggagggaggtgtgagggacggcgggacccggatccctaggactccccctgccaatctggtaatgacttcttagtgaccactgtctgctcgcagtactagcgcttgccttggaacgcggcaggccctgggatcaccgatgctccgccgcggtctgagatcgctcccctgcgcgtatcgccgctctggatttaaggacaatactttcccctggcagccatgcgcgccgagcagagtcagcccgggaggctcttttcccaccgcccgagggaagcccgagagtcccgcaggctggcgcggtgggagtggggcggtggtaactgcgcgctgtgcgaatagagacgtcgaggcaagcgcgacggcctcgagtggctagggaaagaatccaggggcgtgcacccagtgatttccaatctctgaaaccagtgatttccaacttgttcagccaagaaactctcaggcgtgaaatcacgttaccgcctagtgggtaaaagcaaaggcgtggggtacacagataacttgtttggttcaaatccagcctcccgcacgtgctggccgggcggaggcggacaattgctccacctctggaagcgcagagcgcagtccaccaaatggaggcaaataacgtgtccatctcactgcccggcggtgaggatcaggggtgggccaaggccgaaggttggtaaacccagcgctcattttatcagcagacggactccctctctatatatccaaaggtctgcacaaatgttcctgacaagctatggaaaatgtttggaattccaactcctgaatcactagccctttccccacagcttatctttctccctcggttaatgctactactggatccttttctgagaaaccgtgcgactcccaacatgggcccccagttaaaaaatattttacgatgatgcatttctccaatcccaccccaccattttcaacctgcttatcattctcctccattaaaaggtggagctaacccgggtctggtggctcacgcctgtaatcccagcacatcaggaggcccaggtgggaggatggctggaggccaggaatttgagaccagcctgggcaacatcgcaagaccctgtctctacaaaaagaaaaaaaaaaaagttagctgggcatggtggcatgcacctgtggtcccagctacttgggagactgagacaggaggatcgcttgagcctagaaggttgaagttgcagtgagccatgatggtgccattgccctccagcttgagcaacagagcaagaccctgtctcaaaaatattaacaataatgaattaaagccgggcatggtggctcacgcctgtaatcccaacactttgggaggcagaagtgagtggatcatctgaggtcaggagtttgagagcagcctggccaacatggagaaaccccgtctctactaaaaacacaaaagttagctgggcgtggtgacagggcgcctgtaatcccagctactcaggaggctgaggcaagagaatcgcttgaacccgggaggcagaagttggagtgagccaagattgtgccactgcactccagcctgggtgacagagcgagactgtctcaaaaaataaaataaaatgaataataataataaattaagaggtggagctactaaacaaaaaacaaaacaaaaaaaaacctcttgcagataaacctccaactctacttcctttgttgggcagttacaataaatttaagttgtcaaaactgttttggtctgccttttttcagttacaaccctcccttcctgcccacccccattcttgtgtctgtataaatattttgctctcagttaccaggtctgaattctctttcctccagag

SEQ ID NO: 588390 - DNA, 4001 bp, Homo sapiens
tttctacaccataggtcattgtaaggatatgtgacatccaaagggttcagaatattgcttggcgcctgataagccctaggttaagtgttaaccataactactattattgctgttattattgctgatggctcacaagttattgtctgtagcctctcttatctcctcgtctccacatctggatatttagctaccactgaacctgtccataaggatgtcccacaggtactccaagaaaacatctcaaaaaaccaaactcattatcttgaaaacaaaactgaattatcttcctatatttcttacttcaggccttgatggcatattattcacccagccacttgagcaagaaacctggaaaatgttgccaacttatccactctctctccattaatttttacctctgagctatctctcatatctcattgcaccactccgatggtcactgccttagtcaagcccttcccatctcttgcctagactgatgcaatatcctaactgatctgcccacctgcatctcactgctttccaatgctttcacaatgccatcaaaatgactgcttccctgcataaaatctttcaatgactattactacattagtttgctacagctgccataacaaagtatcacaggttgggtgacttagacaacagaaatttattttcttccagctctggatgcagggaaatccaacatcaaagtgttagcaggcctgctttctcccgaggcctagctccttgacatgcagatgaccactttctcaccatatcctcccatgatctttcctctatgtgcatacatcctgggtgtctctttggccaaacttcctcttcttatatcttaatcacctctttttctttctgtctgtctgtctttctttctttctttctcctttctttctctttttttttagatggagtcactctgtcactcaggctggagtgcagtggcgccatcttgactcactgcaacctcctcctcccatgttcaggcgattctcatgcctcagcctccgaattagctggaactacaggcacacaccaccatgccaggctaactttctttttaaatttttttgtgtggggcggggggaggggagcagagtctcactctgttccctaggctggagggcagtggtgccatcttggctcactgaaacctccgccccccaggtttaagtgattatccttcctcagcctgccaagtagctgggactacaggcgcacaccaccacagccagctaattttttgaatttttagtagaaatggggttttgccatgctggctaggctggtctagaactcctgagctcaggcaatcacccacctcagcctcccaaagtgctaggcgtgagccaccacaccctgtcacttaatcacctctttaaaggccctatttccaaatacagtcacattctgaggtactaggggttggaacttcagcataggaatttgggggaaaacaattcaacccataagaatcacctaccaattaagaatggagttagttgcagggaggagcaaagatggccgaataggaacagctccggtctacagctcccagcgtgagcgatggagaagacggtgatttctgcatttccatctgagataccgagttcatctcactagggagtgccagacagtgggcgcaggtcagtgggtgcatgcaccgtgcgcgagccgaagcagggcgaggcattgcctcacctgggaagcgcaaggggtcagggagttccctttccgagtcaaagaaaggggtgacagacggcacctagaaaatcgggtcactcccacccgaatactgcgcttttccgacgggcttaaaaaacggcgcaccacgagattatattccgcacctggcttggagagtcctacgcccacggagtctcactgattgctagcacagcagtctgagatcaacctgcaaggcggcagcgaggctgcgggaggggcgcccgccattgcccaggcttgattaggtaaacaaagcagccgggaagctcgaactgggcggagcccaccacagctcaaggaggcctgcctgcctctgtaagctccacctctgggggcagggcacagacaaacaaaaagacagcagtaacctctgcagacttaagtgtccctgtctgacagctttgaagagagcagtggttctcccaccacgcagctggagatctgagaacgggcagactgcctcctcaagtgggtccctgacccctgacccctgagcagcctaactgggaggcaccccccagcaggggcacactgacacctcacatggcagggtattccaacagacctgcagctgagggtcctgtctgttagaaggaaaactaacaaacagaaaggacatccacaccaaaaacccatctgtacatcaccatcatcaaagaccaaaagtagataaaaccacaaagatggggaaaaaacagaacagaaaaacgggaaactctaaaaagcagagcgcctctcctcctccaaaggaacgcagttcctcaccagcaacggaacaaacctggatggagaatgactttgatgagctgagagaagaaggcttcagacgatcaaattactctgagctacgggaggacattcaaaccaaaggcaaagaagttgaaaactttgaaaaaaatttagaagaatgtataactagaataaccaatacagagaagtgcttaaaggagctgatggagctgaaaaccaaggctcgagaactacgtgaagaatgcagaagcctcaggagccgatgccatcaactggaagaaagggtatcagcaatggaagatgaaatgaatgaaatgaagcgagaagggaagtttagagaaaaaagaataaaaagaaatgagcaaagcctccaagaaatatgggactatgtgaaaagaccaaatctacgtctgattggtgtacctgaaagtgatggggagaatggaaccaagttggaaaacactctgcaggatattatccaggagaacttccccaatctagcaaggcaggccaacgttcagattcaggaaatacagagaacgccacaaagatactcctcgagaagagcaactccaagacacataattgtcagattcaccaaagttgaaatgaaggaaaaaatgttaagggcagccagagagaaaggtcaggttaccctcaaagggaggcccatcagactaacagcggatctctcggcagaaaccctacaagccagaagagagtgggggccaatattcaacattcttaaaggaaagaattttcaacccagaatttcatatccagccaaactaagcttcataagcgaaggagaaacaaaatactttacagacaagcaaatgctgagagattttgtcaccaccaggcctgccctaaaagagctcctgaaggaagcgctaaacatggaaaggaacaaccggtaccagccgctgcaaaatcatgccaaaatataaagaccatcaagactaggaagaaactgcatcaactaacgagcagaataaccacctaacatcataatgacaggatcaaattcacacataacgctattaactttaaatgtaaatggactaaatgctccaattaaaagacacagactggcaaattggataaacagtcaagacccatcagtgtgctgtattcaggaaacccatctcacgtgcagagacacacataggctcaaaataaaaggatggaggaagctctaccaagcaaatggaaaacaaaaaaaggcaggggttgcaatactagtctctgataaaacagactttaaaccaacaaagatcaaaagagacaaagaaggccattacataatggtaaagggatcaattcaacaagaagagctaactatcctaaatatatatacacccaatacaggagcaccaagatgcataaagcaagtcctgagtgacctacaaagagacttagactcccacacaataataatgggagactttaacaccccactgtcaacattagacagatcaacgagacagaaagtcaacaaggatacccaggaattgaactca

SEQ ID NO: 588391 - DNA, 4001 bp, Homo sapiens
caagaaccttagctgtttcccaaagatatttcgtggggttcccgctgcctcctctcctccccttccccctccaaagcgactttattcatgacaccgtttccttgcccatttagctgactaggaaaataacggtatcaaacgcttcctcttttccttcttaaataaaacgaaatttccttagtggacggcagttttgtcttgaatgttcacgagaggcgaccgccgaggatgcgaccagcagagagaaacgtggtggctgagatccgtttcagcgtcactctctgttggattcttcgcgggaggtttagctctgccagcttctgctcccaggaataagggtcagaatcgacttccaatttaccagcgaatgaggctttcctaacctccttcgttccctccccccataacttatggatttatattaattacaatagaaactcttacctgaaaattggctttcattaatctgattgtacaacatagtataaacacagacaccaggaaggttatatttattcagaccactggagaatccacttttcggggttgttcgtctatttaaataccttccgttccagcaaaggctgagactcgccagctctgcccggcctgaccagggcgccctctccccgtcgggtggtttgggcggttccgggcccggcgtctctcaccccgctggtctccccacgcccgccgggtcccctaggagtgcactagcaccgagtgcaaggagccgcccttgctttcggccgaggtaggggctgtgggctccagcagagaggcaacgggcgaggccgcggccgcggagcacacggtggatggcgccggaggctgctgcgaagccgcggggacagtgagccccggctgcagcgcggacacgggcggcagcgcaggcgtgggcttgatgggcaccggcatggcaggcaggctctggcttgccgagtggcacagggacttgaccgggaccccgaaggccccatactccgggcctacagggactccggctgcggctgcggcggccgcggcggcggccaccgaatccatgacgccaacgtgcggccacacggagctgacgacgttgccaagctggccgggcacggggtagcccaggtggtgcatgacggacgccaagggcagccctccagcctgcagcacgcccttgtagtcccggccaataatgttctcaatggcaaaggggtgcttgaagcctgacgtggacgccgcggccgcggcggcagcggcggcggccgagcccagcccgtagggtgggaactgagacaggcgtcccacgctgcccaccgcggctgccgcggccgccgccgccgccgccgccacggccgccgcctcctgcatcttgccggggtgagacggctgctgaggctgcgactgctggggcggttgctgcgggggctgtgacgggaggtgcggaggcggctgcggagcagtaggcggttgctgatggaaatagtgtaccatgtgcggcggcggcgggggcggcggcggcggcggctggggtgggtggtggtgatggtggtggtgtgcggcagcgtggtgatgatggtggtggtgggggtggtggtggtgatgggggtgaaggtgccctcccggaccggcgcccggcgcgctcttggtgcttcccgcgtgcaagtgagtatggtcggcgcgcagcaccttgaagcgcttgcgacgccgcaggaagctgccgttctcgaacatgtccccgcagtcggggtgcagcgcccagaagctacccttgccaggctggtcgggcctccgcggaatcttgatgaagcagtcgttgaaggagaggttgtggcgcaggctgttctgccagcgctgtgtgtgctcgcggtagtaggggaagcgctccatgatgaacttgtagatgtcgctcagcggcagcatcttctcggccgagtgctggattgccatggcggtcagcgagatgtaagagtagggcggtttttggtcgctgtacgagctcttccccggccgcggcatcgcccccggctcctccaccgccctccggcccgcactggaccacagaatctctccgcactccgttcctggggcctggctgcccccactaattcccactcggcccctccagtcccgccactttgccctctcgccctccaggccctctctgcttctctctcctgccttctccgaattgcctggtgtctccgaccttggcctttcgggcctactcagctctcggaagctggcaacttctggccccgacggttgccgactggcgcgcacagtcgcgggcggagtgcaccaggtttaccgccgccttctctgcgtcttcccccgggtggccaaagactgagtgctggagctggctgcagaggagagtggcaaggggccgtgtttcctcccggcctctttgctttttctaggtccgagggaaacccagaccaagatggctgggaggaaggtctgggcagtagagactctggccctttaaatctgagtttgcgcctgctgtcctggaggccagtgacagcaggacttccagtgccctggacgcaggcccctggccaggcacttagccagaccgcgctggagttctccttttcctggagtgaaaaatcagggtaaggagagagaagattggcttctagggcgcctctcttttctccgaggctcgcagcgtcgccggggttagaagagacgcgcagccctaggctgtcgctgaggagaaaaaactttggtggtttctgaagcggcagcgcccgcaggttctgctgaggagtgtggggcgcaggactctgggagcgagcggcgggctggagagggcgtctgcgaatgctgggtgagtgctggccggggaggctcagccgtccgcgccgcagctgccgcctttctcccgggcttgtcttgaggaggagaggcgacggcagtggcagcgacgcgctctcctggctgcgttttgtaatggtccccgagacgccgagacccccgcagctagcgcttcgagactatcacatgaccgaggctgagggactcagccgccgccgccgcgtctgtagctgaagaaggggcaagaaggcgccgtgcctcgcccccgcccccttttccacctcgtttcgggcgctctccacccatcgcgttcaccactcgctcggcagcccccagccacctcccggtgcggcgggtggcgcaggctgttcgccgggagggggcacagctccgggtgcatttcccgcagctgcgccccacccgggccaccaagcacggtggagggggaacaggacactgccttcttgcttctcttctctctggcatctccctcttccgcccccttccttttacccttccctgttttcatctactcgctgtgagcttctctctccttacaaaccctttttcctgggctagacactctgggtcaagttcagagtatcgtgtcctcaaggcctcttctctgcaagaaaccccgatgattagagggctggagggaaaaactcatggggaagaaagcatggggtgttttcaccaaatgccaaattcatctcagttttattgcgcgccaactgcatgtgaggcaccaggtgcagggagacaggagacagtatccgagctccaccatcgcggtatagagggtgagacgaacagtaaccaagaaattaatagaataggcactaaagggcttggcgaatggaggctccaccacactttcctggagcgagtgagttggacaagatgaggtttctctgggatggcgatgtctgagctggggccagaagtaagagttggggattcaggggtcccatcacctgtgtgtgctggaaggaaatctttgctattcttagcacggtggtgtggggccagggcgaggcaggaggtggaatggaaataattaaataggaagcaaaaattatcagtccacaggatcctggtgtgatctgcgagggagaggtggatgaacccaggagtgaggtccttctgcttggaggttcctgctctgcactcatccaaacacccagcaggaa

SEQ ID NO: 588392 - DNA, 4001 bp, Homo sapiens
taggaataatacttccagttccaaggaagtgaagaagggggaacatgtttggcatcggaggctgtgtttttgtttgcttgcttgtttttcttttaatgccagaacaaaataccccactcacgttcatagtaccccaggacatgtgcaaatcgggaaagccacagaagccacaaccgaaggcaagaaaagatgacttgacgccctgcgaaggttacgttcaggtggtttttagaggaacgtaatccagctgtttctttctaaccattttgcagggaacagaagttcgtgtttgctctccagcgggattcagatgcacacgcccagtatgggccgcgcaaggtggagtgagcagctgcgggtcgctccccactcccacctggctctaggagggccctgcggactcggccagggaactgggcgtgggcgatactaaaaaaactggtgaggtcccctctccgcccaaaggggcggccagcgatgtcagcccagagccctctgccaccgcctgataccgcagcagcgccgacgcggccgacaggtgcccgcccagcaccgcgcccttggtgggagcgcagccgttggcgcagtcctcctcctgatgccgctgctgttgctgcaaaattgtccgacaggcttgacggtcgctggagcagggggcagtagctccacgcggtcggggacaaactctgcgcagcccctgtacccgctcccctgaccccttgcatgatactctcaatgctgaaagagatgcatccgcctcccggtggcgacgccagacccttgccctcctcccaaggctgaggaccaagtgagggctgcagcacgggaagggtgccggggtcgccaggtccgcgccttctgctttcttcggtgccccggcataggcgggggccgagagcagtaggtagcgaggaggatgcgggtgcagcagagcgtaagggcgtctcccggggccggtgttggggtaggcccccgggactggctgcggcggggcaggggccccaagcagagggcctgggcgggggttgtgcagggcggcgtgtgcagcaggtagagggaaggggtggggcaggtgggctcccggggtcggttggtggcgctggaaacgcttcctacgccggagaaagctgccattgtcgaacatgtcctgggaggcggggtccaggctccagtagttgcccttgcctgggcggcccggctcgcgggggatcttgacgaagcagtcgttcagcgagaggttgtggcggatgctgttctgccaggcggggaacttgcggcggtagtaggggaagcggtcactaatgaaggcgcagatgccgctgagcgtgaggcgcttgtgcgggctttgcaggatggccatggtgatgagcgcgatgtacgaggaggggggctttgccggctgccgggcatcttcagaggccgccgcagaccttggcggtgccctgaactcggtgccaaactctgaggggtcgctcgggccgccgccgccctcgatgtgctctcggggaagcgcaaccccgccccaccgggccacctgcagccccggctggagcgactgctctaggaactgctggctcgccgcctcctcctcgtcttcatcttcctcctctcccaggacatcgattttaccgtcttccccatcggagtcccggaggctgcgctgcggtgtggagcgaaggcgctcagctcttggcaagttcatggcggagcaggtgcttcagtcgcaggggatgtggcggccggatcacctggccccggcgggctgagctggaagcccgggatgaatgttgcaagaagcaggaacgctagtggttaccctttgggatgttttcctctgcttgtttctacgcctttgcaacaacgtccggcaaagatgccttcgccttttataaaagcttcttcaagaccatgtgtggtggacgcctccctttataacccttcttcccctacctcggagcggtgccacttcctcctaacgtagtccagggatgatggtcttctgggcaaacaccgtccggagaaaagcccagcgccctcctcctcgcacccacctgccaccaaggaagatgctctactcatccggtgcagccagacagtaggcaagcctttgcacgggttctgttaaggcgcatttaaacccgcgcaaataaaagcgaggtaggaaagtaggatactcaacattctacgaccacctcgacatgcagccttcccgcctggagaaaagaaatggtggggtaggaggctgaaatgtacacggttgtttgtaaaggaatgtgtaaccgtgaaagtatgtttttgtgtttcacagctggtaatcacccattttcattggtagagtctgtccttacccagaatggtgagctgaattatatttaaggttctgacaatattcccaggcttcaggggggtgttgctttgctccttctaccttccttcccacctccccaagatgctctccctgactcaaattttcagaaaaggttcaaatgtcccagcactaaattgtgtaagtttattcagggaaggcaggagagctcacacggagtcctctgtccccttgtagcaatggttctccaatttctttgaatatttaaccacagaaatacattttatatcacaatcttacacatacagacataatacataactaagatggctttcacgaaacaatatacttacactatagtgatcactgatatttccttttaaaaaaaaatggccataaccaactaaattgatttcacacataccagtatgggcccagtttgaaaaatcctgttcttacaaagtggccccacatacaagaaatgcacccactctataagggcttctctctctccctttcctccttcctttcttcatcctttataaccaattcatttttagagacagggtctatgttgcgcaggctggctttgaattcctgggctcaagtgatcctcccgcctcagcctcctgagtaggtgggactacaggcgtgccactatgcctggctctggctcttcattctttttttcctttttttttttttttttttgaggcggagtctcgctctgtcgcccaggctggagtgcagtggcgggatctcggctccctgcaagctccgcctcccgggttcacgccattctcctgcctcagcctcccaagtagctgggaccacaggcgcccgccaccgcacccggctaattttttgtatttttagtagagacggggtttcaccgtgttagccaggatggtctcgatgtcctgacctcatgatccgcccgcctcagcctcccaaagtgctgggattaccggcgtgagccaccacgcccggcctcttcattctttcagaaatgtcaacattaagtgcttttactgtaataaaacttgggacttcaatgaggcaagaaggggctgcagtgttgcctttaaatcagtgggtcctcattcactgtctgcactggggaggggcaatatgacagcacaactgttcatctcactcgctccacatccttagaagtaacacgatttttagattggcttcatgaaaattagctcagagactaaagtagcactacagaggaataaaaaaaatatttgttatataaataaggatcttattaaaatactaagtaagatactatgccacggtatatattcataatttaaaacccacctacttgggaaaactttgaggtgccatctaataaaaatgcagcatgaaagaatattatgcccttgatagtcacatagtgtctataattatgacaatgaatgttcagtgagaaatcaaacgccaactgcaagggcaaaatataataaaaaatagcttaaagtagctagtgccttcaggataaaatctggaaaagggctttcttgctgatctttttttgaaactttgctgctcctgaagtttttaccctttaaggctcctcagtttatatgaagcttggaggacaaataacagacaggtttgagcctaacagatttgtttgaatcccaaatttaccaatgactgc

SEQ ID NO: 588393 - DNA, 4001 bp, Homo sapiens
taggcttaattttaacaccttaattttaacattaaagatggcacgtcagacacacagataagaaatcaatgttctgaaattaatatcctacttacattaaacatccctatcaggaagacacagagagtagaagcattttgcactagacttaggaataatacttccagctccaaggaagtgaagaagggggaacatgtttggcatcggaggctgtgtttttgtttgcttgcttgtttttcttttaatgccagaacaaaataccccactcacgttcatagtaccccaggaaatgcgcaaatcgggacagccatagaagccacaaccgaaggcaagaaaagatgacttgacgccctgcgaaggttacgttcaggtggtttttagaggaacgtaatccagctgtttctttctaaccattttgcagcgaacagaagttcgtgtttgctctccagcgggattcagatgcacacgcccagtatgggccgcgcaaggtggagtgagcagctgcgggtcgctccccactcccacctggctctaggagggccctgcggagttggccagggaactgggcgtgggcgatactaaaaaaactggtgaggtcccctctccgcccaaaggggcagccagcgatgtcagcctagagccctctgccactgcctgatacctcagcagggccgacgaggccgacaggtgcccgcccagcaccgcgcccttggtgggagcgcagccgttggcgcagtcctcctcctgatgctgctgctattgctgcaaaattgtccgagcagcggcggcggcggacacttgcagcaaaggggcagcggtctggggatgcaacaggcttgatggtcgctggagcaggtggcagtagctccacgcggtcggggacaaattctgcgcagcccctgtacccgctcccctgaccccttgcataatactctcaatgctgaaagagatgcatccgcctcccggtggcgacgccagacccttgccctcctcccaaggctgaggaccaagtgagggctgcagcacgggaagggtgccggggtcgccagggccgcgccttctgctttcttcggtgccccggcatagacgggggccgagagcagtaggtagcgaagaggatgcgggtgcagcagagcgtaagggcgtctcccgggggcggtgttggggtaggcccccgggactggctgcggcggggcaggggccccaagcagagggcctgggcgggggttgtgcagggcggcgtgtgcagcaggtagagggaaggggtggggcaggtgggctcccggggtcagttggtggcgcttgaaacgcttcctacgccggagaaagctgccattgtcgaacatgtcttgggaggcggggtccaggctccagtagttgcccttgcctgggtggcccggctcgcgggggatcttaacgaagcagtcgttcagcgagaggttgtggcggatgctgttctgccaggcggggaacttgcggcggtagtaggggaagcggccactaatgaaggcgcagatgccgctgagcgtgaggcgcttgtgcgggttttgcaggatggccatggtgatgagcgcgatgtacgagtaggggggctttgccggctgccgggcatcttcagaggccgccgcagaccttggcggtgccctgaacttggtgccaaactctgaggggtcgctcgggccgccgccgccctcgatgtgctctcggggaagcgcaaccccgccccaccgggccacctgcagccccggctggagcgactgctctaggaactgctggctcgccgcctcctcctcgtcttccacctcgtcttcatcttcctcctctcccaggacatcgattttaccgtcttccccatcggagtcccggaggctgcgctgcggtgtggagcgaaggcgctcagctcttggcaggttcatggaggagcaggtgcttcagtcgcaggggatgtggcggccgatcacctggcctggggcgggctgagctggaagcctgggatgaatgttgcaagaagcaggaacgctagtggttaccctttgggatgttttcgtctgcttgtttctactcctttgcaacaacgtccggcaaagatgcctttgccttttataaaagcttcttcaagaccatgtgtggtggactcccccctttataacccttcttcccctacctcggagcggtgccacttcctcctaacgtagtccagggatgatggtcttctgggcaaacacccgtccggagaaaagcccagccccctcctcctcgcacccacctgccaccaaggaagatgctctactcatccggtgcagccagacagttggcaagcctttgcacgggttctgttaaggcgcatttaaacccgcgcaaataaaagcgaggtaggaaagtatgatactcaacattctatgaccacctcaacatgcagccttcccgcctggagaaaagaaatggtggggcaggaggctgaaatgtacacggttgtttgtaaaggaatgtgtaaccgtaaaagtatgtttttgtgtttcacagctggtaatcacccattttcattggtagagtctgtccttacccagaatggtgagctgaattatatttaaggttctgacaatattcccaggcttcaggggggtgttgctttgctccttctaccttccttcccacctcctcaagatgctctccctgactcaaattttcagaaaaggctcaaatgtcccagcactaaattgtgtaagtttactcagggaaggcaggagagctcacacggagtcctctgtccccttgtagcaatggttctccaatttctttgaatatttaaccacagaaatacattttatatcacaatctcacacatacagacataatacataactaagatgggtttcacgaaacaatatacttacactatagtgatcactgatatttccttttaaaaaaaaatggccataaccaactaaattgatttcacacataccagtatgggcccagtttgaaaaatcctgttcttacaaagtggccccacatacaagaaatgcacccactctataagggcttctctctctccctttcctccttcctttcttcatcctttataaccaattcatttttagagacagggtctatgttgcgcaggctggctttgaattcctgggctcaagtgatcctcccgcctcagcctcctgagtaggtgggactacaggcgtgccactatgcctggctctggctcttcattcttttttttttttttttttttttttttttttttgagacggagtcgctctgtcgcccaggctggagtgcagtggggcgatctcagctcactgcaagctccgcctcctgggttcacgccattctcctgcctcagcctcccaagtagatgggactacaggcgctcgccaccacgcctggctaattttttgtatttttagtagagacggggtttcaccgtgttagccaggatggtctcgatgtcctgacctcatgatccgcttgcctcagcctcccaaagtgctgggattaccggcgtgagccgccatgcccagcctcttcattctttcagaaatgtcaacattaagtgcttttactgtaataaaacttgggacttcaatgaggcaagaaggggctgcagtgttgcctttaaatcagtgggtcctcattcactatctgcactggggaggggcaatatgacagcacaactgttcatctcactcgctccacatccttagaaataacacgatttttagattggcttcatgaaaattagctcagagactaaagtagcactacagaggaataaaaaaaatttgttatataaataagaatcttattaaaatactaagtaagatactatgccacggtatatattcataatttaaaacccacctacttgggaaaactttgaggtgccatctaataaaaatgcagcatgaaagaatattatgcccttgatagtcacatagtgtctataattatgacaatgaatgttcagtgagaaatcaaacgccaactgc

SEQ ID NO: 588394 - DNA, 4001 bp, Homo sapiens
gaaaacaagtgggaaagaaatctagtataatttgccctttgtgtacctttattacttagcgtttgagtaaatgattcccccaaatatcttcccatcttaattcatgtctctaaagtagacatttatgtctcaccttgtcaagaagggcaaactctaacataaacatttcccaaaaatgcttcctgctaaaacataagctcagtgtggctagaaatgcagctcacttcataaagattaattggtagctaattttgcatgctgttctctgaacttcagtgaaacctgtccatcaggcatacagggaatgacggaaaaggtgacaacagaagatgaatgctatgtcactaatcttcaaagatgacaatgtgcaaatcgggacagccatagaagccacaaccgaaggcaagaaaagatgacttgacgccctgcgaaggttacgttcaggtggtttttagaggaacgtaatccagcttagaggaatgtaatctttctaaccattttgcagcgaacgaacagaagttcgtgtttgctctccagcgggattcagatgcacacgcccagtatgggccgcgcaaggtggagtgagcagctgcgggtcgctccccactcccacctggctctaggagggccctgcggagttggccagggaactgggcgtgggcgatactaaaaaaactggtgaggtcccctctccgcccaaaggggcagccagcgatgtcagcctagagccctccgccactgcctgatacctcagcagcgccgacgaggccgacaggtgcccgcccagcaccgcgcccttggtgggagcgcagccgttggcgcagtcctcctgatgctgctgctattgctgcaaaattgtccgagcagcagcggcggcggacacttgcagcaaaggggcagcggtttggggatgcaacaggcttgatggtcgctggagcaggtggcagtagctccacgcggtcggggacaaactctgcgcagcccctgtacccgctcccctgaccccttgcataatactctcaatgctgaaagagaagcatccgcctcccggtggcgacgccagacccttgccctcctcccaaggctgaggaccaagtgagggctgcagcacgggaagggtgccggggtcgccaggtccgcgccttctgctttcttcggtgccccggcatagacgcgggccgagagcagtaggtagcgaagaggatgcgggtgcagcagagcgtaagggcgtctcccgggggcggtgttggggtaggcccccgggactggctgcggcggggcaggggccccaagcagagggcctgggtgggggttgtgcagggcggcgtgtgcagcaggtagagggaaggggtggggcaggtgggctcccggggtcagttggtggcgcttgaaacgcttcctacgccggagaaagctgccattgtcgaacatgtcctgggaggcggggtccaggctccagtagttgcccttgcctgggtggcccggctcgcgggggatcttaacgaagcagtcgttcagcgagaggttgtggcggatgctgttctgccaggcggggaacttgcggcggtagtatgggaagcggccactaatgaaggcgcagatgccgctgagcgtgaggcgcttgtgcgggttttgcaggatggccatggtgatgagcgcgatgtacgagtaggggggctttgccggctgccgggcatcttcagaggccgccgcagaccttggcggtgccctgaacttggtgccaaactctgaagggtcactcgggccgccgccgccctcgatgtgctctcggggaagcgcaaccccgccccaccgggccacctgcagccccggctggagcgactgctctaggaactgctgtctcgcctcctcctcctcgtcttccacctcgtcttcatcttcctcctctcccaggacatcgattttaccgtcttccccatcggagtcccggaggctgcgctgcggtgtggagcgagggcgctcagctcttggcaggttcatggaggagcaggtgcttcagtcgcaggggatgtggcggccgatcacctggcctggggcgggctgagctggaagcctgggatgaatgttgcaagaagcaggaacgctagtggttaccctttgggatgttttcgtctgcttgtttctactcctttgcaacaacgtccggcaaagatgcctttgccttttataaaagcttcttcaagaccatgtgtggtggactcccccctttataacccttcttcccctacctcggagcggtgccacttcctcctaacgtagtccagggatgatggtcttctgggcaaacactgtccggagaaaagcccaggcccctcctcctcgcacccacctgccaccaaggaagatgctctactcatccggtgcagccagacagttggcaagcctttgcacgggttctgttaaggcgcatttaaacccgcgcaaataaaagcgaggtaggaaagtatgatactcaacattctatgaccacctcgacatgcagccttccctcctggagaaaagaaatggtggggcaggaggctgaaatgtacacggttgtttgtaaaggaatgtgtaaccgtaaaagtatgtttttgtgtttcacagctggtaatcacccattttcattggtagagtctgtccttacccagaatggtgagctgaattatatttaaggttctgacaatattcccaggcttcaggggggtgttgctttgctccttctaccttccttcccacctccccaagatgctctccctgactcaaattttcagaaaaggtccaaatgtcccagcactaaattgtgtaagtttattcagggaaggcaggagagctcacacggagtcctctgtccccttgtagcaatggttctccaatttctttgaatatttaaccacagaaatacattttatataacaatcttacacatacagacataatacataactaagatgggtttcacgaaacaatatacttacactatagtgatgactgatatttccttttaaaaaaaaatggccataaccaactaagttgatttcacacgtaccagtatgggcccagtttgaaaaatcctgttcttacaaagtggccccacatacaagaaatgcacccactctataagggcttctctctctccctttcctccttcctttcttcatcctttataaccaattcatttttagagacagggtctatgttgagcaggctggctttgaattcctgggctcaagtgatcctcccgcctcagcctcctgagtaggtgggactacaggcgtgccactatgcctggctctggctctggctcttcattctttttctccttttttttttttttgagacggagtcgctctgtcgcccaggctggagtgcagtgacacaatctaggaccactgcaagctccgcctcccgggttcacgccattctcctgtctcagcctcctgagtagttgggactacaggcgcccgccaccacgcccagctaatttggttggttatttatctgggacggagtctcgctctgtcgcccaggctggagtgcagtggggcgatctcagctcactgcaagctccgcctcctgggttcacgccattctcctgcctcagcctcccaagtagatgggactacaggcgctcgccaccacgcctggctaattttttgtatttttagtagagacggggttcaccgtgttagccaggatggtctcgatgtcctgacctcatgatccgcttgcctcagcctcccaaagtgctgggattaccggcgtgagccgccgtgcccggcctcttcattctttcagaaatgtcaacattaagtgcttttactgtaataaaacttgggacttcaatgaggcaagaaggggctgcagtgttgcctttaaatcagtgggtcctcattcactatctgcactggggaggggcaatatgacagcacaactgttcatctcactcgctccacatccttagaagtaacgcgatttttagattggcttcatgaaaatta

SEQ ID NO: 588395 - DNA, 4001 bp, Homo sapiens
tgctgctgctattgctgcaaaattgtccgagcagcagcggcggcggacacttgcagcaaaggggcagcggtttggggatgcaacaggcttgatggtcgctggagcaggtggcagtagctccacgcggtcggggacaaactctgcgcagcccctgtacccgctcccctgaccccttgcataatactctcaatgctgaaagagatgcatccgcctcccggtggcgacgccagacccttgccctcctcccaaggctgaggaccaagtgagggctgcagcacgggaagggtgccggggtcgccaggtccgcgccttctgctttcttcggtgccccggcatagacgggggccgagagcagtaggtagcgaagaggatgcgggtgcagcagagcgtaagggcatctcccgggggcggtgttggggtaggcccccgggactggctgcggcggggcaggggccccaagcagagggcctgggtgggggttgtgcagggcggcgtgcgcagcaggtagagggaaggggtggggcaggtgggctcccggggtcagttggtggcgcttgaaacgcttcctacgccggagaaagctgccattgtcgaacatgtcctgggaggcggggtccaggctccagtagttgcccttgcctgggtggcccggctcgcgggggatcttaacgaagcagtcgttcagcgagaggttgtggcggatgctgttctgccaggcggggaacttgcggcggtagtatgggaagcggccactaatgaaggcgcagatgccgctgagcgtgaggcgcttgtgcgggttttgcaggatggccatggtgatgagcgcgatgtacgagtaggggggctttgccggctgccgggcatcttcagaggccgccgcagaccttggcggtgccctgaacttggtgccaaactctgaggggtcactcgggccgccgccgccctcgatgtgctctcggggaagcgcaaccccgccccaccgggccacctgcagccccggctggagtgactgctctaggaactgctgtctcgcctcctcctcctcgtcttccacctcgtcttcatcttcctcctctcccaggacatcgattttaccgtcttccccatcggagtcccggaggctgcgctgcggtgtggagcgagggcgctcagctcttggcaggttcatggaggagcaggtgcttcagtcgcaggggatgtggcggccgatcacctggcctggggcgggctgagctggaagcctgggatgaatgttgcaagaagcagcaatgctagtggttaccctttgggatgttttcgtctgcttgtttctactcctttgcaacaacgtccggcaaagatgcctttgccttttataaaagcttcttcaagaccatgtgtggtggactcccccctttataacccttcttcccccacctcggagcggtgccacttactcctaacgtagtccagggatgatggtcttctgggcaaacactgtccggagaaaagcccaggcccctcctcctcgcacccacctgccaccaaggaagatgctctactcatccggtgcagccagacagttggcaagcctttgcacgggttctgttaaggcgcatttaaacccgcgcaaataaaagcgaggtaggaaagtatgatactcaacattctatgaccacctcgacatgcagccttccctcctggagaaaagaaatggtggggcaggaggctgaaatgtacacggttgtttgtaaaggaatgtgtaaccgtaaaagtatgtttttgtgtttcacagctggtaatcacccattttcattggtagagtctgtccttacccagaatggtgagctgaattatatttaaggttctgacaatattcccaggcttcaggggggtgttgctttgctccttctaccttccttcccacctccccaagatgctctccctgactcaaattttcagaaaaggtccaaatgtcccagcactaaattgtgtaagtttattcagggaaggcaggagagctcacacggagtcctctgtccccttgtagcaatggttctccaatttctttgaatatttaaccacagaaatacattttatataacaatcttacacatacagacataatacataactaagatgggtttcacgaaacaatatacttacactatagtgatcactgatatttccttttaaaaaaaaatggccataaccaactaagttgatttcacacataccagtatgggcccagtttgaaaaatcctgttcttacaaagtggccccacatacaagaaatgcacccactctataagggcttctctttctccctttcctccttcctttcttcatcctttataaccaattcatttttagagacagggtctatgttgcgcaggctggctttgaattcctgggctcaagtgatcctcccgcctcagcctcctgagtaggtgggactacaggcgtgccactatgcctggctctggctcttcattctttttcttttttttttttttttttttttgagacggagtcgctctgtcgcccaggctggagtgcagtgacacaatctaggaccactgcaagctccgcctcccgggttcacgccattctcctgcctcagcctcctgagtagttgggactacaggcgcccgccaccacgcccagctaatttggttggttatttatttatctgggacggagtctcgctctgtcgcccaggctggagtgcagtggggcgatctcagctcactgcaagctccgcctcctgggttcacgccattctcctgcctcagcctcccaagtagatgggactacaggcgctcgccaccacgcctggctaattttttgtatttttagtagagacggggtttcaccgtgttagccaggatggtctcgatgtcctgacctcatgatccgcttgcctcagcctcccaaagtgctgggattaccggcgtgagccaccgtgcccggcctcttcattctttcagaaatgtcaacattaagtgcttttactgtaataaaacttgagatttcaatgaggcaagaaggggctgcagtgttgcctttaaatcagtgggtcctcattcactatctgcactggggaggggcaatatgacagcacaactgttcatctcactcgctccacatccttagaagtaacacgatttttagattggcttcatgaaaattagctcagagactaaagtagcaatacagaggaataaaaaaatatttgttatataaataaggatcttattaaaatactaagtaagatactatgccacggtatatattcataatttaaaacccacctacttgggaaaactttgaggtgccatctaataaaaaatgcagcatgaaagaatattatgcccttgatagtcacatagtgtctataattatgacaatgaatgttcagtgagaaatcaaacgccaactgcaagggcaaaatataataaaaaatagcttaaagtagctagtgccttcaggataaaatctggaaaagagctttcttgctgatctttttttgaaactttgctgctcctgaagtttttaccctttagggctcctcagtttatatgaagcttggaggacaaataacagacaggtttgagcctaacagatttgtttgaatcccaaatttaccaatgactgcttgtgtgacctactaaactaagctccaggagggccaggccacgtgtcttattcaaccacataatcccagacgcctcctccccagcgccccccagcatgtgaggcaaatttcctccatcagcataggaatcggatgacctgggaaagggagtattgttagttttcctagcgccagcttcaatagggattggggttatttaaaaatacaggagaaaaataaggaggcgctcaaaaacaaaacacaaaacccacattgatgggggtatgtcaaaggggggaacaggagataactgaaagagttcccaatggtcaaagctgggaaaatttgagcaacaaaataaagtagtattaaattgtaacccaaa

SEQ ID NO: 588396 - DNA, 4001 bp, Homo sapiens
tcgctccccactcccacctggctctaggagggccctgcggagttggccagggaactgggcgtgggcgatactaaaaaaactggtgaggtcccctctccgcccaaaggggcagccagcgatgtcagcctagagccctctgccactgcctgatacctcagcagggccgacgaggccgacaggtgcccgcccagcaccgcgcccttggtgggagcgcagccgttggcgcagtcctcctcctgatgctgctgctattgctgcaaaattgtccgagcagcggcggcggcggacacttgcagcaaaggggcagcggtctggggatgcaacaggcttgatggtcgctggagcaggtggcagtagctccacgcggtcggggacaaactctgcgcagcccctgtacccgctcccctgaccccttgcataatactctcaatgctgaaagagatgcatccgcctcccggtggcgacgccagacccttgccctcctcccaaggctgaggaccaagtgagggctgcagcacgggaagggtgccggggtcgccagggccgcgccttctgctttcttcggtgccccggcatagacgggggccgagagcagtaggtagcgaagaggatgcgggtgcagcagagcgtaagggcgtctcccgggggcggtgttggggtaggcccccgggactggctgcggcggggcaggggccccaagcagagggcctgggtgggggttgtgcagggcggcgtgtgcagcaggtagagggaaggggtggggcaggtgggctcccggggtcagttggtggcgcttgaaacgcttcctacgccggagaaagctgccattgtcgaacatgtcttgggaggcggggtccaggctccagtagttgcccttgcctgggtggcccggctcgcgggggatcttaacgaagcagtcgttcagcgagaggttgtggcggatgctgttctgccaggcggggaacttgcggcggtagtaggggaagcggccactaatgaaggcgcagatgccgctgagcgtgaggcgcttgtgcgggttttgcaggatggccatggtgatgagcgcgatgtacgagtaggggggctttgccggctgccgggcatcttcagaggccgccgcagaccttggcggtgccctgaacttggtgccaaactctgaggggtcgctcgggccgccgccgccctcgatgtgctctcggggaagcgcaaccccgccccaccgggccacctgcagccccggctggagcgactgctctaggaactgctggctcgccgcctcctcctcgtcttccacctcgtcttcatcttcctcctctcccaggacatcgattttaccgtcttccccatcggagtcccggaggctgcgctgcggtgtggagcgaaggcgctcagctcttggcaggttcatggaggagcaggtgcttcagtcgcaggggatgtggcgaccgatcacctagcctggggcgggctgagctggaagcctgggatgaatgttgcaagaagcaggaacgctagtggttaccctttgggatgttttcgtctgcttgtttctactcctttgcaacaacgtccggcaaagatgcctttgccttttataaaagcttcttcaagaccatgtgtggtggactcccccctttataacccttcttcccctacctcggagcggtgccacttcctcctaacgtagtccagggatgatggtcttctgggcaaacacccgtccggagaaaagcccagccccctcctcctcgcacccacctgccaccaaggaagatgctctactcatccggtgcagccagacagttggcaagcctttgcacgggttctgttaaggcgcatttaaacccgcgcaaataaaagcgaggtaggaaagtatgatactcaacattctatgaccacctcaacatgcagccttcccgcctggagaaaagaaatggtggggcaggaggctgaaatgtacacggttgtttgtaaaggaatgtgtaaccgtaaaagtatgtttttgtgtttcacagctggtaatcacccattttcattggtagagtctgcccttacccagaatggtgagctgaattatatttaaggttctgacaatattcccaggcttcaggggggtgttgctttgctccttctaccttccttcccacctcctcaagatgctctccctgactcaaattttcagaaaaggctcaaatgtcccagcactaaattgtgtaagtttactcagggaaggcaggagagctcacacggagtcctctgtccccttgtagcaatggttctccaatttctttgaatatttaaccacagaaatacattttatatcacaatctcacacatacagacataatacataactaagatgggtttcacgaaacaatatacttacactatagtgatcactgatatttccttttaaaaaaaaatggccataaccaactaaattgatttcacacataccagtatgggcccagtttgaaaaatcctgttcttacaaagtggccccacatacaagaaatgcacccactctataagggcttctctctctccctttcctccttcctttcttcatcctttataaccaattcatttttagagacagggtctatgttgcgcaggctggctttgaattcctgggctcaagtgatcctcccgcctcagcctcctgagtaggtgggactacaggcgtgccactatgcctggctctggctcttcattcttttttttttttttctttttttttttttgagacggagtcgctctgtcgcccaggctggagtgcagtggggcgatctcagctcactgcaagctccgcctcctgggttcacgccattctcctgcctcagcctcccaagtagatgggactacaggcgctcgccaccacgcctggctaatatttttagtagagacggggtttcaccgtgttagccaggatggtctcgatgtcctgacctcatgatccgcttgcctcagcctcctaaagtgctgggattaccggcgtgagccgccatgcccagcctcttcattctttcagaaatgtcaacattaagtgcttttactgtaataaaacttgggacttcaatgaggcaagaaggggctgcagtgttgcctttaaatcagtgggtcctcattcactatctgcactggggaggggcaatatgacagcacaactgttcatctcactccctccacatccttagaagtaacacgatttttagattggcttcatgaaaattagctcagagactaaagtagcactacagaggaataaaaaaaatttgttatataaataagaatcttattaaaatactaagtaagatactatgccacggtatatattcataatttaaaacccacctacttgggaaaactttgaggtgccatctaataaaaatgcagcatgaaagaatattatgcccttgatagtcacatagtgtctataattatgacaatgaatgttcagtgagaaatcaaacgccaactgcaagggcaaaatataataaaaaatagcttaaagtagctagtgccttcaggataaaatctggaaaagagctttcttgctgatctttttttgaaactttgctgctcctgaagtttttaccctttaaggctcctcagtttatatgaagcttggaggacaaataacagacaggtttgagcctaacagatttgtttgaatcccaaatttaccaatgactgcttgtgtgacctactaaactaagctccaggagggccaggccaggtgtcttattcaaccacataatcccagacgcctcctccccagcgccccccagcatgtgaggcaaatttcctccatcagcataggaatcggatgacctgggaaagggagtattagttttcctagagccagcttcaatagggattggggttatttaaaaatacaggagaaaaataaggaggcgctcaaaaacaaaacacaaaacccacactgatgggggtatgtcaaaggggggaacaggagataacggaaagagttcccaatg

SEQ ID NO: 588397 - DNA, 4001 bp, Homo sapiens
gtgccagtccaagggctctggctgcctcgccccacctcctcccgtttacagagtacaccgggtgcctacgctgtgcgcggggagaccgagcctctgtggcctgctcggtcttttccacgtgggtcccagttgagtcctctctccattcctgttcgttctcagattgcggggaacgtgtgaacagccgatgtgtctatgagttttcgtccctacgctggctcacatggcggacacgaaccgatctatcccaccgggataagcggcagcatggcgagcatggtaggcgcctgcactggcccctccgagctgcccgccagggttgtagcaggctcccagcgctccgaactggccgggcgacgtgcgcccgtagaagtccaccgtggtctccacgccgccactgctgccgcccgctgggggcgaagcgggtcccgccaggcggccagcagcggcaaagatcgcactgccggcgccctgcgggtacgcgccgtcggggcccgcgtaggcagccgcataggcggaggggttggccggccgggccccggtgcagcctgcgggctggtagccggtggtggtagcgggggcgccggcggaggcaaaggcgcaagagccgccgggccccgacggtgcgggccccagctctgggctgagcggccgctcaggaaccaggccgaagacgcggcaagggccgggcgacgccgcggggtagtagactggaggcggcgcggccagcgacggcggcgcgtagcctgcatagacggcgcccgggtagggggggcgcgcggcgggcaccgcgcctgggaagatggcggcggcggcggcggcggcggcggcggcggctgcggcagccgccgcgtcgtgcatgtaagccgggtaggtggagaggtccgagcgcttgaagcgcttgcggcggcgcaggaagctgccgctctcgaacatgtcctccgcgttggggtcaagcgcccagtagttgcccttacccgggcggccggcctcgcgcgggatcttgaggaagcagtcgttgagtgtgaggttgtggcggatgctgttctgccactttttggggttgtcgcggtagaaggggaagcgctcggtgatgaacttgtagatgccgcccagcgtgaggcggcgctcgggcgcgtgcgcgatggccatggcgatgagcgcgatgtagctgtagggcggcttcccgcgctgcagggggcgcttgcggcgccgcccgcccgccccgcggcccgtggcctcccctgggaccccggcccctgctgccgtctcgccgcgctcttccttcacggtagccagcacctccggctgcggcggcggcggcccgctctcggcagtcatggcgcgggcgtcccgcacccccgggctctggatccccgcggctgtcggggggcgggggcgggcctggcgtccccggaacggacgctcggcccttctgcggagagctcaggggatcgtcgcgggctggccccgagagcccagcggcccaggctggcacgcgctggaggctcagcgtccgtggtctggggctggcgcggtgcagacagaggctcgggagtgacccgctagccgacggctcagcccgcgtggtgcttctcgaggcgggcagcggcggtggcctcgtgaccgggactggactctggtctccggctgaagggtcccttgcgcgctggtgccgggcggtcgaggggtccggaagtgatccctgggttggggtggctgcagctggtctgtggtgcccgctagtttaggattactgcctaggttgtgcgcgcagaagaggcttcgggctcgaaggccagagcgagggcagttagtactggcgctgggcgatctggcgggggccgcccatgccctgcccccgaggccaaggtggccgtaagcgccacgggcagagaggcgaggcgggggcagcgaggtcggggcgcgggcccaggcggggcgacctgaggctggtcctctccacggcgtgggtctccagccctgcggaccgctggcgaggcgctcccctgcacacaccggaccggctcctccctccgccggcttcccctccttaaaggggccacgaagcgtggggcggcaccggttccctgcccgccccccgactgcccgccccccggggcccgggcgcacctccccaggtaggagcagctgtggcggcgcggtaggagccccacagcgtcagggcggggagggcgcttggagatcccccgggtcggccccctccgcaccccgatcgactgaggcccggagagttcaggaaccggctcgggagacctcagcgcccgaactcggagttttcggacttttcaggcctctgccaagggcttggactcgcaggtgaaaggacgggctcatctcacttttttgtcctgagagggtgagaattggccgagagggcgcttggtttttgtgggaatggggagggagaagttccaggagactggctccccgggcctttcaggatggtttccaaaccccaatcgtggctgccacagccactcggcactccagtccccccatctttcgaatgagtattcctaggcccgaaagggaaggtgacttgccatggccccactgcggcttctccgcttagcggagtctccaacctgcgtctcctttaggactgcgcttcccaactgtgtggtagaggtagccgctttccctttttgggccccaggtccctcgactgtaccggggtctggatctctcaagagtccttgcgtggtagatatttagggataggccaatcaccacccccaatcatccgtctttgagaggcccaggatctgtctctatttgatggatagtggtgcacggattaaagacgacgcaggataggtaacctcctcctccaatcccccgggaccagggtagctctgaagacccccagaggcagccaagcagccccttcccgcagcggggagtgagggctgcgggtaatgggggagtgggaagagagcggtggccgggtgggcgcgtctccgggggaaggggcgggcagtcgggacacgtttgcttcatgggtgtccaatttctgagttcctttcctgctgtccctgagccggaacttggtcctaacctgagatcctcgcggcgcggcccctctggcccgggttcgttccctggccattcactgggagatccagggcctgtccttgtcccctcgcagggcctcagtgttctactctgttaaatagcagctggagggcgtgtgctgatctccgaggcccctgctacgtataggattccgggccttggcgcgggttccagtggctccagcccggacgcagctttccggggtggggggggggggcgggccggggctgtgggtgcagagccgcgcggatggtggtgccaggtgagtgtgggagatcccaagacgagagttctggccagtaacgggtggcatgccttccagggttttagtcgcgttcttcgtggcggtgagctgagggcaggctaagcccggccaagcgttgggcagctgccttcggaagagcgaggcaaagcccagatccttgctccgtcgacccggtgtgtggaaacgctcaaagcgtttgcttgacaaccttctgcggcagagggttggtcgaacgaagggagaggggctttacactcgctaaacaaaactcctggtttccttcttcccaagtaatggagaagcaaaaaacccagatttcgtcctgtttcgtttttacaaaggaggaaaaacttcaaattttaaaatttttaactggattatattataggcaccttttaatacgggatttcgtggctctcagtaactttcaagattctgagattcagatatctagattttaaattctggacgaccgttgtcctaacgtgattccataaatctaaagaatgcgatcctgcgatcctgcgaccctgtaattctaagattccaagactgggagtctaactttgactatgcttatattcctttgacttaagcttctagtcaaagtctaaaaacctatgtattaagatactgg

SEQ ID NO: 588398 - DNA, 4001 bp, Homo sapiens
caccgtggctcacacctgtaatcccagcactttaggaggccgaggtgggcggatcacttgaggtcaggagttcgagaacagcctggccaacatggtgaaaccccatctctactaaaaatataaaaattagcctggtgtggtggcaggtgcctgtaatccaagctacttgggaggctgaagcaggagaattgcttgaacctggcaggcgggggttgcagtgagccaagatcgtgccattgtactccagcctgggcgatagagtgagactcagtctcaaaaaaaaaaaaaaaattaaaggttgccataaacatgggccaatatggtaagtgctaactgaatgtttattgaatgaataaacactgggcagagagacatgcagctgacctcctgggggtgaccctggtcctgaagcactggctggttccatagccccccagggtccattgggacacagacaccacatccccccacaagccagtacctaaagaatcccgtcttcaggccatagcttcggaggatacattccgtgaaggcacaggtggagcccttgaaagaaaagggattgtctgggcaggctctactccaccagccacttaatagaccccctaccccagggtcctgcccctcaccttccccttcgtcccagtgacgtggatgatgttcagccggtccaagtcctccacctgggacagacagacaaggtccctgcctcagctacgggaatcacaaatgggggtgggaggtggtcacaggccctctctaccttacctgcagcccactccgtgccaggtacagttccatggcttccaactgtgtctgagggtcaccccgctggcgcttcacctgctccaggtagccggcattggtctgcagggtattgagcatgcgcacggcatcctggcaaccacagtgcccagatagtaggttaaggctcactcagggtccacaggcacagagacagccagcagaccagtggccaagccagggcaacaaggccagtaccaggcccgcctgccatgccagcactgttagcctagcctgtaggttaagcaacagagagtatggcatctttccagctctggcaaaaatgggagtctggggcagttcagccccacccagggagtgctacacaaagaaggtggcatgactaacgggctagccttgcttcctgcccaggctcccccgacttcactcctgggcctttgccctcattctctccaatggggtccattgctatattgctccctgccagagcggggccagaactacagaaggctggggtattcgaattctggagttccccgaagctccaccccaaccctcatgactctggggttccacattccaacccacagaggagcaactcagagggaggaggggtgtgccaggggtcactcagccaggaaggcaggtaggtacggcttcaggagggttcacaatggaagtgggagtgggggtgctatttcattccccttaggcctcatattccgtgcctcccaccctcaggacctcaaggctggttggaggctccaccctcatcaaaccagtgccacccgcctcactggcatcagggtctggtctagggcaaccggctcttgacacagcgcccgcggacattttctattttccaggttctggggccctccactacccctgattcctgcctctcccccaaatccaggcacttggatccccaatcttctgaatcctggacagcccacccccagatcaatactcctggatctttcaagcctgaattcctgagtctcttccctaccctctttccccactctcactgccggttcagactccgggatcactggaactccagaagcaccgctgagcctctgggcttctggatcctagctcctgtgccacttcccacttcccaacccggggcggggacgctatagtctccgaattcccagccccggcggcccgggcccaacttcctggtccctgtccccacccccagcctccaggatgttccgccccccgagtcccccagtccagggctcccgataccctctcggctagcggagcccggatgttctgcggctcagcgcaggcccacgtgtcgtcgcgcccaggcccgctggcccgctggcccgcctgatacctggtactccatgctcggctcctgcggcaccggccacgcgctcaagccccgccgcgccgcgacctgggtcgttatgccgcgcgcagacgccgctgccaggaatagagcggcgcgcaggtggctccgcgcccgcgacatagtcccggcgcccccggcagcgctctaggcccgggcgggagacgccccgccccgcccccagccaatcagcgcagcgtcgcctcaccccgccccccccgccaatcagcaccgccccgccccgcccgccatcaatcagcaccgccccaaactaccaccgaccagcccccttgcgccactaaaaagccgccccttccgcgtgcaccatcctggtgaggggcaggcctcgggaccaggtttatgagtgtacgctccggggcgtcccctcccttagcgggcacgcactcctttcgtcaccaacctcccaaggccccccgcagcacgtcccaaaatagccggtccgggtcagcagccctcagtctctgccccgaacagggataggatgacaaagctgcggacacctggtggacacctctaaacagctgctgccgtttagagaacggatttgagggccacctggggatggtggggcagtaatccttttctgtgaggaggacacctatttgtcgtcctggagttttcagagctttttcccatctattagcttcttggccccaactgctagcatgaaaaagttgcatggtgaaatccttttgacagctgaggcccagaactggggaggaggaagctgcaaacaacccactacggaaaatcagtctgataaaaggcagcccttcaaatgattgatggagtttccgtacctccttcccctctccctcttcccagcattgggagaaaatatttatgagaaattgtttgatttcgaaataagcaagtgatgttttgggaagagtctgtcattggctggacttctgctcttcacacactgctggggtgccccgaccctggccccatggcagatagagaagttctttcttggtttccttatttttagtcattgaaactttctctatacatatgcatgtatatagtttaatgactgcataaaaataatcaagagactggacgcagtggctcacgccttgtaatcccaacactttgggaggccgcagcgggtggatcatgaggtaaggagttcgagaccagcctggccaagatggtgaaactccatctctactaaaaatacaaaaattagccggtgtggtagcaggagcctgtaatcccagcactttgggaggccgcagtgggtggatcatgaggtaaggacttcgagaccagcctggccaagatggtgaaactccatctctactaaaaatacaaaaattagccgggtgtggtagcaggcgcctgtaatcccagctactcgggaggctgaggcaggggaattgcttgaacccaggaggcagaggtttcagtgagctgagatcacaccactgcactccagcctgggtgacagagcaagactttgtctcgaaaataataataataataataataatcatgaggctttaaatatttttattttgcttactcccttcccccttcccccatacacacacacacacacacagttcctcctctggcaatcctgttgacgactaagtatgtgtcccatagttttctatgctcatgaaaccagacacacctagacatctatagggtcttgccaatgcaggtgacaatatttttgcatcttagcttttcaaaaatgtttatttttagagacagggtcccaatctataactcaagctggagtgcagtggcacaatcatagctcactgcagccttaaactcctgccctcaagcaatcctctcacctgggcctaccaaagtgctggaatcacag

SEQ ID NO: 588399 - DNA, 4001 bp, Homo sapiens
taagtgctaactgaatgtttattgaatgaataaacactgggcagagagacatgcagctgacctcctgggggtgaccctggtcctgaagcactggctggttccatagccccccagggtccattgggacacagacaccacatccccccacaagccagtacctaaagaatcccgtcttcaggccatagcttcggaggatacattccgtgaaggcacaggtggagcccttgaaagaaaagggattgtctgggcaggctctactccaccagccacttaatagaccccctaccccagggtcctgcccctcaccttccccttcgtcccagtgacgtggatgatgttcagccggtccaagtcctccacctgggacagacagacaaggtccctgcctcagctacgggaatcacaaatgggggtgggaggtggtcacaggccctctctaccttacctgcagcccactccgtgccaggtacagttccatggcttccaactgtgtctgagggtcaccccgctggcgcttcacctgctccaggtagccggcattggtctgcagggtattgagcatgcgcacggcatcctggcaaccacagtgcccagatagtaggttaaggctcactcagggtccacaggcacagagacagccagcagaccagtggccaagccagggcaacaaggccagtaccaggcccgcctgccatgccagcactgttagcctagcctgtaggttaagcaacagagagtatggcatctttccagctctggcaaaaatgggagtctggggcagttcagccccacccagggagtgctacacaaagaaggtggcatgactaacgggctagccttgcttcctgcccaggctcccccgacttcactcctgggcctttgccctcattctctccaatggggtccattgctatattgctccctgccagagcggggccagaactacagaaggctggggtattcgaattctggagttccccgaagctccaccccaaccctcatgactctggggttccacattccaacccacagaggagcaactcagagggaggaggggtgtgccaggggtcactcagccaggaaggcaggtaggtacggcttcaggagggttcacaatggaagtgggagtgggggtgctatttcattccccttaggcctcatattccgtgcctcccaccctcaggacctcaaggctggttggaggctccaccctcatcaaaccagtgccacccgcctcactggcatcagggtctggtctagggcaaccggctcttgacacagcgcccgcggacattttctattttccaggttctggggccctccactacccctgattcctgcctctcccccaaatccaggcacttggatccccaatcttctgaatcctggacagcccacccccagatcaatactcctggatctttcaagcctgaattcctgagtctcttccctaccctctttccccactctcactgccggttcagactccgggatcactggaactccagaagcaccgctgagcctctgggcttctggatcctagctcctgtgccacttcccacttcccaacccggggcggggacgctatagtctccgaattcccagccccggcggcccgggcccaacttcctggtccctgtccccacccccagcctccaggatgttccgccccccgagtcccccagtccagggctcccgataccctctcggctagcggagcccggatgttctgcggctcagcgcaggcccacgtgtcgtcgcgcccaggcccgctggcccgctggcccgcctgatacctggtactccatgctcggctcctgcggcaccggccacgcgctcaagccccgccgcgccgcgacctgggtcgttatgccgcgcgcagacgccgctgccaggaatagagcggcgcgcaggtggctccgcgcccgcgacatagtcccggcgcccccggcagcgctctaggcccgggcgggagacgccccgccccgcccccagccaatcagcgcagcgtcgcctcaccccgccccccccgccaatcagcaccgccccgccccgcccgccatcaatcagcaccgccccaaactaccaccgaccagcccccttgcgccactaaaaagccgccccttccgcgtgcaccatcctggtgaggggcaggcctcgggaccaggtttatgagtgtacgctccggggcgtcccctcccttagcgggcacgcactcctttcgtcaccaacctcccaaggccccccgcagcacgtcccaaaatagccggtccgggtcagcagccctcagtctctgccccgaacagggataggatgacaaagctgcggacacctggtggacacctctaaacagctgctgccgtttagagaacggatttgagggccacctggggatggtggggcagtaatccttttctgtgaggaggacacctatttgtcgtcctggagttttcagagctttttcccatctattagcttcttggccccaactgctagcatgaaaaagttgcatggtgaaatccttttgacagctgaggcccagaactggggaggaggaagctgcaaacaacccactacggaaaatcagtctgataaaaggcagcccttcaaatgattgatggagtttccgtacctccttcccctctccctcttcccagcattgggagaaaatatttatgagaaattgtttgatttcgaaataagcaagtgatgttttgggaagagtctgtcattggctggacttctgctcttcacacactgctggggtgccccgaccctggccccatggcagatagagaagttctttcttggtttccttatttttagtcattgaaactttctctatacatatgcatgtatatagtttaatgactgcataaaaataatcaagagactggacgcagtggctcacgccttgtaatcccaacactttgggaggccgcagcgggtggatcatgaggtaaggagttcgagaccagcctggccaagatggtgaaactccatctctactaaaaatacaaaaattagccggtgtggtagcaggagcctgtaatcccagcactttgggaggccgcagtgggtggatcatgaggtaaggacttcgagaccagcctggccaagatggtgaaactccatctctactaaaaatacaaaaattagccgggtgtggtagcaggcgcctgtaatcccagctactcgggaggctgaggcaggggaattgcttgaacccaggaggcagaggtttcagtgagctgagatcacaccactgcactccagcctgggtgacagagcaagactttgtctcgaaaataataataataataataataatcatgaggctttaaatatttttattttgcttactcccttcccccttcccccatacacacacacacacacacagttcctcctctggcaatcctgttgacgactaagtatgtgtcccatagttttctatgctcatgaaaccagacacacctagacatctatagggtcttgccaatgcaggtgacaatatttttgcatcttagcttttcaaaaatgtttatttttagagacagggtcccaatctataactcaagctggagtgcagtggcacaatcatagctcactgcagccttaaactcctgccctcaagcaatcctctcacctgggcctaccaaagtgctggaatcacaggcatgagtcaccatgcctggctgcaacttaactttcttactcaatgacaagcttattatttttttaagacatttacttagcaaacacttttttttttttttttttgagatggagttttgctctgtcacccaggctggagtgcagtggcgccatcttggctcactgcaacctgcacctcccaggtttaagcaattctcctgcctcagcctcccaagtagctgggactacaggtgtgtgccatcacacccggctaatttttgtatttttagtagagacggggtttcgccatgttggccagtctggtcttgaacccctgacctcag

SEQ ID NO: 588400 - DNA, 4001 bp, Homo sapiens
ttccaccgatacaaaaacctctaaaactaatgctttcgtagaatgtataaactatacataacatttttatgtataaattttatatacatatataaattgtatattttctttggaagttcttttttaactagagaaggtatggcatttatatttattttacaaatctggcagatttgactaacaatccctttattctttgtgaaatgtgtcttgtccttcagggtttgagcattgatccttttgagcatgaagaaacctgaagctattagatagtgtgaaagcaacgagtcaaccagcctgcctgcgaccacggactcagggagggcagttagacaaaaagtaaaaagagatgagtttggctgagtactgatattgctttgaaggctatgctgaagttttttagttttctaattatctagttaataagactgttgacaaggaaaatatatctgatttgatgcaaagaaaaagaaatctatgtccaaaaagttaaaattgctaagtgaaatacaacaaataaagtaaattttgacatttcacacacctcgacttgtaaagaatgaaacctcatacatttcccccacagcagcattttttacaccttgaataaaggtattcagttacctttagaattatagattgagcaaaatcacataattttctcaaaacaaaccaatcagttttcctttcataaaattaaacctttgataagtatatttttaacaaattgggcaatttcattactggatcatgaggcatttataaaaatcaattatttattaaaaaaaataaaagaggctggtgcagtggctcacacctgtaaacccagtaccttggctggccaaggcgggcagatggcttgagtccaggagttcaatatcagcctgggtaacatggcaaaaccctttctctacaaaaaatacaaaatttagctgggtgtggtgcgtgcctgtagccccagctactagggaggctgaggtggaaggatcacttgatcctgggaggttgaggctacagtgagccatgaacgtgccaccgcactccagcctgggcaacagacagagaacctgtctcaaaaaaaaaaaaaaaaaaaaaaagaggaaaggaaagggagggaagggaggggagggaggggagggaggggagggagggaagggaagggaagggaagggaagggaagggaagggaagggaagggaagggaagggaagggaaggaaaggaaaggaagtcaggcgcggtagctcacgcctatagcttggacactctgggaggctggggtgggtggagcgctcgagctcaggagtttgagaccagcctgggcaacatggcaaaagcccatcttaaaaaaagaaaaataattttaaaaaagaaaataaaggaacctagaaaaatatgtctgttcttcaaactttttacttagtcaccttcacagtttcaaaagtaaactgatatacatttttaggtataaaattatgctttatttctcaggcagagcctgagaacagagttatgcctttattctattgtttttctgttactttttcatattccccccagatcctatcatctgacccacaataaaataggaaggaggctaggtgctccctcagtgcctccaagttccctttttcccattttccccctccagaaatatgtttcacacctctcattctaccctgtttcacattaaactggctctctgttccttaccagatccctgtatcaagtgtgctctgtggagagtgttaaatcagccattggtaccttagcgcaaatataagccaaaggacgtgtatttttagcattagcattaattgtagagctatagacattgtgcactattaaaagtatgtcaaatatcagcagagaaggaagaagaaagaaggggagagatgggaccaggagcaacaaacccaaatgcaagcttgagtgagtgccagggactccatcagaggcggccatcttgaatatctaattctgactttcctccctgcagactgaattgcaagaatgcctgacggggtcctcaaagctcatctcaggacggccacatctactcgatgcgtgcatggcctctgtgaggtcaccgcagttgtcttatgatccaggctgtccatctcaaacccctccctgctggaagatcgtgatctgcccacgttggaaacaggcagcctgccatcagacagatgggagtgagggcacgcgggccacagaccacagaagagtaagaaatatgttttctgaggccagcgctcctatctgggacaccaaggcagctgtcagtgctgacctaaagctaataggccaggggtgaaaatgatgcaatttctaaacatgactggatcaaataacatcattccactttcacaagtaacagtgcaaactactcacaggcagagagacatcatcagagagagggacagaatgaatggttacggttgagttcccagtcaaaataaagctagcagtacacgtgaaaaaaggtcagtgctgttcatgtctggaaaagctgatcaatcagatggtcttccaaataccccctcccctaaatcctccaaatacattctcaatgtttaaaaccataaagccattgctatgttggtatccattctgaggtgaagaagttggtggtagcagctccttctgtggatccattttgtttaatttcccttgttacatccccctgagaagagatgcagccaagatgaccaccgctctcatgaaatttggggaataactctcagatttgactggggtgcctgcctggtctgatttcaccattaccacggtgctttcaagctttctgcattgcctggcaatagagttggctgaagaagctgccatctgtcatggcatttaagagataaaaatggaatcataaatagcgccagctcctcagaaaaaaaaaaaaaaaaagtccagccggcatgtcaaaatggaggacattagcatgttcttttagtacccggctgccagcagctgaagtcagcttgctaatcactcggtgtcatctgtcctagaacatgctgccaaatctttcttccaggccagcagcaccaaacaatgcaggagaaatttatgattcacaaaatatttttgcagaaggtaaaatctgactattaaactcccccatttaattaatgctgccatagcttacattaaaaatggaagggggaaaatcctctgccacagaatttatctcttctacccagccaaattccttgccaaatttaacagcaagcaacataaatttaggtgattagattggttgcatatatttaatttttaaaaagcaccatgatcacactttcattaaaacaggctttcagctttggtttagcgccacttgacaaacaacatagcagtccgtgattgggttagtgaaatgacaagattaaaatttgggtcttgggcagacgctaggctcttccattataaatatgtaaaactgctggccaaatatcagaatgacacattgaggaggttccttcacacaaatgcatattctccacaaatttttggtacaacgaggtataatggaaagaaccttctactggaaatgagctctgagccccaaattcagcagtgatactcagttatgtcagtttaggtgacttcctttgcctcttggaaccttggttttctcatgtgtacaatgggaacactattgcatctctcgcaaggtggtgtcataaggcttaagaaaaataacatataaaaaaagtccaggacattctctggtgcattgcaggtgttcaggcaatgctagctttcctatgtgtaaataagggattgcaccaaatcaatgcttttcagcctttattgtttattttctccctaaaaccttgtttcctaatcttgagtaattgaaaccatatttttgccatatgcctgtactatgtgtactcttattatttactagttttctatcaattcaatttttaacttgaatcaatgtatttaaaaggaaaccttttaactactaaaaactgaatacttg

SEQ ID NO: 588401 - DNA, 4001 bp, Homo sapiens
caggaacagcgggtgtcagttttccagagcagaaacctgaagagcattcgaatcactagctctgttctgtgaagcagcaccacagaggttaatctctccagtaagattcccaggctataaacaccaattggctcccagaaatgctctttttaagctttgtaatgcacaccaagcaacaagactgggtgcaatagtttaaaaaaaaatcagaaactaaaattaaataccttaaaaacaataaacaatttccataagccaaaaattgtttcctggatttcaaaataaaatgaaaagaaactctttacaacagcaccaaagtctctggaccaaatctcagtactgagcagagagagcctaaaaatcagtccaaaaacttcagaacaaggccatttctttgcctccccagcactatctctcttccccacaatgaaacagaaatcatgtttttgaaaatatgtctccaaatataactaaacttaagcaaaggtatccagacattatctcatccaaatttctctatgtttgtaccatgaggatattatctgttctgttcatttttgtgtcttttccctttgccatttcatttagctgagaagaaacattctaatttcagaggaaacaattacacagttaaaaaatggttatttcattggcaagtgccagcacggatggactgagaagagttagaaatttgtgtcacgtaataaaaagaatctcagttttggcatttggtttgttaacactgcaagttgccatcttctgagttaacaggagagttaaacttttgcaagcctactcttgcagatgctttgcattgttacttggcattaatgatatcacacaaacaatctctggggcattctgctaacagaacattcacagtcacaatgaaaagaaacacataaaacagatacttacaggtagtggttttcctttccaagacaaaaagttagaaacccttggaactggcgggcaggataagagtcactgacacagcaatctggtttaaagggctttgagaggaagggggaggaaaaagaaccccgggaaggaagagagctgaaattccagtctttcaggtcagctgtgtttgagatttctttttactaaaaatccattaacccacctcacagaaaatacagaattgaagttcacatacacactccactttctttgctggtcttctccaaggcagctgctgcagctttgcaaacttcctgagcgccaagcctcaggactccctgtgagaagggcatgataaagatgccttctactgtttacacagagcccgacctccctggcggacagccaccgctagccccgtgccttctgctggttgggtccgcagggacaaaactgagcttttgttaatgaggtcggttgcctcttcccagtctcttcccagcttcctttctcactactagttttgtactaactgctccgccactcgccgagccagagcagcctctcccgcctgcagcacacaggcacacacacactcagacacaggcacacacacattcacaaatgggcacacagtcacatacagacacacccactcacagaggtacacacacaggcacacatacaaacacgatagacacacaatcaccacacacagacacatacacaggcaaatgccttcacatgcatgcacacatagtgacccaccccacacatgtgcatgcattctcacgcatgctccacacacacacgggggcacacacatacgcacaggccgcacatgcccacacccacacatgtacatactcacacagactcttccaacacactttttttctgcccttcttttcttccaacacattcccatcttcaaaggtttttatttaaatttagatgagaagcccagcattcagaagggacagggcccgttttaacttttgtcatggcatttaagggaaaagataggatggaactagatcctaaggtgctgtttttaagtaccaccttagttcttccatttgtaaggctttttgtgtgtctggctcttttcgaaaacccataaaaatcccattaatctgatccatttgcatatagtgcgtgatcccaataatgcagatatatcactggccaagaactgtcctctcaacagagattcacatagttaacttgtcagtattcagtggtctgtgaaagtcttaatccttaacaactgtttaataaaatgctttcctgtattttattcccaccaggaaaaaaaaagataatggcctaccatctggccttctaaattaaccataaagagagaatttgaagtattaactcactttgggggaactgtttatattaagacatgtctggctatcctaaacctttgccaaaaatatagaacactgtgaatccaattcaacctagatgtggtttcccgtaacaaggtcacaacaccatatgcctttctttggaagccataaggaaaagagagaggaaaatgaaaaaggagaagaaaattacatgaggaaggaagaaagaaaagagaaaaatgtaaagaagaaaagaatgcataagaagggagaaaaaaattatgtattttaaaaacatgctttgtggttactttagcaatgaatggtgcatatacacttactcaaagtcatcggagatttcaaatcttcaagaatttcttgattcattttatttgctctgagaataagtaggtgaaagttaagaatcactaagctctttataagtgaacagatattatttactaaacacagttattattaaataaatatagtgacaatgtgtgagtcatatattaatcctgaaaaggcaagaaataaagccttaataatgacagttaagaaacacagcataatagacaattttattccccaactgattttcaaaattgcccaggttgtgaatatcttacctgcaaagaaatgaagatggttttagaagctgttagttgagactcggattccatttgacaaaggaattgtatactatgtacaaacggttgcatcaacatgcttattctaacatctaaataaggtttatagattagtctagaaactaataaggtttatagattagtttatagatagattataaagtttatagatagattaagagctaaataaggtttacagattagtctagaaacagagataaatgtctttatatcacttctatgggaaaaataacttaagcatgctaagcaaaaaataacaaacttagattgtaaagtatttcaaaaagtccgcaggagatataatctttccaaagttaattatatacatgaagcttggcctaactgtgctgaacatattctgaaataggcagttaagagttagatcagtcaaaatgtcctgaaatctgaagtacctgtttatacaaatgtcattccttctatctgccacaaatgaataagggcctggaaataatacaattatcaacttcaatcaataaaatactgtttgaacagattgaaatgccaagctagggaatttaaaaagaactagtcaaagaaacaacaaagaattcttcccctaaaagcatgtgctgctgaacttagtgctggcacaaaattcatttttaaagaaatcattttacttctagccctagttggagtgataatgaaaaatatcaaatgtgtgttggagattggcatatcattttggattgtaaatatgaatgatttttgttgaattgctgtagaatgtagcattctctgaaaggcatagccaatgccttcaccaacaattcatataaaaaattaggaatgtgcctattaaattttgacgatggcagcagacagaagtgttatctattgcaacgtaaagatagttttccactgagtctctaacactagatggccatgggaagcaatactatggcaagagaagaggatgagtccaggaatagaaaggttatacataccacaattgaaataataaacatgaaaacaaataaataaagaaaagcaatacaaacacctctgtgtaccagaaaagagcaataacacagccgatgagagggtt

SEQ ID NO: 588402 - DNA, 4001 bp, Homo sapiens
acggcccctccatcatctacacattcattatgggttaaaggacctgtacacccactttaggacttaaagcaaagtgcacagtccacactctctggatcacaagactattagtacatgccagatgcttctgtgcaacccttgtggcagtagaaacactgcctatcctgctaatccttttattattaagtttagcagtgctgcttagctcagaatgaaattcaagctcccccagaaaattcaatgggagcctactttcctgggagatcatggggcatcacattcctaccttgacacttgtccggctgtcaggttacaaattaattgcaactgcccccaacatgtcacacactcccactaacaaaaattaaataaaaataaaacagggaaagtcctttcattccttcatggtttgcacagcctagaggctgattcctactctgggagatgctgccccactcacctcccactgacatgggtggtgtgccctgtattacactaaaaaaaaaaaaaaaaaaaaaaagctcagtcccagagcctcaagactcgactagggtaggtgagaaaggaaatcccagagataaacagttaaatagatttagaagtcagaagttaattgtgctgagccctgacacaacctttcctgattgtgtgcgcaccgagtggggcatctttggggtcctggaagaggggctcccacctgcctacatattcacccacagcaaatatgcacacgcacgcgcaaccacatgcacacacacacctttgcacctcacactagctctcctgacagcccagaggcacttactacccgaggacagggctgccagcaaagctgccttctcccaaacaactcgccttctcctccaacttgggcgacagtgaatgtccaccaagattccacggggctcttttacccaggacccaggttcctgcagggctccccacttgctggcctcacaatcccttttcctttctccgaaacactcagacttcacacattcctttcgaggtagctccagtccggcgcagcgcgcgctccatccctcaaggctggcgcccagggcagcccggcctctctcactctggggaaacttcgccaccgccccacgcggagaactaaagaccaccggcggagggtgagggggaccgacacggagcggaaagcaggttccgggactgagggcgtctccggagcctgggcgcgggagacagaaatgagtgaacccagctgatgcatgccttctccacgtggaagaagggaggaaataccagtgggcgacatgcaggtgcccctctcagccctcggagctcccatctcctggcggagtagggcccagaggggccagagtccctccggaggcagctgccccgcgcccctagcccgggcgcagtgagacgcgcgcgcagggtgcacgcgaggggaaggagactgggcgcggataacgcgtgcctggcgcttgcagggcaccatgcccctccatgccaggataaggccccccaccctcagaggcctgaggaatcgaaatctggctttctagcagtcccccaatcccctccgggagtgggttccttgttctcgcatgcccaccgcaaaggccccccgccctgctcccggcgtgtgccccgcgccctcgcccggttccacgcgcacctggatgtggcaggagatctccgagtcgtccagcagccggatggtgcatctcatctcctggctgagcgatttgacgctggagctccgaaagtggatcattttcatggtcctcctgcctctcggcacacagtggcaggaggcgaacatgcaccgcggccgtggggagcgagcgggaggctcagggccggcgcggtgctcgcctgcgcggacacacacgctcgcacgcactgtccgggacacctgggcgcggctcagccccgggacatcggcagcgtcgggcgcctgcggacacacatgcccagcggccggggcgcggcgggcgggtccctccctctgttcgctcgcctccgcctcgccccctcctttccccgcctccttctgtcgcgcgcgctcgtgcgcctccctctgcccgggctcgctcgccgaggacgcccagagcctgagacccccggcgggctcgcgacgcactcactcccacgcgcgccgagcagctgaaggaggaggcggagggatggctggcgcggctggcccgggtgccctggtggtggcctgctcagtcgcagccgccgctgcgtcaagctgggcccgactgccttcctcagcctcaccgcctcctccctcccctggccgctgtcgctcgggctcccggttgtgctcgtcccggccccggctccccaacgcgctcgacagcgccctgctctgctcagctccagggacctggcgcgggtaggggacggagagcgatcctgacccacaccgccagggggattccgcctcgggaaaggattgctgggcccagggcgagtgacagagagagtgacagccctgacacggctacaccaggaatatcgctaatagtaaaaatctctggtactcatggagattgtttaagccattgttttatttaatgctagctaggactcagtctctttctccaaaaaagagccttccatgtgcaaatcctcctttaaatctcccaacatcttagtgtgatctttgatagcatacctttgacccgagcaagagggataggttcctatcctactcccctgctttacagacctcctccagttcccggttgctcaggaattaagaggtctaatggcaaagcggatgtgccccatcccgttttagtccaatctctgggtattgaggactctggaattccccacgcgcctccagggtgttgaaggtaggaggtatcctgcctctctgttgtccccaaggtggctagagccactgtgtcaggtaccgtaggcccgagagtggccaggagcagctgttgagtcaggggtatggagcttgaatgtgagcactagaatgtccaggagctgggagagatggaagtcctctcaccctgttgctcttgccggagcagaacaggtcattaggaaggaacatttgttagaagaggaggtgttgaccagctgtcagctttttcaaggtttgtgcctgcatagagtcccctcatccaaagatatgccctgtcctgggggtcgaggaagagtggcacacaaattttacctgccctggacagtctggtgggccatatattctctaggacacctagtggggttggctaaggtttgggggagtccgcattgcatttggacttctctctctgcctgctcctgcctcctctccctgttgatcactaataaataccacacaggacaaactcagtctcagtatctgctcctggaaattccaaattgcaacaatttgtcaagataggaggatagagaatgttttatgtagcactcaatagctgactattgcttatgaatatttagatgatagtatggggcattcatgtaggctcttgagctgggcccttcaaatgttagggcagatcctgatggagaggtcagtattgagggtatgggaagatgtggatttcattcttggcccagctactggctaatcctggggatctttgaaaagtctctccatttcttttctcatttcaaaggagagaacacctgttcatcccacaggtggctgggaagctggtatgacaccgggtcagtggaggacatcttacagctgtaatctgtaaatccccatatgcacatatgaggtggcagggatgggacctgccccaagttgaaaactggatcatctctgctagccaaaagagcagacagcccagagatcaaagaaaagtcaccagccaaacagtccatgcttttcttttaagaccacacacacacttgtccatcctattatagtgaccgttaggctccaaaagagtcatatcaatacccaaaaattgttaccccaaattccaaggaagcaaaataagaccaacaaggacagtagtgaaaaagacagaataaagataacccaa

SEQ ID NO: 588403 - DNA, 4001 bp, Homo sapiens
aatctctcagctttaaagtcagtagataatagggaagaaagtactagaaactattgtttattttccattgaatcaattggagctgtatccaactcattaaaaaaaatttaatttgagaaagtcttaatcatgagctttaaactgatcaacaacaaaactcacaattaggctctttagataaatcaggaagtgcctgcaaggacccatctacttagactgttctgggactttcaacaagaagtagttaccacttggaatttcctcatctccgttcacatccaccaacagctgggcttcctgcagcacctgggttcatcaataccccataacaacatgagcaccatgagcatccagtccaaggggagaacaaaaaggaacaaaataagagaagacaagcattgctatcaggactctggaattcagtctggcccctagtagccttccctgtaactaccaagggatccccgagggaagcagaactcctgtctaggaaattaccatgatcagtagaggtgggttaggtttttctgcattttacttcttcaagaatttgcattttggtttagggcaaatacatcaaaaagacatgatgctcttcttctggcaacaaagactgcctaccagggtgggaaaactgttttgtttcaaatttctgctgtaaacagaaaggctagaaagccgagttccacgatctcgctaagcccaaagtcccaggtttcagttgcaccttttttgctacacatttctaagaaaggaatctcagtatgttcatcaggaaaaatagcaaatttaaacgccatgtgctgagcgtttgcctaacagacgctgcattccaccaagtcactctctcagagccaacctttctaggtaccctagaaaagactgtgaaggaaatgtgtaccagctggtgcaggcaaataatgagagctggaaacagtgcctggaggtgtatcatttcaaaacagacctctgccatgttgaactttaactgtgattccctgtgagcagtttagaattcggcaattccaacatctttctaccttcttgcacctgtgtataggtcatgtgtgggaggttaactacaaaaggtccagttgctcggtaagtaaggcaaagatggtgaatgtttgggagaatgtttaaaatagtacaatctggaacacccaaaaagatgctggttctgccgaaataaacaagaggagctagaaatatcacattgcacatcgacaggcaaggctccacctaccttttccctcactgcaaataagtaacagacacccagacctaggtctgacagaggaactgtcagccttgcatcttaatattgagcaggctcttaaaacaatcaaaagaatttcaaatttgttaatcctttggaaaaccaccaaactatttgctatgcagataacagaaaacattcatggtaaaaagatttctcttacaaattatggagaaaatggcaggtgttatccaaaccaaaatacattgtctggccaattttaaataattacatcttgatcttgacctcagcaggaagcccaggagttgagggctgttgtctgtgctttggtcaggaaaggaaccaccttcagaaccattattaccaaagggatttggagaaatgttcctctaaggggaaagataataaaacagagagctctggtttggtttcttgaaaggccattaagtggaactaaaaggctcctctaagatactggtcagaagctctacaaaagagaccctcccgaatttcacatccccttctaatttgtttcagtgaaaataattcaaaacattgcatagtaactcatgacatgcattatgttaaataaaagcgtacctgagttgattacattttagctgactgacacatacctttgaaagctgcataagcaggtctccttgtgccttgccaagacaaaaaggatttgcagtgccgtgatctgctagtgccttaaaatactgccatctcgtcttctgtctctgggagctctagggctccaatctaagctcgctgcagtttgaatactgcattgtttacctatagaaatcttgctgccaccaagatcctatttcctaatttctgtcacagtaaataggttgatggttttttaaaaaagttacaaacatgagatgcttttaattgttcaagaacctgctggatattaagatgcaagcttttctgtttctctatcagacaacatcagacagggatggatcatacttaggcctcactcccagctatccttaggaaaattctaaaaaaaaaaaatcagtgggaataaagacatcagccaaaaaatgagttcattgttcataacatatcttgttagacaacaggctacagtggcactgcatagagctaagcccaattgattaaatatggatatataagttgattgaatcaattctataagaaattaaattacaggttttatattcatttgaaatcatttctgtaagaaattgaaagatagattcaaggtcagaaaccattcctttcttacaaactttatctgtataagaaaatagatgtgacttaagtcattctatttatatgtcttttctaggtatatcacccacaaaaaccaaaacaaccacctgaagctgcattctcaaattatgttaaatgaatccctgctatatggagagaagtaaccaagccaggaatttcaggtgggcagatttcagaagcaaatgattctggaagcacatgagagcagtaccacaaagagcagtacagtgaggtcaattgagtcggacagaacttcaggttcctaaacggttcatttcttctctttattaacaataaggaattaattaggcttatggcccagacaagtcaagtactgctagatttagttctcagctctgtcactggctatgtaaatccctactgtcccagattcctcagaatatttgaggcttggtaagttgctcccatccttcccaatagcaggattagtaaatgtgtccgtggaaactttatggcaattaacagaaaggaagaatacagcaatttatcaccatagacctttgctcagctattggagaaggggaggactagacagccctggcaacatgggatctgggaggagggtggagaagagcagggaagctcctctttggggccaagcccatgagagcagccagctagccatataatggccgtggctttgacttccagctccaccttgaaacccagacagtatcatgaccaaatgaatgtatccaaacactccagtcagataaaagggatcagtactggaatgctcagagctgggaggcagctaccatgaaagctaatccaggcatgctgccccaatatgttctacaaatgcccaactacacagtaaagcattcaaatgaggttaaactaaaatgaggcaagatacagacgagagcagggatgaagacttacactggctggagacagtccatcgccaagcaaataaagccacccaaatcaaagacagaggcaaacaaaaattaaatcttatccccagagtggtaagtagcagttcgctgctgagggtctgctattcaggtcactctaacagagctcaactatgccaaaagcaatccagtagggatccactcaaaacctgacaaagccacttctaagaaagtcagatgcttcgtagacaatcattagatggtatacctacaggtcaaggaacttcatgatttcacacctgccagggagaattcgaattgtcaaaatgtcaaagtcaaatgagagagtacaggggcaacagggaagtgcctggtgagaaaaaggagtcatctcttattcatgaggctatcactcacttgtggaggagaaacttaagaccaaataattgcaccttttcaaagtcattgataaggatgtatgaaccacctcatggaaaacatggaattaaataagagcaacaacgtccttttttatttgagacaaagagaaaaaaaaaacacattaaactggaggagagggaaatgcctgaattcaaagctcagat

SEQ ID NO: 588404 - DNA, 4001 bp, Homo sapiens
atcttaaaccccttccgagcaccctcaggactaacggaatgggtatttcctcttaccccaggtggctttgattaaagctgtggaaaacagaaaccaagagggacaaaaagaacagaggactggcgaggcatggtggctcacacctataatcccagcactttgggaggcagaggcgggtggatcacctgaggttgggagtttgagaccagcctgaccaacatggagaaaccccgtctttaccaaaaatacaaaattagcccggcagggtggcgcatgcctgtagtcccagctactccggaggctgaggcaggagaattgcttgaacccaggaggtggaggttgcggtgcgcaaaactccatctcaaaaaaaaaaaaacaaaaaaaacagaggaccatcaagtcctcaggggttgcagcaatggcttcctccagtcaccagagggctctagagggaggaataacctatttctaaatcagtcctcatctctgcacaccaagcttaaagtctgaaaattacaagagattatttttcacacatagttttacaaacaaatatggctcctgataacttaaaattatctacagaggcaggagagtgaagtagaaattgattccatacctggtctgccatgtgtttagaacaggagtcagcaagctaggacccataggccaaatgtggcctgccacctgtgttgtcaataaagttttattgaatcatggcccactcatttaagaattgtctatatctgcttttgctttaccaaaacagagctgagtcactgcactagagaccgtatgacccagaaagccaaaaatatttaactagcccttacctagaagaatcattcggctcagtgggttatgtaagtgacacatctccatatcatctagttcacatgatattaaaaggcccaaagatgcctgtataaaaatctttctaaatgcaactctattagctagaatgaccaaaatccagaacactaacaacaccaaatgttggcaaggatgtggagcaacaggaactctcattccctgctggtgggaatgcgaaatgctacagccactttggaaaatagtgtggtggtttcttataaaactaaacatactcttaccatatgatagagcaatcatggtgtttggtatttacccaaatgagttgaaaacttatgtctacacaaaaacctacacacagttatttatagcagccttattcataattgctcaaacttggaagcaaccaagatgtctttcagcaggtaaatggataaattatgatacatacagacaatggaatattattttatgccaaaaggaaatgagctcttaaaccaagaaaagacatggaggaaacttaaatgcatattactgagtgaaagaagccaatctgaaaagactacacattgtatgattccaactatgacattctgggtaaggcaaaagctatagagacagtaaaaagatcagcggttgccaggggttaggggagaaggagggatgatttttaggacagggaaactactctgtatgatactataatggtattggtattgcaatggaatgatactatacattcatcaaacccatagagtgtacaccaagagtgaactctaatgtaaactatcaactatgagtgattataatgtatcaatgtaggctcatcggttgtaatacatgtaccactctaggaaggatattgataatgagggaggctatgcatgtgtgggaaaggggtatagaggaaatctctgtgccttcctttcaattttgctgtaaacctaaacatctcttttaaaaaataaagtctattaaaaaaagaaaaacaactctattagtcaatgagttgtgagggccattaagggctgggtgcccactgtttccagctcctattaccttctgaacaccatagaattgcatttccttgatcctgggtaagatcttgggatgagtcctgatcagagagttgtaagcagaagtgctatgaatcacttccgaaatgaagcatgaccttccagggctcttttccttgtggctcaacatctggcaaatccaagtttctgacttccctgagtgacaatggtgggcggagccccccagctggcctctggtgggcacagagcagagtcaagaagaagcctttcttgctctaagccactgagcattgggtgtttgtttcctcagcaaaatctaactgatcttgactgaaatagagatgatcgataactataacatgctactatatttgcaagactgttgcttctccctatcctccagtacagtgaaggactcagaagaagaaacattgatccaagcatgaacttttaccttcagtcatcaatctaatttagttcatgaaaattcttcttaaaatcttggtcttcttaaaactccaaggaagagtcagtctctctctctctctttctctctctctctctctctccccccaccatcccccaaagaactctgttattcttgcctatctatcaggccatcttggtcccaccttcaagcagtctgtagcctcccagagaggaaatttcttttttctctctcattaattttctgccaagaatggtgactttttttcctctctcagagatcacaggagcagaataatcctaatcaataaaaaggctgggagaaggttgtgaaaccaccccctcctgaggtaaacatgttgatctccctgtaaatcatcatttctgctaatatttgagcacctgttgtgttttatttctcagctgattcagaaagcaggaaggaagaaggaggttatttattgggtccctcaaaccccaacaaaagccaactggaatcctctcaggaagtcttcagaacagcagttcgatggccacacaccatccctagctaagtgggagggtcacgggtgttgtggtgactctggagagcaggatggccatggtttggtgcagccaagcacaggtcttctccatccatgactccttcctggcttggtcaggtttgcagagtaattcaaccaaggcccaattccttacacaagacagataacactttcttgacctgtgtatgaaggggtggtggcacccccagagcaccttcagtccctgtagcaggtttcccaacagacgcaagaaagctcctctccctctgcactgtcagcctcttctgctcttcttgtcttaccctccaaaccaaaagtatctctctgctgcactgatgctgaatgaaatacagaactacttagaatgagcaaaaatacacagggaaatagcccctgaagctgtccttgcaaggtgatatgattcctgacaggttcatccttcaggcatacaactcccaactcttcacaaaggcttaatggatgtttcaaatgtgcaggaccacatgtgccatagaatggcagctttgatcaaaccacagaacttacttccaagatttataaagtgcgagtgactgatgacccccgtcttccctgagtgcatgatgaccactttcagtgatctccacaagctcaggtgctggcccagggtccaagctacagctttctgaatgttaataaaacaacttggaatcttctgtgattcactcattttctcatgaaattgtggatcaccaagtctggctgcaacgcctctcatgactctcttctttcaatttcctttactcctattctttttcaggtccttcccgtttcttgtctgaataccagaaattactaactggccctcctgccctggttctccatcctcaggcaccgctgacatggtgatcaccgtgaaacacctacccgactacctgattccctttaaacgctcaacaaagggagaagagcatgggcataccttgagccaggtaacccaaggttcaagtcctgactccactatttacaaagcacaagtcctttaaccacttcagcttgtactttcctcatcccacactagaaagaacaatagcgcccatctaatagagtttgggagaactgagtgggataatgcacttaaagctcttagcacaatgttttg

SEQ ID NO: 588405 - DNA, 4001 bp, Homo sapiens
tactcgggaggctgaggcaggagaatggtgtgaacccgggaggtggagcttgcagtgagccgagatggtgccactgcactccagcctgggcaacagagcgagactcttaaaaaaaaaaaaaaaaaaaaaaaagtgcctgtgtcataaagttaacattaaataaaagttgaaagccaagaaccaattaggagagaaaacattaacatttgtaaaatataaaggattaatattcacattataaaagaaatactacaatctataaggaaaggacaaaaacacaatagaaatgtactaagtaaacaaataggcagttctgcaaagaagaaatgaaaatacacaattatttgaaaagatcctcatcttcactgataaaaagggatatgcaaattaaaacaatgaaatctcattttcctttcaaccattttgcaaaacttttaagaaactggccatatcagggtgagtgattatgtgggggaatagtcaagctcatactcaccttgttagaatttgcttttagaggataatttgcccatttccattaaaagttacaattcgtatatccttcaacccaacaattatactttgaagcatctattaaagagaaatgcctctgtatacatatgcattgcagtaccatctgttacagccaaaaaacgagccataaccatttccaacaataatttggtaattaaataactgagttatgatatctttatattacctaatattatccagccatttataaaaaggatgtatattaatatgtatggatatggaaagtccttcaagtcatatgataaagtaagaaaactaattctgcaataatatatcttgaacaatcccatttataaaaaaaaaaaatcctatatcccatgtggcagtattcatagatcaactattgggagtattaacggaaagcatctatatatttgttcttttaaaaactcttttatacaagaacacatcatgtattatgtcattatacaaatataatcaatttcgtctcaattcacttagaagtcagtttcacacatgtgcatgagatatagccaattacagacattttccaggttgtattttgtgttaatcaattggtaaaaaccacatttatacatatagccacagcttctttcttgctgtaagctctaactttttaagttcctatttcaattcctatttccctcaaggaccataaaataacaaaatatatttacaatgaaaaggaaattggcagaaggtcagttccaattctttggccaatattttgagtaaagctctgccttgaggataaaagtggtgctccgcctcaccccagcaagcaagcagatctgagctctgaccctttcaacaatgaaaggagggggagcgtgttgtgatcatccattctgccttctccctaatcttctcatgttatggaacaatctggaggtacacaccaccactgcctccctctccctcctgactcactgctgactagggtgtaatttgtatttatgacaactttatatcatttggaacacaccctcctgtttcccctttgcactggcttgctcaccctccttcccactcgtctctgcttttctcccttcctctctctcttttcatccttatcaaaaacctctgacaccaaattcaccctgggcctctctccaccagcagtgagcaggaagctggaagcccgcacacttcaggaacaggatgacagcccagggcaccacacataccagtgttacgagctgtgaccttggagccgagtctcagcagacgaacaaacacattactgttgcagtggttcaccatgtgcaattggaggcttcgtcgagtctggatcttgaccaagcattttgccatactggttattccaatccccttggtctcctcggcctgcatggcccagggcagcctttccctaacagtccattctgttttaaaggacctaggcaggacccactgaatgaatcaaatgtcaggttcctaatgcggccaacagaaataactcatgagggatcagcattgggaggggaggagggaggggacgctatttttaaactctccactcacccctctaacaaacaatgaaagattatgcatcatccctactctagcctttctaaaccttccggaccaaaacagaggaccctgtccaaatgcctcatcatttcctaagaatcaaatgtccccaaaagataagatgacaactggataattccataatggagaaataacccactttttcttctaaaaattgctcctccagcctttattatattctacagcagtactgtccagtaagattataacacaagccacttcaaagagggaaaaaaagcatttaaaaagcaaaataaatgtattacaattaattttaataatgtgttttatttgaaatcgagatattcaaatagtatctcaacaggtaatgatatcaaaatttattaataattaatcaactcttttattaataaagagtttgcattcttttttgggacgaagcctttggaattagtgtgtgttgcacactgcacatgtatagcacatctcaattcgaaccagctccatttcaagtgttcagtagctatatatggttgctgtcatggtaatctcagctcttttcaaagtgctggattcctcacatgccttatctccatctcataacaatgctaatcttttcttcactttacagataaggaaacgacaacttagagagagtaactgacctgaccacaatcacgaagttagtaagtggcaaagccatgatttgaacctaggcttccaattaatatcggctgactaaagttagtgttctaaatgcaggtgccatgcaaccactacattctgacttttcatgaaaaggatgagaagaaaaaattttcctcacacaatttcaacacgcctgcatacattcttctactttaaatatctgtcaccaaaagatgattttctaataatcctctatgaaacaaaggtttattcagagcaggaattgaaattccatgttgttatgcatcaatataaaattgatttagcatttctggaaagaaaattagcaaaatacatggatttttatagctgtggtattctttgaaccagaaattccacttttaagaattaaccctgagaaaataatcagaaatgctgacaaaaatcttaagacaaagatgttcatcagagtatcatttattatagccaaaaatgttttttaagtcaacctatatttccagtgggaaaatggttaaatacatgtgatgaaatattgcacagacattaaaattcatgtttagaagaatttaatgatgtgagaaaatgcttgcaatatactactaactgaaaaaagcatctttatataaatggtgtggcatcgactatgtaaaactgcacacaggataaatgtaagaccagacagtaaatcccagaagggaaaaagggtgttgccagccatgcactgtggctgaggtggggcaggccatttccagggacctcaatgggccccccactcccctctcctgggtgagcagcctccagtgtggcagaggagttcctactctcacaggagttagttaattttcaaccctgaagcttgaaaggaaaatatccctaaaagttctcaaaatcttcaaccctttgcaattccccctgattatataattctgagcagaatccccaggtttaaaacagatagactgacgcaaaggtggggcccaggactagtacctactacacctccctcactagtcaccaacaatggttcttgaagaactactaaaaatctttaggacactgaagaacaaatctgaaaatcactgttcacaataaatcactactttgcagtaacacacgatgaatttcatagattaaccggggctcatttgcatggcagtaggccatggctcaatactgaggaaatctccctttggcctgtctgaagggaatatagataaatctttatgtttatcatcatgttaaaacaacatatgacctgacagctcacttgaaacaaacag

SEQ ID NO: 588406 - DNA, 4001 bp, Homo sapiens
ctctcatctgtctcatgctctcccagctctcaccagttccttgctcgtaccagctccttgacctacacatagcctttctattcctcaccacctgttgaaatcctcttcttcctccaccttccattgtaaagccttctccaatatctccacttggaattcaccctccttagtgttcacaggaatcccaggcgataaagcccacaatgaagatcctgtggcacaagcctctctattccccaacagaacctaagctccttgagggtagggcctgttggtaattttcatgtttgtgtcctctcgaatgagtagtgagaaagtgcttgatgaaccaatagagaatgaagagggaaaagactggtggcatttgaatgcgtcagagagataaaaggctctggacaaattagcttcaaggatggggtctcattcaggaaagacaaacttaggtaccacaactctgctctggtcaccaagcacaccctcaccagctctctgatttcataatgctagaaacttaaaaccaggatgtcgaggaaggaaataaaatcataaaatcacttctgtgagaatcctttcgtggtaatgcgtttcacccacacactggggagccactaattgcagcacaaggggaacaagatattgggcaaaagaataaatttcactttctagcatatcacagttaactacctcgtgcttgttttgctgtgactgtgccagaatgcaccagtcctggaaaagatgaacttggctccttaaccgtacccatactcaacaccgaccaaaggatgcccgaaattgtcttgattggaaatcatctcaaccatcatcttagactagaaacaagtagatgctggcctctaggtcaggacccctagaacagtgcattatttttttttcccaaacaaccattctgaggtttttacaaaaataaccgactcacaaacagaaacgcttcctgatctataagccactttgaaaacaaatcattatgtcgttgaatatttcatgacggtccaaagcactgaagaaggcgaactgagcgttcaccaatcctccccatgtctattttgggacttccaaagcaaactgcaaatgcctcctttattttctaaacgttcatttgcaagtgctagatggattcttggtgaaatattgcctccacccaaactgactaaatgcagagatccggaggttccgcttctccagagtttacagctgaaagagacagcgaacaactagtgaacacgacttccaccctattttataggtggcaaaagcagggggcacttgcccaaggtcacacagacagtgggtgtatggcagaggagccaccagaagccagagtcctgactcctaaccctaggggcatcccctgcttcccgaggctgactcaacgcccccactaaagctcagtcaaagctgctgcaagttagcgacgcgaccctggagactgacttctgtggctcattcctctccacacgcaatgagttctggagctgagacactcagggatgcccctctactcaaaaaatgacaacacaggcattggcactgcagctgatcgtccctggcgaaccccttctggttcaggtgtggccatcgaggacggacagagagggttggtctgaggtcactcagaaagttggcgctggccgcggccgcacctgaacccaggtctctccccctcccgcgttgccgctgtttccactcactacaccatgcagatctcggaaacttaagcacacatcgctactgtgcaaacagttcacgatggcaggtcctgagctagcccacggacgcgcccccgagccgggcttggggacacgaggaccggaggcgggcgcgggtcacccgggactggtggtgcaggcggagggcggcgcggaggaagccgaggcgcaggcccggggtgtggggacaggccgtctccccaaaactttgcggtgccaggacccctcccttacctgcagaggaggtgccgcccgcgcggacaaggacctagcgggctgacgctctcggagaagggcggccccgcccagcggcgggcacggtcgcggccaaggctcgggaagcagcgctgctcgggctcggctcgggctccgcctcccgcgccgaggctgcagccggaggggttggccgggccgggccgcgcccgcgccgtctggcggcggcaggtgctgaggctgcagctgcgcggccgccagctgccggcgccgcgacccccgccccgggggaggagccccgcgcgccgcctccgctggctccgaggtcccggcccgccgcagtgggcggtcccgctcccacccgggccctgcctccgccgcctgcctcagctcaccgccggggcacgcagcgtccgctgagtacccaggggggagactgaggctgggagaggaaagggactccccaaggtcacccggaccagcggtggttgggccagaactggaacccagaagagttcccaaaacgacccccttctcacgcctccttttccccaggaagagccccagctacggggagccctgggggactcgccccctgacccccacgccccgcaggtgttcggctgaagggagagggagagcgtgggcccacggtaggcactgtggaccacctcccctgtctctgtaaactccttccgcgctgggaaactgtgttctcctagctttcctcggccctctccagccactccctcggtctccttgagggttcctcaaaccagaagctctaaaatgccggagcgccctgggactctgcactcagcccttttctgaccccctgagccgtctcacccactcccctggttctggtcctaccgcctctctgagcatgatacccaaatgcatgtgtctgtgcactattttccgtgctgaactctactgaacacctacgaggtccatatcctgcattagacactggagatacaatacacctttaataaagcagtccctgtcctcatggaatgtacagtctaggactattaaaatacagtccagttcctgtaacaataacccaatcccacggggccaagggcaccactcaggcctgcactgactgagtgaaggcctcctggagagggcatgctctaaatggaaacctgaaaggccagtggaattggccagtgaaagggaggagtgtggagagagcctttcaggttgagaccacaggaacaaagaccccaagatgagagagatcccacagagggagtggcaggagttgagacataaagcaggggagtcagcaggggccaattcctggtcaaggagtttgcaccgtgttcccagtgcactggcaggttcatgggaggagttctgagtagggttgaggcaccatcagactgggatgttagatcattctggggatggtgcacaggcagatgttaacaagtgcatccttcatccaagggcggtgggggaagactagcagcactttggagccaacatcgtctggatgaaggcaggtgctcctcctttgtgaccttcatttccaaatccaggagtccatccagaaactcctgagtggctccatcgctgaaagacctcctacgtaattgcacccaaagctcccttttctgtcagtgccccagccctctgccacccagatccacgggctgagtgagccttttgctttcctcacccgtctttgtagtatacaaagttctgccccaggagacagaagcaccataagggtggaagattctgaagccatagtggaaataatgaaagctttttaaaaatcaagtattctggctctctgaattatttcttaacaattgcatgtgaatctacaattttctcaaaataaagtttaattttaaaaattattttgtagataaagattaatcatcaaattactctctccaaggcagttaaacaccaaaaagcatagcacttgtcagaaagtaagataagaactattctcttgtccggtgagtacaaatgttccccatggaattttgccctgtccccctccatttcctagctacctgcgtcagtgtcagcctc

SEQ ID NO: 588407 - DNA, 4001 bp, Homo sapiens
tgtgggcagccagcctaaaaggtaactacttgccctgaacttctctttttctttccctcaatcttgaacaaggacatgcaacctggcttctactgtactgatgaggacaaagcctcagggggatggcagagcaacaagatggaaagaacccgggtccctgaatgaccttgcggaacagagtcatcccaccagccccagaccaaccagactcttatcagagagaaaaataaactagcttatttaaaccactatatgttaaaatctctaattcagcagttaagcctctacttaatacatttccccaaatccattctctccatcttctttaatacaataattctgatttttgaactgggcatattatgtctcagctaataggctctattttacatcctcctttgtacctatgtgcaaccatatgattaagttgtggccaaagaagtataaaaattgttatatgaaacttccgagtaatccctttataaagtagtcagtgaccttcttcctgcttcatttttcccactgtctagaatgtgaacataatggctgtagctcaagcagttattttgaaccatgaagttacatgctaagaattgtgaagaaacagaagggcaggatccagagacactggtgaccaaggagcctccagaccagttctggattacctatttctagttttctttctgtaagagagaaacttctatcttgttgaagctattaatgtttgcttgttgtatacagctgaacttaatcctaacaacagacacatccactaacagatatgagctcctgggactcaacacttcaaaccccagcttgatggttggatatccctcttagcagaagaaaaggaaagtcactacttcccaaagttgcttaaagaggccagtttccattccttctgaccaccatccgcttggcttttgtgctcgttgaagcagctctacagggaggcccttggctgacaaactcccagtctgcgggcccagcaggccacaacaatggtggctcgcactaggggaccataacatatgtggcgtcataaaagaggagggatgggagtggggaggctgatgtgacccagctctgacgggtcagtgagcaggaacagaatgctacgaggtgggcgctggtcactgcaaatttaagtcaatacagacagggaggaaataaggcaacctctctctttaggttggggtttttctgcttccccctagctgccctggccagatggcggcctcctcccctataacccaaccccaggcggcaaaggtggaagccagatctaagaactgggggagcttagactcagcacccacccctatccacagccttgcagaacttggatgacccctccctctcccagcctcactctccccatctgtaaagcgggcggcaggcattgacagctctttgggcctttcctccaggccggcggaggcctgggcactgcgctccccatcctggcctcgcctctgcaagagctgcctccacggacatcttttccgaccccctccccctccctcgccccctctcctcgttcccccgatcctcggtcccccacccccggtctcccctcccgcaacccctcgccctcccgcagcctcaccctcctccgacaggtagcgcaggtcgtagaactcccccgcgaaggtgccgtaggaggagtcgtggcgcggcaccgcctcgtcggcgcccgtgtccccccgcgcgcgtccccggggtccccggccccccgggcccgcaccgtcgtccgcggggctggctgcgcaggcggcgggccccgtcagtagcagcaggagcagcgacgcccagacccccgggtgctgccggggcggccgcgccatccgtgcgcacagatcccgcagccaggccgctcgggccgcagcgggggcgccgcgggcgcgggccgggactgagcctccgccgaggccaccagcacgcgcccgcgcagccgcggagcctcccgcacccccgcctccctgcctcggtctgcgcatcctcgctccagcaccgcagcctcccccttcttcttggaacccccctcctccccgcaccgatctctccttcctagcagcttcccttctaccgtccttctttccattctccccatctccccgacttccctccacgcaggcagatttggcccttctggccccttgctactccggagtgtggtccgcggaccggcagcatcagcatcacctggaagcttgttagcatcgctgaggccccactccagacccatgaagcgggatgttcatttcatcaaaattcccaggagatcccaatgcacgttcaatttatgaaacgctcctctagagagtttaccctggacacacctggtcagtgctgcctcctcaaccttgtgccggcactttttggtttacataaagcacttgctagacctattatttcttggatcatcacagaaggaacttgaaattgcaagacccccacaatagagctaggtaaactgaggtgtttagagacagagaaaactggattcacctgcttcctctccaggctcttgcggtgtgtaatcaacagaggctggtgccagtaggtaacctgttccccttcaaaactaggcttctggtttactctctttccctgcagcaagcacgcgcaggccttggaaggcccacaccgtatctgagggccatgctgaattgttgatttttctcaaatccattcctgctgcttgcagttcacttttggctatttactcagccatccattgattcacaccaagcatttgctttatggcaggtcccagggttctcttttgatgatggttgttggggtgatatattcgaattgctaagctgttttccatcagagaggcggacgcaattcctttcaggctggtgttgcagagccagcattttaacctgcttttcctattttattattttattttattgcataaacaaaataattatggaggcagaaaagcatagaggtcccaaatgcagacctagaagtcagactgcctgatctctcatgattagtcattgacatgatgcaatgaagattagggaagatcatagaggtaaggatcaatagggttcagtgctgtaagtggcatgcacacatgtacacaatattgtgaaatgttaatattcaaaaggaaactagtgatcttaaccctttatggcctgattggctgagagataagggtagtgctgttgaaacaggggagacatgatgggggacttagaagtcaggtattttctattaggtatcagctaacagtgggctgtccaactggaatttaaacatattaatcctgatggctgaattgaggtgtaattcatgaaaaccttgggcttcactaggtcccccaacatagcagttgtcacaaaaaatagatcagattatttgaaaaaggtaagatgaactatgattactttaaaaactcaagagacttcttcccaaaaagcatagcgtggcaatgcataacattctaaaaaagctgatccaacagattgaaaatctgttaaagtgtagtccttcaaaaaaaaaaaaaaaaacaaaaacaaaaacaaaaaccttaaacctttcttaaaaattaaaatttctttattttcttttcttctctttctgttcaccagggaaggtatggtcaacttagaatggaccaaagtttagccaaaaaaataaagcattagacttttgatttcagtgtagattctctggtttgggaatacaagcttttacctcttactttcctttttattcccttcattttggttactgaaattaacaataacggtgcccaaatagaaggcaaatgaaaaccaggccattcttctccgagtaaattaatctgatataaaaacacgtgggcagccgggcacggtggctcacgcctgtaactccagcactttgggaggccgaggcgggcggatcacaaggtcagaagatcgacaccatcctggccaacacggtgaaatcccgtctctactgaaaatacaaaaaattagccgggcatggtg

SEQ ID NO: 588408 - DNA, 4001 bp, Homo sapiens
ttttttcattagaaagatttggtaccaccaatgaaattcaacatattttctaatattgagaagttgattctcaaagatatcacaaataagatacattactactactactaagaaagagaagctaattctttgctacctctcaggaaactgcacgtggtaacctgtaggtaccctaacacatcattcgaaatgagaacaaataggttcaaatcttagccttagggctagtagcatgaccttccaggagtcacaactcattaaagtaaggaataatgcatccctgataaagtatgatgatcaatattaaaacacatttttttgtattttatgggacacagtattttagtggtcatactttgtaaactttaaaatgctgtgttttcagaacaaactattttatcagatttttactatgacactataaaatactcttacttctactgcatagatgaggaaacagattaatcacagttaagtgacttgctccttatcacagagctagtaaatagcatcctggaacccatgtctccggactttgctccttcacttgacctctgctaatgtccattcaaatatcatttcttttatctaataagctgagagatgttttacaaatttaggcagagacaatattttaaacctatacatactcaaaatacacaaaatctaatttttaaaaaatgccttaagaatagtcatgcattccaaggtgagtttcaagaccaacacatacaatgaaatcatatgcatatttgttaaatactgtaatagtcaatgctcaacacatcattattctctcatgccctcagtgaagtgatcctcaagaaggtgaatgtagacaaaattgtagaaaacgttgttctaagtctttcccgtgctttctaataatagaaaagaatagtctcttagatatgtctttgttttccctgctacattattaatactccttgttttttctttcctaccctgtactatatttcaattacgttatagtctaacaaagagaacagggtggttattttcatatggagattatgactgaataattcacttctaactgtattcaagacattggctttgttctccaaatacttctgaattgaacctttacgattatataacctttcctcaactgttcggaaagtataaaacattccacaacgacccctaagtaactgtgcccagcaacaccaactggtcagagagtgggaaggctgccctaacaattgaagtcttttccctccattcaacgaacactaaacactaagatctacttaggaaaagtcatgggaaggggagcggtgggcggtacaaaggagattcggtccctgacctaaagagcgtggtgctgagacgagacttggtcgaggagaaagccccagctttcggcgtcagcagggagacaccaaaaaggctgtgcctcggtttcctcacctgctgaggagggatacacccccaccagcacgctcgcagtctgcaggcatgaaaaccggcctaaagcgctgcagagtggctgattttaaaagggggatggctccgtttctcctccagagtcagggccccggacagcgcgcagagcagaggccagcccgagtcaccgggcgcggtccccgcatccgtgtgggcgcctcttagctcccgcccagagagcggccgggcggccttgccctccgcagcagcagcccggacgcccggccaggcccaccccgcgcacccacagcccacgggcccaggcgccccgcccaccctgtgccggcccggcttgtctcggtagccccgggctcccctcccccgcttactttctgggagtccatggcgagtggctaagcccactgggctcgaacccgagacgacgaaccgtgtgaggaggctcagcgagatcgcacaccccaagaccgctactcactgcactgccccagcccgcaccggcaccgcccggccccacccgtccgcgcccagaccgcgcgcgccgtagtcacgccgcggttgccagggtgaaagggcggcccgcagaagggaggggctgaggagcgcaccgcgcctgcgcgcagcggctgactgctcccgggaagtagccgtggagggtggggagcgccgcccgtctgtctaccgctagtgcctctgcaggctgcactcccttcccccatcctttttcctccagcgatagcggtctctccggccctgaaataggccactgggcatccagcagccggccggtgcggagggcccgggaaggaaagagtatctggtgctggagacggattagcccaccctccacccagcacgcatctgaagcccctccccacactatccttcgaggggcagccaggcttgagcggacccagcggtccaaagggaggaaaagggctggggtggggatgtagcgaaaacgtgggaaaagacctttaggggatgtggtggaaacgtgggaggagggatatagggatgagagtggcggaaacgtgggtgtgggattaatatgagctttggggcctggcacagtttttcccggggacccacccatcctccccggcacctcgctacctgtatgattttgagcaagtcagtctgcctgagcttgtttcatctgtaaaatgagagaaataatgcggactttgcagaggattgtgaggattaaataacgtatggtacataattagtagtgaataaattatagtcattctctttttttttttttttttttttttttggagatggagtctcggtctgtcaccgaggctggagtgcagtggtgccatcttggctcactgcaacctctgcctcccgggttccaggaattctcgtgcctcagcctcatgagtagctgggattacaggcgcccccaccacacctggctaattttttgtacttttagcggagactggttctagccatgttgcttaggatggtctcgaactcctaagctcaggcagtccgcccacctcagcctcccaaattgctaggattacaggtgtgggttacagggcatgtgccaggcccattatagtcattcttagtggggagttagaacctgctcggtgtggcctgaggcatcaatgaagattttagaaagcttggaatttagtaggcttgagaaagttcttcctcaagcagacaggcctcatcttccatttggatgactctggagaggctcacaaaagttcaattagacagtcatttatgatgaatgaataaaagggaaatacatattgagtacctattctgtaccagttctacaaacaaaattcagtagtgggcaaggccctgtttctctcacagagcttacaatctagtatagaagaccaaccaaaaaaaaaaaaaaagttaacgtgctagacggttataggtgctaaaattaaaacttaggccaggcatggtggctcacacctgtaatcccaacactttgggaggcccaatgagtggatcacttgagtccaggagttcgagaccagcctgggcaacatggcaaaaccccatctctacagaaattaaaaaaaaaaaaattagccagacgtggtgctgcaagcctgtagccagagccaatcaggaggctgaagcgggaggatcacttgagtcctggaggcagaggttgcagtgagcctagatcacaccactgcactccagcctgggcaacagggtgagaccccagctcctaaataaataaataaggcaaatggattcagagaattgggagggtttaatttttcatagaaatgtcagggaagatctctcttggaaatgacctgagtataaagtgagaagaggaattgtacaaggatctagggaagaacattctagaaagtaggaacaacaaatacaaaggccttgtggagagaaggagctctgtgtttgagaaacagcatttattctacaatgttgtcattacatctccacatggatccccctgactgtactgtgattttttttttgagggctgaatttcttttaccccatatctgtatccccagctcagagtctgccacatagtatgcacttaatac

SEQ ID NO: 588409 - DNA, 4001 bp, Homo sapiens
aacattccgttcttgcccaatgcaaatctatatacaataaacctaaaattacccaccaacctggtttttctttagtttttaaaggccatcaaatccttggagatagtatggacctccagctgttaacattcagaaggaacacacttacagccctgtctccattgggcttattactgctccagtcaatggtgcatttcagagctgagaacaattccaatgaagttttcactgctagtagtaaacaccactgcttcaacaatccacattaggtcagcatttaccagagggtctccctctggagcaggttgtccaagaatatgagttcaaccactggctcaagagaagcggaatgtcttctcaatggttcaaaattcactttatgttcaactacaggccttctgcaaactgaggatctgagccctttagggcagtgactataattcttcccggacatagaaggccaacaaggtgactgtcacacatcagcacagagcgaaagccattacatattagtagccagtgagaaacaaggttcaggaccctgtactgtagaggagagcactgtaacacgccagcaagcagagtggtggaaggggagctgggtggcatgttcatccattacagccatgggtggatctgaagtctaagtaagatggatactcactactgtactggttggcagctaggcagtaaagtaacaattcatcagataaaattttaggtggaaccacaggtttggaaagttctgggatccaatataatgtctataggagcatcaatatataacatgaaaagtcagttatcagggaaacaggtagggttccctcccctggaatactggaaagagatgtaaagaccatatcttcaagcgcccgagtgaagaccttcttctaatacaatgactcctgtggctttctgttaggaatcaagcagtaattagttatagcccaacttttaaagtatcagtgcgcttacaattacataagaagagaggaggacataagacacttaaccgaggaagctgaagtgttagggctgacttgtaagtaagttttagatacaaatgaagaacacgttctgttctaagtaccatgccagaagccagtaagtatttttggcaggtcccatattcactctctggggaagcctggagccttctaaaacccagttaatttaactttgattaaatgcacgacattgtcagacagtaaagtttcaatgtcggaatgaggccatatcattctccccagtagaggcaagcttgccatgagaaatttctacatcttggggaccacccccacacatgtaacacctccctctctcacctctccaaagagcaccctcacatataagatgccctcgagttccttctactcaacagaaagtctaaagacgatgttccccaagttttaacaagctactgggcgtcagacagctgctttatgtctacacccagatcctccccgtgggcttcccggacccctcccctcgcgaggttcagaaccccgcgctagctacactgtgggtccaggctggccgctggggcacgatggggccagacgctctaagcaaaccctttcccagcgacttcaggcacctgggagacccgcccgacaggccgggcctgggcctcgcagtggcgccttatccccccggctcctcccggctgtaggaactccacggaacggcccggcccggctgagacgtcggttcaggctgcctcccgccccccaggcccgaacccctcttccccgcccgccaggccccgcctcgggatctcgtgctcctgccagccggctgcgcccgtacctgccggacccggtgcagggcatccacgaagccctcggccttcatccccacaggagcgctctgcccctgcaccagctccgccattaccgcccccgccgccgtcgccgccgccgccgacgccgccgacgccgccgctcggctccccggtccggcctcccgctccgcttggggacccgtagccggaaaaggaaagtcgccctacttccggcggaagggaaagccgggacgctcgcagctggaggagtcgcgtctgcggggcggggtcagggcacgtgaccttcgaccgatcggaagtgggggcgggacggcagcgccggggtgggctcagatcgccaggcagccgtgggtctccagggtccggtcgcgacccttcccttcccgggcgggatttggtccaggaccgtcgatggcgtcttgacaggtccccgaggcttggatgtggtcccgaggtgtccgctgtcggccgtttggaatctcagagggactgacgtggctctcccaagacggcaccccgaacagtcgtggttcatcaaaagcctggtcctgggtagcccctccctgaaatggctgttggttgggaatttgggggctgagcgctttgaaagggcattgggacagcatcacagaatgtcagtgtcccacatttgcgaggagtcccgggccccagttcttacactgcagtttgcatgaggatgggccaccgccacttccgcctggggttgtctggtgatgcccccaggagagacgcgcccactgaaaagccagcgtggtgtcctcttacacggtccttaacaaactctgggactctgggggtgcaggaaataccacaggaccgtcattactcccataccggctgagtcacaactgtattgcaggaggcttcttggaacgcctatgtaactttaatggaagtgaccaggtacagatcttctacagcaaggaaggaatcttagtgctagaattcagttgagcctttgagttggctcttcttataagtgagcaaacaagtaacaaggtttagggggcgcccatttttgtgttagcacgattgccctcgtgtttaatatttcccaagccctattatgataaggagttggacttaatgaagaaccatgttgtcaaacatcttatgcccatcttgaagttgtgaaggaggatgagcaccaagaaaaggaaataaataaaatccaatacgggccgggtgcggtagctcacgcctgtaatcttagcagtttgggaggccaaggcaggcagaactcttgagcccagaaattcaagaccagcctaggcagcatagtgagaccccgtctctacaaaaaatataattagctgggcgtggtggcaaacacctgtagtcccagctacttgggaggctggagtgggaggatcacctgagccctggaggtcaaggctgcagtgagctatgatcacgccactgcagtacagcgtgggtgacagagcaagaccctttcttggggaaaaaagtcccatataactttccttgatgaccccaccctcacccctcactgtgtcattatgccaagagagctttgggcattctaaagaagtatgaggaatacttgaccaataaccaaagtatagttatttatttgttaatgacttctttcctagactgtgagttactttagagcagagacttatttttccctgtatccctagggtgtggcacatagtaggtgcttagtaaacttattttgcattcaataatgccaagtagaataattcatagattatggcaaaataaaagaatttggcaaaattgcaagattgaagattgctttcagaaaaaatgttccaacccctgttcaaaagtacatagcttgctgtgttgttgaagtgccagcacgaggaggaccatgccaacacatccatttattgcccattctgggtgtgttgagcgttttaagtttgctatgcttgtaaaaatcaaggaatggcaatggtatcaactttcatgaacacagtcgttcagctgaaccaagtatcagtgataacttctgttttgaattttagaaatatatctctgaggttagaatgttgattcatgcatattccagctggctttccctatgagtataaatagggaaaacaaggctattggcccaaatgtaagttgtattccaaggtttggtccaaagaccagagaatccctaagtaggaagacagttttg

SEQ ID NO: 588410 - DNA, 4001 bp, Homo sapiens
caaagaagcgttggtatcggctctcattcatgccagtgaggaaagccgccagctctcgggctgagccaaagtcatccacatgcacgaaggcgtcagccggcacgaaggcctcataggtggcccgtgggggccccagcaccactggcacagtgccagccaccagtgcgttgcgccagaatttctccgtaatgtagtcgcggtgctgagagttctcaaaggacaggtagaagcggtactgggccacggtgggcaccaggcagctggcgcacagtggccgtccattggcacggccaaagacatccacccgcagatgaggcgccagctgccggtacagcctggcacgcagctgccgctcctggaagttgctgaccacccaggcggccaccctgctcttggctggcagcggtggcgagggcccccagtggggctccaggcggccatagggcacaaagatgtccgagtcgcgccggtagctcagcacccagttgaagatgcctcggaggtggctgaggccgtgggtgtggctaggagactccatggaggcccacacccagggctgccctcgcggccgctgggccaggggcaggtgggaccgccgggtctgcagctcgcggtggtggaagaccacggcgtcggcgctggccagcaggcttcggttggcactcaggtggcagcgggcgatgccgtagcgggtgcaggtgtcgctgggcagctctgggggctggtcagtgaagggccagtgccagacaaggatggtgatcgtgggctggggtgccggggtaccccgaggggctgaccccagcagccacaggagccagagggcagcgagcagagccaccccggccaggacccccaagcctcgcagcctccgggtggggccgtgccctgcagcagcacgagggaggggaggctctgtcacttgggctcagggacatccacacgccccactcagcgccaaccccgtcctcccctcccatgggctcagggacacccacatgccccactcagcgccacccccgtcctcccctcccatgggctcagggacaccgacatgccccactcagcgccacccccgtcctcccctcccaggttgcctagctgtccccagcttgggcctccccgagggccagacactcaccagcattattcatccacagtctcccaggatcagtcagccaagagacccgagattctcaaatcacggcagccgccagaggtgcccctgaaatcacagctacgccctagctcagccccgcctggaactgtgctccttttatctctgcccaaggtgagggaactcaggggaccttcctgctcctgccccgcccctgcccccacaacctttggcatcaaccactgtccccacccccatctcggggacttgctagtcctggggctgctgggaggggtacagccacaagagggatgccaagccagggcaatatgacgcccccacagcccaccccactggtctccagagaggcccagagatgtccagctgggcaggcagaggacagagaggctcgggcaggcttggcccagggcagagaaggcccaggtgcaggcaccctgagcacagatggccccccagcccccacccagctacccaggcctgggcgctgcagacagcgagtgcacttccccagagggccaggtggctcctcccacggcagtatcacccacttcccccagctcaccaccagctgggccctggtctcccaggagaatcttacacattgaagatgtactgtgctcagctctttgccggaagctaaagctcccaattgggccatcccaccccactctgccacctctgccatctaggaacccagatgcccggagaggaggtctgtcctggggcccttagtgtcttcccacaggagcccagcgcgtgcctgcaagggcctggtcccggaatgaactgtggatggaggctgctttgtccttttccccgtccagatccatgcccatagacaccgctgactataggctgggcccagggtcccttcctccagcctgcagcagaggggctttccaggctggaaagggaaggagtccttttgtccctgacgcaagcgggttgggggccagcacccgctccaggaagaggaagggatccagcctgaagtccagactccccgctccctctaagccagggcctggagcctggaggccaggttccttcttctacaccagcccacgttgggtgccagccaggctgggatggccctgcggggtcaccctgagccccagccaaccaacaccccactctcagccacagtgggaggccccatcagcctcttcacccaaccacgttgccactctgctgcacgggaccttgtgtggtcccaggcgtggccagacccagacgtcctggagatctcaatgcaggtcaggcttggtttgtttgtttgtttgtttgtttgttttttgagagggagtcttgcactatcgcccaggctgtaatcccagcattttgggaggccaaggcttgtggatcacctgaagtcaggatcaagtggtgcgatcttggctcactgcaacctccaccttccgggttcaagtgattctcctgtctcagcctcccaagtagctgggattatgggtgcctgccaccacgcccagctaatttttgtatttttagtagagatggggttttcccatgttggccaggctggtctcaaactcctgacttcaggtgatccacaagtttcagcctcccaaagtgttgggattacaggcatgagccaccgcgcccagccaagtttgcttttttgtgtgtgggtttttgttttttgttttttgagacagggtcttgctctgttgcccaggctggagtgcagtggcgcagtcacggtttgctgcagcctcaacctcctgggctcaagcaatgctcccacctcagcctcccaaggagctgggtctatgggtgtgcactaccatgcctggttaattttttaaaattttttgtagaggcagagtcttgttatgttgtccaggctagtttcaaactcctggctcaagcagtcctcccacctcggcctcccaaaatgctgggatgctgggaatgaggacgcgtctgtcctgtcaggtcttttgggggctcagatcgtgtgtcctgggaggaatggcaaccatgaactgttgtccagacctttgccccagcaccctcagagggggcctgcctcccaccacccctgtccctgtcctgttctacttttgggccccaggggctgctggcctctccccggccccacagtgaggacaaggctgccttgggaggggaaccaggcagctggagactgaagtgggaggatcccactgtggggacagaggcaagactgggacagggtggtagtcagaggcccccacccctgtggcgcagtgtagcctctgagctgagctttgctgcggaacttgtgcaacggctggagggaggggggctggagggagggggacttggagggagggggcttgggaggggggctggagagaggggggtttggagggagggggctggagggaggggagcttggaggggagcttggagggaggggggtttggagggaggggtgcctgtgggcgccacgggaaactgtcagtgcctgagctgcttggcttaggggctggcaccagagtgggcagctgcctccagccccgcctttccagcctcccatgttttcggtgatgaccacagtggcacctgggcctttaatcccaccccagcgttcctcctctggcagggggcccccggggagccacaccttggcttcagcctcacaccaccccatctcttctccttgaaacagacacccggcggcagttcctgcaggaaggaggctgtcctgccacgcctgcgggtgacccggcctctggtgccagagcctgccatccttcctgtttgtgctgccaggctggcagggtcccttgccaccgacctcagccgcagccacagcctgctccctccctgggtggatttgaaggagcctcccccaccctcc

SEQ ID NO: 588411 - DNA, 4001 bp, Homo sapiens
aggagatctaaggaccatcatggccacacttgcctatttttccagagatgctgggaaatccattttattttttatttttatttattattattattttttgagacggagtcttgctctgtcgcccaggccggagtgcattgggcgatcttggcttaatgcaacctctgcctcccgggctcaagcgattctcctgccgcagcctctggagtagctgggattacaggcgcgcgacaccacgcccggctaacttttctttattttcttcttcttcttcttcttttttttttttttttgtattttttagtagatactgggtttcaccatgttggccaggttagtcttgaactccggacctcaggtgatccaccttcctaggcctcccaaagtgctgagattatgggcatgagccaccgcgtcctgccaggaaatccattttctaagtcctaacttttaagcactggcaaccaatcccaaagtttcttcaaacacaatgtgggccaaataacacgtgtgggaagttcaagcctaaagtacaaactccggagagcaacacaaatatggcttggacgtggcctgcctctttcatctcccctaatacatgcggcgtaccagccactctgaagggatccccttccgccttcctggcctttgcccagacggttccctcctcgtgaaacaccctctaccacttccttggcatcttcaagaccctcattaaataccatgtcctccccttgaggaatcttcctcatccccacagccattctttgggtttcctcctttcaagccgtggcgtaactgggtcagatatttctttgtaccccccaaaggaagaaaggggaactaatttgaagttctgaagactttatctatgttattcccatttaatcctcacaccaggtccgcaaaatgggcgtcacctttatcttctccctacagaaaacaaagccacgtctcagagaggttaggggaatcccccaaggtcacacagctctgcggagtggggcagaatctggaataaaggtcgggtcagtttccaaaagccagggcccctgctgctctagctattctgcagctctgaaagtttcacctcgttccaggaaagcatttcgttcaaaaaaatccagccttgaaaatattaggtgtgcgcgcgcccgtgcgcgcaaacacacacacacaacacacacgctatatacagatacacacagacacacacattatgtgtatgtatatactagcagataccatctattaatattactgaaacaagttatcgcagagaagtgacaagcatggagacagccgcacacccctcggaaccggtcccctccaccagcctgccctgccttcgcccgtgccttgacccgcagtcgcaccgcaggacaaaatgtccccttttccttcggaaagcagaagccagtgtaaatgcaaccgggagaaccagagaagggagttgcaaggccgcttccgccgggccgccctgagaaggagcggggtgagctagtccagcgcgcgtacccggagcgaccccggcgtgcgcggcgcctccctgcgcaggcgtgcggcgtgcggcccgcggcgtgcggcccgcggctgttcccggcgcggatacttactgcgcggcggggcgtgcaggtcgcatcgatgtcggtgcgcaggccacggcggccgcagagtggggccaactctgccggccgcgggacccgggtgagggtctgggcctgggctgggctgggtgacgccaggaggccggctactgcgcggcgcccgagagtccacatgctgctccgggtctgccgcccgctccgccctccagcgctgggtgctgcggcgacccctggtggccactggccgcaggcactcttctgtgggggagcagctagaggttagacctcaggaagaacttcccagcttagcactattcgtgcatttaacaaaaatggagagcctgctttgtgcaaagcacggagtgcaaccaggacccctgacccaagggagactgcagcctggtggcccgccgcttctaaaattctaaacaggaggaacttgggagctgctgtcttgctgggaagtgggtgcatgcacaaattgaggctgcttggccgccggtatgggtttacagcagttgggtatgtggggccaggagacggatgccttgtgtaaatctgtactctgcccacttcctagctgtgtgaccagagggcaagttaattaacctctctgtgccttgtttataaaatgcgttttataaaagttcctacttcataggattgtggtaaggataaaatgagttaagccctgtaaagttttttttggacagggcatgttcctgttaagtgcacaataaatattgttaatagattttattgattgattgattgattgagacggagtctcgctctgtcgcccaggctggagggcagtggtgcgatctcggctcactgcaagctctgcctcccggtttcacgccattctcctgcctcagcctcccgagtaactgggactacaggcgcccgccaccatgcctggctaattttttgtatttttttttttttttagtagagacgggtttcaccgtgttagccaggatggtctcgatctactgacctcgtgatccacccgcctcatttatttgtttgtttgagacagagtctcactctgttgcccaggctggagtgcagtggtgtggtcctggcttactgcaacttctccctcccgggctcaagcagtcttcccatttcagccttccaagtagctgggactacaggtgtgcaccaccacacccagctagtttttgtattttttgtagaaagggggtttcgctatgttgcccagggtggtcttgaacttctaggctcaaacgatctgcccgcctgggcctcacaaagtgctgagacgacaggcgtgagccaccgtgccttgcctattgttgatagattttaaaagagaattttatttctgttacatattacaaagggatgcaaattgtgaaagttttcttcacattttatatatgctttagaggatgtcaaatgtgagccgagtgtggtagtgcatgcctgtgatctcagctactcaggaggctgaggcgggaggatcacttgagcctgggagctcaaggctgcagtgagctatgattgtgcctgtgaatagccacagcattccagcccggccatcatagcaagatactgtcttaaaaaaaaagaaaatgtcagttgtgtacactttccatggcagagaagatgggaaggtactaaagttcttccaaagccactttgtgaatcgtgaagagagacatgtttacatacttaggatgctaaatgacaagtgtcaagaggaatgtaaactaacaggtgtgagtgttgagtgggagatttatatagagctagggatgggggaatcaaggaagtattcatggaagaagtggtgttggcacagggccttcaaaaatagggtggaggaggtgggatctgattgcctatcaaagaggtggtccagggcattctggatgagagacatccttctgtgtttaattaattctaggcagctgcttaaatactgttatgtatatgccaggcctggagaaatcattttccccctgcaaagtatctggagatgcttttgattgtcacaacaggcagctgtggggtgggtatgttctactggcatctagtaggtagaggccagggatgaaacatcctgtgatgtgcaggacagccccccacctgtgcaacaaagaactatccagtccaaaattctgccaagattgagaagccctccttgaaaccataaagggagagcccataggcatcaaagggtagtgttttcattgccagccatggtctcagactctgccacaccaacagtgaggcccttcctcacatcatcagaactgcattatatactcagagagagaaagctgcatcattagttattattattattattatttgagacagagtcttgctttgttgcccaggctggaatgcagtggtgccatc

SEQ ID NO: 588412 - DNA, 4001 bp, Homo sapiens
accaccagagcagtagcgcgaccctcctcccaaaagggttctgcacctggactccagcagaagcgcccggagagtcccaggaagccaggatcaagcccagcgcctcggccccgttccgcgcgatggaagaggcgccaaccgagcgtactgcacaggaaatcactgcccccttcaggccgcgtctcagacgctgcggtcggagcacaggggctcgctcggtccggaaaaactcgcaaacccgaccttgcgcggccagcgatcgctcctccagacccgctccgcgcgctccagccccggcctggcggtgaaggtccgctctggggcttcaggcagaacccaaaccgagggcgtggggaggggtcttgggatggaaagcccttggctctctggctccgctccggactgctctccaagtctgtgctccggctgctaggtcggatgcttcaagcctgagccgtgagaaactgcctgcagccgcccggccaacagcagcggcgcggccggacaccactgcacgtccgggacgagaactgccagggcactttctgagcaactaacccgaggcaggggtctcctgaaatcgctctggccacaggcagcgccgggcacgtccaggcagaagcgctgcagagccggtggccccacacttgcccgcgcggagcgggctcagagctgctggcgcgcaccaggcgcccagccacgctgcacgctcaagccccttgggttccggagccttccggacctcaaagcgcggctcggcttccctgggggcctgtgagcaggcccgcggcccctccggccctgggtggcccagtttgcagtcaatgcgcctgttcctcccactcggtacctcgcagccccatgagcgggacctggacagggacaatcaatgtaggcctttgggggtccagcccccaccttctccactcctttttctctggtcaaaagagaccccagtcttctatcccacccccacccctccccacacacacatacacacataagaccagaggagggggtgcttggcaaatgttaccagctgtgccagccaagcccagcaggaccgcgggggtgaacactgggcaccagccctctctgccctcggcaggcgcgggccggtcaatcggggatctgaccaaaggccggaggttgcctgtgtccaaaccacccaccccaatgccccccgaagccccgacggcaggggcagccggacactcacctccgtgtcatagagccgcaggtcgaggaagtaggggcgcaggagtgactcgttgcggatctgctcgatggccagttccacggcggggagcacaccgcgcccgatgctgcccttggccacctccttggtgagcggcatgaggcccatgatggagagcggcgggctgctgggcggcggccggggggcgccccgcgcccagccccaggccccgggcgccagaggcagcagcagcggcagcagcagtagcagtagcaggcgcgcgggcggcggtggcggcggcggcggcggcccgggctgcccggagctccgcggggaagccatgccgcgccgcgggctgcgggcgccggctcactcggcccgcatggcctggcccggcccgccgccccgcgccaaggtcttcccgcggcgcccgcgcaatggcgccggcccgggccccggctccgtctcgggctagggttccggctcggctcagaacggccgcggcggcggcggcggcagcggcggcgcccgtgacggatcaatcacgccgggaaggggtgggagcgagcggagtgcgggaggcggggagcaagcgagcaaacgcggagaggggggccggcgtctccgcgcgcgcctctctccagcgcggccgccccgcaccgggccgcctccgcccgcccccgtgcgcgctctgaaccgctctcccgccgggagctgctaggcggcagcccctggagctcggccgggggagggcggacggcaggaaacgcgggaggcgaaggcgaggctgctcaggggcggctcgggccgcctccagggacggggacgagccgtgcgcgccgggggagggggaggcgctggcgctgcggcggccgcggggagggccaccttcccagcacacgcacacacgcgcccccggccctccgctgcgccagctgccgctgcccgccgaccgctgacctccaggcaccagagcgcccggggacagcgatctgggaaccgggaccgcgcgctggcacacgcagtggccgccgccgctccgccgagcgctgcctgtagcacctgcacggtggtttggaaccgcttctcggaggtctggccgggaaggtctgggcaggagaatgttccacgaaggcgtcccagaggcatctgcagcctacgctctcccgttcttttctggcgcccacgagcccctgaccgagtcccgggggtcgctgaagacgcccacgggtgctcgaacgcccgttggtgccaggctgcccggcctttagggccttggctgaggacacccctttcctccccaccagacggagcgaccgccctttgccaaccccaagcaaagctggggtcccaaccttacgtgcgctaccgccccctccaggcatttgacctccccgcgtccccattcttgatgggccccgccctagaagtctcccggggtgggagcactatcctcaggccagggcggggccgcgcgcccctggacttggccctctctctgccaggtcgcactggccaatcttagccaaagcagtcccgagccagatgtacccgagtgagctgacctaagaccttgggttccttgtgcctctgcatacttcaagaataggaaacgtgatcattaatctataaagtcccaggggctgattaatgcgaggaacacagtaggacatcaaatcacaaaacatacttgagcctgaaccagggactgtggaagatatcgacgaccttgtaacaagaatggaagtttgaccttcgctgagtacttactgtgtgccttatgatgtaatccccacaactgccctgtaagcatactgtgttactcacccttactttacaggcgaatacactggtgctcagagaggttctgtagctagtggaagcacacagagctactgaaggaccggaacccagagccagcaggaactccgtgcacagtgcagtgggagccagggatgtgggactgcaagtttcctctccaggaggagcactgccctgactcagttgctctggacatcgattccctccggcatatggtgagggatttggaccggatgatgatgatgatggccacacaccagctctactggagtgaggcaagggcagctctgaatccaggctgagttgttaggaagcacaaagatgtgagtggaggctgagcagaactactagagagtaccttggacagcgccagggaaaccaggccaaattctctctgccctaacttctctttccaggcttctatagactccacctctcccggctccacttggcatttccttttccccaagctggagggtttgcatgaacagaactcacctgagcatctcctccaggaagggaggaaggaagggagggagggaaagaaatggtccaaaggacagtgtaatccccagatactcgctcaactgctgtctcacttgacatcacaaatatcctccagtcatagtcttctggcacctgccattcctcaaacccttagctcaggtttctgaatgaacattttcacttggtttttttcttttttctaattctttcctttagtcatttgtgtcctccttgcaagctgtgccaatatagagtgtccactgacacctacatctgggaataagttgaaagctgggtaactttgcctgacatttactaaggggttgaaggccctacctggcatcctgccctacagcccctctgtcttcttttatggtggggtgacctggccccaagacgcatgacctgggatctgccctgacccagggggcaccaatctcactctccatcagcatggctccaggccaatctctga

SEQ ID NO: 588413 - DNA, 4001 bp, Homo sapiens
gagcagtctgccaccatcctcagggaccacaaagggcagggcctgcagaaggcaatgctcattgtgcaggaaagcctgaggcctcctgcaagctgttcagataagcagctgtaggagggagggggaggagggccgaggagggggaggggaggcacaggtcactgttatcgccttggaaggcaagacttcagctgctgcactgtcttatctcaagtatgctcctgttttgcaagtttaaaatcttcctaaaaggagaaaagtaggagccaggctcaagttctaccctagcactgggcagcatgccctccctctgccagaggggaggagcctgtcattcttgcccgacaggaagacggaacaggtgccatcagttccacggagttccagcaatcctctgaaaccctgcacgccacctcccccgacacaaagatcccctaccctcaataaagagcataagtttgtttcaaaaagtttattgtaaaattcaaagcttcaacagcagcatcctttagaaaacgaagcattgcccggatccgttttgaaaaagcagcgcagtcggctaagtccttcacgctcctgcaactgtaccaagtccagggcgccgctccttcctgccgagcgcaggctgctgagtcacgcctgcccggccagtctgtccttcctggccctgaggccaacgtcctagcctaggccttcctgggcgagcagccgctccagacacttgcagagtcctcagctcggaccagcctggccctgccgccaccgggcccctcctcgggaggccgcgcctcctcgctctccaggcgccccccccgcctgccagtctccacgccgcactcgggcaccctcggagggcccctccacagagccagccgcgctctaggcgccccggggcgtcaccacgtcgatcagaccaaggtccccgccgggctgtcactcggggagggtgatgctgggcacccagtcgttaacgctgcggctctcctcgcaaaacaggctgagcttctccaaggcgggatccttccaggcgtcctcgttggggttctgcggagagagagcagggtcagcctggctggccgcgggccgaggcgggaacgacactggggcggggacaggacgggactgtactcaccgaaatgaggatgcagtgcaggtcgcccggcgcacccgcctcctcgccggcgcccacgatagccgccagccgctgcacatcgcccacgcgcactatgtcgatgtcgttctcgcagcagaaagcctggatcagcgtaaaatggatctgcagcgcgatgtcgccctcgtcctcctcacccgcagccagcacacagaaggtcacattgtcggggtccctgcgagggcaaggcggggacctaggtcagaaccggctagccgagttctcccgccgccacccctcccatccgccagtctcctcgccattcacccccgcccctgtctcccagcctgggccgcgtctacacttacacgttcaagactttggctgactcgtagacgccggcagtgaggcagccctgacgctgcgccgacagcagcaactcatgcagcgctttcccggcaccctgcatcctgcggaggagccagcgcagtgagcgggagccggccggagggcgcggcggagaccccagccccggccaccggcacacacccttggctccccaactccaaccacactccaatcccggctcagcgcctgcaccccggctctccaaccgggatctggcgcccggacccccgcgctcccctcctaccccgcggattcccaccctggaaaaccctgacggtcgccgaccgaccagcggctttctcagcgccctgaaacccacctggctgtgctttccggaactgtgtcctggccgcggacttcttccagagtcatagtgcgatcaaccagcagctagttatccacaagcggagagcgcggaggggacgcgggcgaacacactgacagccagagctcagcacggcgcgcccaccaccagcgagtgcgcccctactacgctgcgcgcccttatataggctggtgggtgcggcgccgccagctggcgcgaggctgcgcgcctattggccggcacccgctttctgatgtaaatgaggcggcgagccagcggctcgtgccagaaggccacgtggggaggggtgcgggggatgacaatgcctcaaatctgccgcttttgttggggtgttaccaggcagactggagcctgcagatttcatctcgcctggcttttttttttttttgaagtccttaaaaggaaaaagtaaaaaaaaaaaaaaaagaaaaaacccaacccacaaaaaccttgtttgcttatatgatgctgcaatttgcgaaaagcacctttatagaagcaaagggatttttttttgcattttgtattgctacctttctatttgtttcttttctttaatttgaagtctatgagactgttgcattggagccagaaattaaggtaaaaacaggtagcgccagttagaggcttgcaaaaggcagtgggcacagccccctgcagctgaccactagcgtcccgagcgcgctggtgatgcctgccaggcatactcaatgtgtacattgagccgtctctggaagatcccaccccacctccccgcccttggccgagcgcggcggggcgcgggagacgggggcgggcggggacgagcagattgcggccggcgcacgccgctcgtttgcatttctatggagggcgcacaatagcagaggtctggcgtgtggcggtttgctgtagggacaatcgaggctttctcttcatagcaacactgtccacctgccgccgggtggggtgggcaggaccccgccgcgcgtgggggtcgccgggctgcctggcgcgtggggtcgaggctgagtgccactccgtggtccctgagtgcacgcccccagtactggccctgctacaagtaattcccttccatccgttcctcgcacgggtgccgaacagccgcgcgagttgggaaggacggagagctgctgtgcagtcttcgcggctggacgccctgtggccgggaccccgcggctgcagcccctggagcttaggtaatgcagctcggaatctttcccggggcgccatctgcaggcaggttaaaaagatcctgaaccccttttgtcctcccctccccccaacacacacacccttgcattggcctggcgcgggggaagggcggtggagagggacggccacggagctgcccggccgggcccagtgagccctgtccaagctgcgcataaatagaacccgagtaagggctgcaaaacgcattcaggtgggactgcagttaccctggggagtagagggcaaaaggaaattcccatccagtactgatggagtaagagcccctacgtcttataccatgttgaaatatcttaattacttaaatgcgcatatgtaaaaagccttttttccggcaatggaataagtctggaagagatcttgggagagtttaataggctagaggttgctgccgtttgaccatacacgctggcactttcagaggattcacccactgagcaccttctgtgctacgtgaaaaggcgcgctgggggacacctcattgcttcctttttttgggtgaagccttggagactggccaggacagtggcgggccgggtggattggatggaaacccgggccctgccgcaagactggggcgataatgggaaagtaaacaacgccgtggctttgttcctttcattcaggctttcttcaggtgggtggtgaatgtacaaggtacttctgaatttgttatggggaagtttccattctgcgcttgcaggcaggcacttctgccaaggtgagaagctggcgtcttgcgccccccagcggcttcctggcagaggagagctgcaaaagcccggcccttcctggattctaagaatgaagagcttgctctcctagcatttctgaactccagaggtgtctcctaaggacggggggagaggggagggggaagcggagccaggcggcattatgccc

SEQ ID NO: 588414 - DNA, 4001 bp, Homo sapiens
agggaaaggtgaaaaaactaagatttaagcacacagtgtgctcccaggtattgatgctttattaattcctaagttgtgttctttccactcacttttatgtagaatgcatggagactcacttttatgagtttcctatttcgcaaacgaagggaaaccaaggctctgagaggctaagcagcttgccagagatcacagaagtgacgagcaaaagaaccaggattttatctcccctgggctggatttaatctgaagctgggtataacctgaaagcttcccctccaccttgcctcagcgggcaccctcggggtttcgaggagctaaacatgcgttaggctggtgagtggaggaactactatcaatcccaacaaagttttattcaaaaagactaacagtgaaaaatgcctcaggcagaagcatgaggctaggcatgaggagatccccaaaacagggaagacagtggaaacagtggggcagaggtggggcatcctcattccatcattcatggtctctctggccaaggtaccatggagcaggcccctaaaatcctgagatcagcatggtgccaagtgggccagaagggccatagtccctccagaccagtcctaccacattccagctgaggggccttgggtgggtcacctatcctttccgaacctatttccacacctgtaaagcaggaatggcttgaaggggagaggagtggcaggtgcctggtgcacacggcaggctgccaccaccagctccaatgggaaccccctctctgagtcctcttttcctcaaagtctgtaaggaaggggctcaaaaaaggacttggaagatccctgacacttcgaagaaaaagtgagagcccgggaggcccagcggcaaaggtggcagcagccacctgtccttcctcctgctgccagcgtgtgccctggatccccacctaggcaggggcgcaacctgcccagccagtagctccaacaggaactaggcctctgaccacgctggctccagtccagcaccacccacaggagtgagctggggtggatcacggccagaaggagcccttcccaccccgtgccccttcccgccttcctccacccaaagctcagaaatccaatgcccagggagagcacaaggaggctttctagcgctgagggggccttacagccatctttcgcttcacctgtggggcgctccctcgcatcttgtttgtcccttaggccctggcacacacagagaatgaatggagccggtcaccgcccggaggagttgtcagtttcgcggaggcactgcgaggcgggcagagcggggttgtcctttgggtgctggggggtcctcgccttaaacccttctgcttagccctgaccctcaccttttcagggagatgataacttctcaaggagaagggagctaagagatcactaacagacttgccaatttctggtaattttttttctactttcgtcttttttactttcttgcctccccgcccccatgtgagctcttacactatcgtcttcggagaaagactcaataagacgcgccatcctggagaccccagctccccgccctgccactgctctgatggagaaactgaggcccggggctctgagggcgggcttcctccccagagctgtgcactcacagcgggttccagcgctcgggcaggcggcggtgcagtgagatgcggtcgctgaggtagatgttaatctggtgcagccgcacgctctcctcctgcagccgcagctcctcgccctgcagctgcagccgcaccgcctcgccccgcgcgcccagcgcgttcgccggcaccggcggccgcggcatgaccggctcgcgccgcccggggcgcggggtgcgcgggggtcccggctcggcagccccggccccggccccacgctgcgcccgcagcaccgagcccagcccggccaacgccagtagcgccaggagcaccaacagcgcctcccggccgcgccgcagttcccgcgggcagcgccgccgcgccgtgcgcccccacatgcgcccgccaactgcagccagcgatctgcgcgccccaaggcggcggtggaggccaggacccggatcccggaaccgccgtgccgccccgcccccggcccgccccacctgcgcgccgccccctttccgtccagccccgcgccagcccaagcgcagcccccggggtggctcatttcggcagggtcttcaagtgggctggctgagacttgcatcttccttcttgggctatggtgcattattaaagagatagtggtggtaaaacccttagcgcctggcatattgtaggcgctaagtgttggctgaatacaccctgcagggtgttatgaattctactgccattatctcatctgatctttacacagtccaataaaacaaccatcaactaggattacgagctcccttttacagatgaggagatggaggtgcgatgagatcaacagacaccacgctgccccactgacttctgcaggcccagcctctgccatactctttggagtccttgaatagcaaaccctcgcctggctcgcctcgtgatagctctgtgacctctgaggctaggagcaaaaggccatgaaggctgtacatgatagttcacacctgtaatcccaggccgagataggaggatcacttgaagccaggagcttaaaacgagactggtcaacatagcaagactcccatctctacagaaaaatttcagaattagccatgcatggtggcacgtgcctatagtgccagctactcaggatgctgaagcaggaggattgtgtgagcccaggaattggaggttaccgtgaactatgcgccactgcgctgcagcctggatgacaaagcgagatcctgtttctattaaacaacaaccaaaaaaggccatgaagctgccgccctgttcatgagatcactgctgtgggagccttgagctgccagggacgaagtaagtctaatggagtagacaaatattaaaaagataattagaattgtgttaagtattttgaagaagaattacagggcgctaaaagggcttagaatagtagaacttgatctagtttgggggttttggaaagcttctctgatgaagtaatgtctacacagatatctgaatgtaaaagtgatagcagagatttcaaatcatatcttaaattaatctggaactccctctgctggtgtctagctcagggaaaagaatcattctgtatcccctgtagaaggatagagtgtaagctctatttgttgttgtttgttttaccatgggaagttggtccaaagctttttatcaaatattctcaaggagaccagaagcccagaaagtttaaaaagcacaaatctggtccaattatctcattgataaatgcggggtctgagacacagggtggggagaggaccttgaacttggcggctcaggtagaggtagaatctgacttgctgttgtcttcatacagcctttggctactggtatccccagaggaaatctccctcaggttgcaggaggggggtgggttttgggatgaaccatgcaaagcagctcccactcaggacaacctgctgctaatattagactagagggaagtggctcttcccacagtgctcagggccccgcctgcttcccacgcagaatggaggctgctggttaatgccagaaggcggttgtgttaggtaggtctggacctgagccctttggcctctgttcagacacccaacacatttaagatctgcggtcagattagaaaacagacaaggattacaattcataatgtcttggatccgcttgccaaattggaatgcttctcaatagaggttcagatacagagaaaagagaaatgcaattaggccttacaagacatggacttaagccccaggtaacagataaaagctattgtttactgagcacacactgtgtgctgtaaactgctggactttctttttcatgtactttctcatttcaccctatgacaaccttgcaaggttgacagatgagaatatgtaggctcaagaagtgaagcaacttg

SEQ ID NO: 588415 - DNA, 4001 bp, Homo sapiens
ctggattattgctaaggcctcctagcaagtctctctctactagttcacctctagctttctcctttacacacctctctcatgggataagaaagttagggactccttggggacacagggcttggctctctcccaccttcctgagtagctcctggcggctgtactccattagcaggggctctccatgctgactcttataggcctgctgagatcgctcctcacgctgggcaatatctggcaggaaactgctggcccatacctgtcaaggggcaaaagcagagaagaacaggcaggtcctttacctccaagcctccacatcattggcatatttcctctgtcccatccattaatcctgttcccatgtccacagtgctggctcagactcagccaagaaacccactggagcccctgacacccttacctggcagtgggggtgggggttagaacagcccatcatggcacctttgttttcaaagatctatcagatagggatacggagctctgttagccaaaagacaccaagtcaactccctcctgaccacaccctgtggaaacagaaatgttactccccagaaccaaagcttcatcaccccctccctgcccatccaggggaaggggcgacctcacaaacctgcacccaagggtactgggcacccagctcctctgtgactgaggcccatgcatcaacaacagcccggatctcagggaccgacatgagtggcagcgttacatccgaccaggggtggaagcacatgaccttactgggtggtgacgggagaaaagataaccgagaggtagggcttggctgtgctacgggcagggccgaaccccaatgctgagtctccaactctggtttgaaagttgtaagaggggaaatccatagttaccagactcctcgagcagactttgcttggaaaaggggatgatcactgggtcctgaggtaaaggagtatcactctctgcagcagaagtccctcaagaggtctagccaccctcctccccagcagcagttggagccaggttacctggactgggggcatcaggctgcagagctgggaagtcgttgtcaaacaggaaggtgctatcgtactggggattcacctaccgacaaggataggctagaagcactcactgccccataccaccagttacctggtgggcttcaaagactggacaggctacaagggagtagggaaggcccaccctaggggaccaaaaagcttggtgggatatgacccagaaggaggttcactatccctgtgggtggaggacagttctaagagggaactactccccgtggcccagcctgcagatgcagggctctacaggcttacctctccgttggctcggatggccccaggacacagagggttgagagggtcatggcggggcactgtcttcagaagctggggctccacttgaccctgccagggccgcttcatgcggtgagctgacaccagcacccactcatcctgcagcgggttgtagcggatatgctgatggtctgggggcagacagtcaagatcagtcctcagagctctctagctccctctctcctgggtctcacccaccagcaggcccaagctcgggagcgccctctcggccctgtcccgctcaggagctagaggcccaggattggactttcccagcgccaattggcctgctgctcgtacaggcctgcagactgtacgccttgtcggtctggctcgggatgagcgttccaaccttcggaggggacgaaagcttcctaaggaaggggagggctcggctccgcgccccagcgagtccctgccgcggtgcagttaccgtttgcccggaaggttgctgctgcggcgtccgcctctgacgcctgctggcgttgctgaggatcggttccactgcgcgacatgaggccaccgggggatccgctggaaaatctgcagggccgtgcctcacctttcactttctccgtccacaccacccctccccgcgccgcccccgatgattggccagccgccagcacgtgactgactgactgggctgccctgccacctgggggcggggctcagaacagctgtgaaccctgggggccgacattgatgatcctacttcacccagagctagagccactacactggaagaacctctgtgaaagctgcctactgcagaatccttgggctccaggatgcctacaggacttgcttgctgcaatcattcatttgatctttcattcagcaaatatttaccaagcatctagcatgtgctaggcacctaggctgtgtaaagcattgggatgcacatgtcaggcatggcctctgccctgcctgagcttacattctagggcgagtaaggatatgaccctggatcaacagcgcctcagtcacctgctcagtggctgtagcgcaggagaggcaaacttggtggggtctgtgtggagtacttcaccataaccatatcctatccccaaaagcaaaaacagatttgggaaaaagggctaagtaaccatattctctttttctctcactcttgctctccttcctctctctctctctctctttttcatacacacaccaagacagcacaagaagtgggaggggtaaaagggctataaaaaaaaatctaaaaatggccgggctcggtggctcacgcctgtaatcccaacactttgggagaccaaggcaggcggatcacaaggtcaagaaattgagaccatcctggccaacatggtgaaaccccgtctctagtaaaaaaaaaaaaaaaaaaaattagctggtcttggtggcgtgcacctgtagtcccacctactcgggaggctgaggcaggagaatcacttgaacccaggaggcagaggttgcagtgagccgagattgtgcccatgcactctagcctggcgacagagcagactccgtcacaaaaaaaaaaaaaaaagtacaagaaagtctaaaaatgtggagagtacaggactatcagaagctccagccaccatctaggtggggcctagtgtttcctttacacatccccttcccttttctaaattttccttggatgggaccaattggctaacactaggataaaattcaaattaattcctcccctggtacttttgtttgtttgtttgtttgagagagagtctcactctgccacccaggctggagtgcagtggcgtgatcttggctcactgcaacctccacctcccaggttcaagcgattctcctgcctcagcctccaagtagctggaattagagctgtgtgccaccacactgggctaatttatgtatttttagtagagacggggtttcacatgttggccaggctggtcttgaactcctgacttcaagtgatcctcctgcctcagcctcccaaacagctggcccccagtacttttaaagagccatctaaatattgtctaaacctcttccccatttcacattggagcccagaggactcaaggtcacccagagaattagtggccaagctgagatttgaatgcaagtttccaaggcttttcccagtgctgtgagatgcctctgaggcttcagtggaatgcaggacagagacccagtgagttagaagttgagccatagcagggacatcccttcccccaatcaagaccaagccaagccaggtgttttgcaattgagctgcaaaaactaggtcatgggtcatttacttgatctctgccctagggtcctcagactggaataggaagaggctaccttcagaggtagggggcagggagctgaggactgagaaacaggggttttacctgtcccactggctgttcatattacccaaagaggtgagacaggaacaggagatctgcttttccattctctcatttatatttgtttgagtgactagagcttgtagacagctccattttcccaagaacaccagtgcttcagtgccgccccctgaatcatgctaattaaatcctgacccccatcaggaacatctcttcaggaacatctccataattctcctctatgactccccaaggtcattttttggaggaagaggagaat

SEQ ID NO: 588416 - DNA, 4001 bp, Homo sapiens
ctcagcctaaaggtctggagggtgagtgacctgcgagactcacaagaggggaagctgacagacatacctacagatggagtgctgacagacatacctacagatggagtgctgtgccacttagtgccgacaagaaagctgaggctggggctgggtcagcagccaaattccagttgagacggatttggtcgtggacgtggtcagccacctcagtaaaattggagaggattcttttgcattgaataaacttacaaccaaaaaaaaaaaaacaacagttcttctaagtagacttataaatccaaaaaaccttatttctatttcaggagtttttttgttttgttttgttttttgagacggagtctcgctctgttgccaggctggagtgcagtggcgtgatcttggctcactgcaatatccacctcccgggctcaagtgattctcttgcctcagcctcccaagtagctgggattacaggcatgggccaccacacccaactaatttttgtatttttagtagagatggggtttcaccatgttggccaggatggtctcgatctcttgacctcaatgatccgcccgcctcggcctcccaaattatttcaggagttcttaatctttttgtgcacggacctcattggcagtttggtgaagcctatggtccctttctcagatttcttttaagtgcataattaaatacatgtgattacaagggaaaccaattatatggaaatattagcaaaacaacaaactaatatggtcataatatatgtacagccttattatcacattaaataacaatgtctaacggcgggtctagtaacaccagaaattcaaagaagtgttaaccataaatgatattctgagctatctgcaactgtaaacatgatgcaaaaatatccgtaatttttattgatcacaaagtcataggcgctgctaatgctactctggcttgttgtccacattcgtaactgaaggaaataataagtttcagttagcagtcaataaaaataatgatgtcattttatcctccttctagtgaaaggacccttctaattctatccatcaatgaactccagtttaaaacccctctctagttcaaagtcctgctcagaactgattttcgtcataaatttaaaaataaaaacactgattcctcctttgacctagttctcatctgaacctatcactatgtctccctgtttttatgcacatttatacacagaaccctgggtgtacttctgtggtttgcctagccagcactcactacaattttgccagtcaataaaaggtgaagttaaaagaaaagggatggaaacaaccaacagctccctcactttcagacctccgacagcaagtggaaagatgccaagtacagtgagtgtctgtgttaggtgggctgcccccagacccgtgtgtccagcttgtcaagcttccctgcagcacgatatctttatcagcgacactcagaagacattccatttcgttctcgcctcctatactcagttccctacctgccgggcctctcgtctctggcccccacccgaggccgccccgcggtcctcctgtcccttcccatcccatcccccacgcgtctctccctctcctcagccccaggccgccctggctcctgcgcgccgccacatctctcccctgggtctaacccagtgtcccccgacccccacctcgcccgacactgacgggaagagcccaggaccccggggtcagttggacctgacggccgggcagtcagagacaggctgcggccctaggccggagcaacccggccgcgaggcagggagccgctcacagcccgcggactaaatcgggacgcgtactcaccaagggggtcatgcgggggaggacacggaggactctgtcggaccgccactcggcctcggagccgtcgccctagccggtgactgcccccgccgccgctgccgccaccttcgccactcgcctgttggcttccctgcgtcctgcagcggcgctgccgccacgccagcgcgcgtgcgcagcgccgcgggggcctctgggagctgtagttccgcccgggcggctaggggctcccacttccgccttaggcagccctaggtcagctgccccctgaggctgtcgtgggtgtccgggtccggaatcgtcttccggaaggctgttcaccaggcctgggccctggtttccgcctgcagtaatgctggacgtgaagaatccgactgagcaagtatgtgtaaagcaaaaatgtagagcgttttatgctttctgtgacaacgctcagttgcccaggacacattattcgcatgaatgactctctctcttctctgtttctctctcacacgtacgcacacactacttacaaacctcccttccctttttttttttttttcgagacggagtctggctctgtcgcccaggctggagtgcagtggctcaatctcggctcactgcaagctccgcctcccgggttcacgccattctcccgcctcagcctcccaagtagctggaactacaagcgcccgccaccacgcccggctaattttttgatttttagtagagacgaggtttcaccgtgttagccaggatggtctcgatctcctgacctcgtgatccgcccgcctcggcctcccaaagtgctgggattacaggcgtgagccaccgctgccggcccctcccttcccttttgttctaagtgccattaattggtttggatggtatctggattttcagtgtaaaacctgccttcccacttctcagtttctaaaatcttgcttatcataaacttcaccatgcagttattttaggtaagtcaataaatgaactgtctaataatttttgtaacaccataactcatatattcagaggtcaagttagctgagttgaacagtctagaaaccttaaaattggaagatacctgcttaaaggtcactagtgcaactgttgcccaggcaggaattccctcctgtacattcagccagatggtcatcttcctgttcaacagttcaaatttcagggagctcactccctcaagtaatgcagcctgctccactgttggacagctctaaatgttagaaagttctgcctcctgctgagctgaaatctgtttccctttatttccttccattgctggtagttaggctgcctggagcaatacagaatgtcttccacttgacagatcttcaaaaaattgagaacaatgattatatcctccaatactgggagtctccaggcaaaaaaaggaaaaaagtaataatcatttccccagctatttcaaatgtcaatcaactcccaaactgctttctatctactcacctctcttgatgtcacctttaggggcatggtggcatatgcctataatcctagcactttgcgaggccaaggcaggaggattgcttgagcccagaagttcaagaccagcctgagcaacatagtgaaaccccaactctacaaaaaatacaaaaatcagcgaggcatggtggcttgcacctgtagtcccagctactagggaggctgaagtgggaggatcaccaagcccaaaaaggtcaaggctgcagtgagctgtgatcatgccactgaactccatcctgggcagcagagtgaaacctgtctcaaaacaaaacagcaacaacaacattgacagaattgcttcatatttattgccttgttttatgactacataggtagtaatagaaccacctatggtaggctggtcagatgttattgctatcgtgctgccattcaactcattcaggaattcaatcagctctgttacaagacattactcaatgcaccgctggcatgaaataagcaagaggaggccgggcgcagtggctcacgcctgtaatcccagcactttgggaggccgaggtgggcggatcatgaggtcaggagatcgagaccatcctggctaacacggtagaaacctgtctctactaaaaatacaaaaaattagccgggcatggtggcaggcgcctgtagtcccagctacacgggaggctgaggcaggagaatggc

SEQ ID NO: 588417 - DNA, 4001 bp, Homo sapiens
aacaaatccaaataaaataagcctaaaagatgtggggaaaaaaccacaatgcccacaacagcactgttcttttttttttttaaactcatttttattgaggtaaaatacagtaaagtgcacaaatgtcaagtgttcagcttgaacaatttttacacatacatgcacccagtaatcaccactcagattaagacatggaacattttaaaaacccaagaacgctttcacgtgccctttcccagtcaataccaccctctcaagcccaaaaagtaaccattattctgatttctgtcatcaaagatcagtcctgtctctttttgaacttcatacaaatagaatcatacagtatgtattcttttgcatctggcttatattctcaacagcactgatattcttagagttaaaaactgttcttggccaggcagggtggctcatacctataatcccagcactttgggaggccgagggggcagactgcgaggtcagaagttcaagaccagtctgaccaacatggtgaaaccccgtctctactaaaaatacaaaaattagccaggcatggtggcacaagtctgtaatcccagctactcaggaggctgaggcaggagaatctcttgaacccaggaggcagaggttgcagtgagctgagattgtgccactgcactccagcctgggggacagagcgagactccaactcaaaaaaaaaaaaaaataaaataaatgttcttcgtaggtattaagacaataaaatgtggtttctaaacccgaaaaatagctatacaatatcaaaacatggaaatacatatatatatatatatatatatatatatatatatatatatatatatatatatatattttttttttttttttcttttgagacagagtctcactctgtcacccaggctagagtgcagtggtgcgattttggctcactgcaacctccacctcccgggttcaagccattctcctgcctcagcctcccgagtagctgggattacaggcgtatgccaccatgccccgctaatttttgtatttttagtagagatggggtttcatcatcttggcctggctggtcttgaactcctgacctcgtgatccacccacctcggcctcccaaagtgctaggattacaggtgtcagccaccacacccagctggaaacctatatattaaataatattaggagaaaagcagaacagataatttactctctacaacaacattttttttttcttttgaggagacagagtctcgctctatggcccaggctggagtgcagtggcacaatctcggcccactgcaacctccacctcccgggttcaagcaattctctgcctcagcctcccgagtagctgggattacaggcgcctaccacaatgcccagataattgttgtatttttagtagagacggagtttcaccatcttggccaggctggtcttaaactcctgccctcatgatccacccgccttggcctcccaaagtgctgggattataggtgtgagccaccacgcccagccaacaataacattttatatagacaaagacacaaaaccaattggtgtgatataaaatgtcaatgcttaagttacaattttctataaaagtgcctaagttacttaataatccaaataaactgtattataagcaaagactcaccttaacattgatgtaaattatcttaaataatgcactttgttggaaacagattcatttatttatagttactaatttatttacagaatcatagtggttcacaaaacttaaaacctgaaaatcatctctttacctggttatgataagccgatccaaattgattctctgttgcttcgcaatccatgctgtacgatacaacttttcagctgtcttaagtacatctgcattgagcctctgaatgagctgtttctcagagtttacatataagcgttcctgcttgaggtgatgagccagagtatgaatatctagtttcaccatcttcaatgtgggaaaggctcaaaggctgatcactaagagtaaaaagataaagatttaaagtttatgtatgtcacttaagttcttttctaaaatcaaaagggacaggagaatactttaagaattcagttacatttgggcaggcgcggtggctcatgcctataatcccagcactttgggaggccaaggcgggcggattacaagatcaagagatcgagaccaccctggccaacatggtgaaacccctgtctctactaaaacacaaaaaattagccaggtgcggtggggcgcgcctgtagtcccggctactcagaaggctgaggcagggggattccttgaacccgggagacagaggttgcagtgagctgagattgcatcactgcaccccagcctgataacagagcaagaatcgttctcaaaaaaaaaaaaaaaaaaaaaaaaaattaggttacatttgatgccacttttaactctaattttcaaataatctctatctttttattacagaagtattacaggttcagcatagaaaaattggtaaatacagataagcaaaaagaaaaaaaagctcactgctaaggccaccgcttagagacaggtgctgtaaaccctgtgtatatcctcaaatacaatgtctatttgttaaccccagagttatccttgactgtgctctttctaatcacaatcaaaatatcctgttgattctatcttcaaaatatatttaaaatctgactacttattcccccctccattgctaatcacatcaattctcactaggaggtgcataatcaccacatcctaagtgatctcgctgcttcctttcttgtacttctagagtctgttctctacatagcatagtgaattaaaaagtcagatcacagccgggcgcggtggctcacgcatgtaatcccagcactttgggaggccaaggcaggtggatcacctgaggtcaggagttcgagaccagcctggttaacatgatgaaaccccgtttctactaaaaatacaaaaattagttgggtgtggtggtgtacacctgtagtcctagctactcgggaggctgaggcaggagaattgtttgaacctggtaggcggaggttgcagtgaggtgagatcatgccactgcactccagcctgggcaatagagtgagactctatctcaaaaaacaaaacaaaacaaaacttaagtcagatcacttcattcccctactggaaaccatccacaggctttatttcatgatagaatgaaatctgaaggtcctatatgatctacccctggctacttctccaatttcctctcctacaatcccaccctagttcacacagctccagaacatctgccttcttgctgttccttgaacaggccaagcatgtccctctctcaaagtgtccacatttgctgacctctctgtctggaaggttatccagtatcttcattccattcagatctctccactcaaacgtgtatttagaaaggccttctcagacaactccttctaaaatagaaaatataacttcctaatccctcttctggccttttaaaaaagcactgcccctatctagcattatattacagatatctacctgcatgttaatcgtgcttattgtgaggcttccccactagaaggtaagtgacagcagggccaagccttgtttgctttgttcattcacagctgtaatttcagggactaggagacggcctagttcacagcaggagttgaataaatatttgccaaaggaataaatgaaatctcactactcttatttatctagcagctaaacaaactgatacaaatagcacacatattttaaagcattattatttaagctatgcccttgaatctagaatttgtgccagatcacaaatgttaaatcaacaacagaaatacctgtggcacagataacaaaacataatattgtgtgtctgggcagcagacagtcatcaagttagcaaaaaatttcttgggttgggcacggtggctcacacctgtaatcctagcactctgggaggccaaggcaggtggctcacttgagg

SEQ ID NO: 588418 - DNA, 4001 bp, Homo sapiens
cacattctatctttaaaaaatattgagactattatatgctttcattatggctcttttaaaatgaaaacacacaaattttaaaaatcatagcacaaacactaacacctctcattaaggaaaatgtaaatattttcattccaaatattgatcatccataatagtcatttatctagtccaaccaatatgcttttaatgggaaaaacagctctcataaatattctaactcctactacacacccagaaagcaaacatacagaaaatcagaatacgtatttcaataatatttaaaccttgaaaactagatttataaacttttaggaaaaaggtcatatataagccaaatgccacctttcttaattcataaattgttttatttaattatatacacagagaaaaataccaagccgtaacatatttttaacaaactggaagacaagattaaaaagtatgtaacaataaaaacaaatagataaagaagatcaaattatcatagcctttgtatagttatttattccaatccaatccttacactgtacccacatggtctaacagtaaatatacaacaaaagatctgatgagcttggcaatcgtctctaaatctaaatcaatgtactaccactgaacagacagcataaacttaccagctccacagatccataatgtttcctactgaaatccccacgtctacagcctaggtcttccgagacagagctggaacaaaaatgcttcatcagtattatacatagcgatctggccacaaaccttctgcaaaaatcaactaccatttgcaaaaagggctgctatggaacagacttgcagtgccccggctcctcactgcaggggagcctccttgcaacagacacagtccccagcagccattgcagagcctggctttcatggagccctcaataaaaagcaaacgccagagtcatccctggaagtataggcaatgattcaattaaatatttagtcatttggaatcgattgaaatttccaaggttactggtggtttataatttcatttctgtataaccagagaggagagaagccctgcagtaaacttgaggcaagggacaaagctgctgaaccggatcttgcaattatctttcatttaagagagctctttgtcccaaatatgcaacataaaaataaccagcattatttaatgctatattttaagtaagagaaagaaacttcacaatcgtggtaggctccaccctctgtccccctttaatttaggatttttatgtggcaatatgaaaaaagaccagaactaacagaaaatctaatgtccaagtatattcagctttttacatagcagcagctacccaccccccaaaaaggcttaaatcagatttcaaaaatcacatgttgttgaagagtaattaaaacaagggcaaaattgttactacgttttcatcctgaatgcacagttgcacactcaaaaggcacaaatcttattagttagtatatttagcactcaagcaatactcatgaaaccacatgagatccacaaaatataaacagttttaataagtttgattctaatatgtcatgcaaataactctacgataacatagaaaataaaattatataggaataacatgtttactatattcaaaacatttgggatctaacatgcaaagaaaggtgcatttagtaccttttcatccttccttaaaaggtaggttgcattttctaaattacagccctcttggcacatgcagaaagagactgactctgatgtttagcaaccagagaactgactctctgccaggacactgtttgacaggctccaagaaagacagcatgagagaaatgagattagagagtctaatggcattctgcttccaccatttcacagagatggctgaattaatcttatatgagaaatttaaccttttgtagtcctccctctcttagctgaaaatgggcaacacatcaatgcatgcagtttgaaagtgttccagatattacccaggctacattcttgcttctagtgatatgattttctacccaaaaatctccaaaaaagaataaaaaccttccctccatggtctattccaatctgtattaaatatgtcctctacgcctattttcttagctcattttgaagaccttcctggaggctactgccattcccctacatatcagttaccaagcccgcatcactggccgctccagtgagaggagtgccggtggacttggacagagatcgggcagagagcggatgcccaatggctgttgactaaatgctgtgtctgcccagagctcaacccgccgcttcaatttcagccaggcccactaggaaattaacaacagcaacagcttctaacatgaatagccaataatacgaaaaaagcaaggatgtagagcactgggtcctccctgtgctgccatcagctctgctgagggggttctgagacacggtgccaattccctaactttaccagcagccagacacaaacacataaccctatatcctagacccaccaccttccttagatgcctcacagaaggaaaacaacgtcctatgaaaacaaccagggagcaagctataaagagaatgtccactatgtgttgccttctcttcccccatattacatttcattcaatataccgcagagggatgcttgctaatagtgggaaccaggctgacctatatgggctgcatttcttgggttgtaggaggcattcaaaccagccaagttaaaaagacctagccacttccctcttcctttcccaggctctctggcctctaggcctccagcacaagggttaggagtagaatggctcacccagagctccaaggggagctttgttctcctcccaaggccccagtgtctggcctactgcctggcacatagtggacatgcagtaaatgcttactgcattaatgaaggtatttgtatatcttttgaatcatactagctaatgcctgacagcacctcttctaccagggcaggctgcccactgccacccccactaatgagccattataattctctgctggccattattccctcagtccagagtcctggcctataaggcagccactgctatgtgcatgccaaaacctgttctccttttgtcttggacttggactacctttcctagcccctcttgcaggatgtgtggccatgagactgagctctggccaagacaatataggccaaagtgatggatatgcatcacttccagcacatcctctgaaatgtgcctgatcttctagcctttggccagctggacagagaggctgtagagacctgcaggagggcagagcttcaagatggaaaaacatgggtctctgattgaccacatggaaggccacaccatgaagaacatctgtatggaaggctacaccacaaaaaacatctgtactagaatatgatgtgagcaaaatgtaaacatttagttgtgttaatcaggtagaatttgagtctaccagttaaagctgctgttttacctgaactaatacagaagtaggtatcttgcagtggggtgccgcaatagcaacaccctaaagtagtaggcaggcagcagccagtgaggaaatggatctcagaggctggaaagatagaaatctatattagatggtagcaaaatatttggtaaaacttacacctgcagtcattcagaaggtggaccatgtactcagcaagcctgcagatctagggaaagtggctagaaacaatcagagtgaagttgagcactgtctcctcttggctgaacttagcgaggttcttcacaatgaagagacaatcccaggaaagaattggaggcgtttcaagcaaagacagacaaaaacagaatgaatctagagaccaagggcctcatggacttgagaaatcagtttctggatcccgaacaataacagctctggccaaagaaatatgggtagaaatgaggggcacctctaccagacccagcccttaaaaacttcccatgaaggccgggcgcggtggctcacgcctgtaatcccagcactttgggaggccgaa

SEQ ID NO: 588419 - DNA, 4001 bp, Homo sapiens
tagacctggtatgggaacccaggcctacctgattccaaagcttgcttgctttgtaattacaaagctctttgctaggcaggaccatttgctcattgccttgggacacggcattgccaggaatcatactgttagctcatacctactgtctatcctctctgccaccaatccacatcccacagctctctgcaaggtcttccatggtgtgtctctgagacccctggccagaatgggtgatcccttccttctctgaacccccgtggtgctctacatgcatctctttcacagtaccaattcctactctgacttatagctatgcacctgctccttcaggggaggtggtggtctaagtggtgtggtgtcaccagtgacagacagaacaggtgttgactgaatcaactgaggtatcttttatgtggctaaattcattcttcagatattttatgtgtcttatctgcccagccagaggacagtaagctccttaagaacaaggactgtatcttttactcattttatattttcaagaatacccagctccaggctaggtacacagtcaggtccataacatatgcttgagttcaagtagaacgccactggtacacaactccgctataaatttttctactacttaaactctgcaaggatgcagcttatattaataggggaaaattgggtgctacacaaatagatacaagcaactcatttttaataaatagaaatagtaggcaatgtcattaacagtgttaaataataatcaatataattttatgagcacatttctgaaaatttgttcagattttcacgtaattggaaaaaatcacattctatctttaaaaaatattgagactattatatgctttcattatggctcttttaaaatgaaaacacacaaattttaaaaatcatagcacaaacactaacacctctcattaaggaaaatgtaaatattttcattccaaatattgatcatccataatagtcatttatctagtccaaccaatatgcttttaatgggaaaaacagctctcataaatattctaactcctactacacacccagaaagcaaacatacagaaaatcagaatacgtatttcaataatatttaaaccttgaaaactagatttataaacttttaggaaaaaggtcatatataagccaaatgccacctttcttaattcataaattgttttatttaattatatacacagagaaaaataccaagccgtaacatatttttaacaaactggaagacaagattaaaaagtatgtaacaataaaaacaaatagataaagaagatcaaattatcatagcctttgtatagttatttattccaatccaatccttacactgtacccacatggtctaacagtaaatatacaacaaaagatctgatgagcttggcaatcgtctctaaatctaaatcaatgtactaccactgaacagacagcataaacttaccagctccacagatccataatgtttcctactgaaatccccacgtctacagcctaggtcttccgagacagagctggaacaaaaatgcttcatcagtattatacatagcgatctggccacaaaccttctgcaaaaatcaactaccatttgcaaaaagggctgctatggaacagacttgcagtgccccggctcctcactgcaggggagcctccttgcaacagacacagtccccagcagccattgcagagcctggctttcatggagccctcaataaaaagcaaacgccagagtcatccctggaagtataggcaatgattcaattaaatatttagtcatttggaatcgattgaaatttccaaggttactggtggtttataatttcatttctgtataaccagagaggagagaagccctgcagtaaacttgaggcaagggacaaagctgctgaaccggatcttgcaattatctttcatttaagagagctctttgtcccaaatatgcaacataaaaataaccagcattatttaatgctatattttaagtaagagaaagaaacttcacaatcgtggtaggctccaccctctgtccccctttaatttaggatttttatgtggcaatatgaaaaaagaccagaactaacagaaaatctaatgtccaagtatattcagctttttacatagcagcagctacccaccccccaaaaaggcttaaatcagatttcaaaaatcacatgttgttgaagagtaattaaaacaagggcaaaattgttactacgttttcatcctgaatgcacagttgcacactcaaaaggcacaaatcttattagttagtatatttagcactcaagcaatactcatgaaaccacatgagatccacaaaatataaacagttttaataagtttgattctaatatgtcatgcaaataactctacgataacatagaaaataaaattatataggaataacatgtttactatattcaaaacatttgggatctaacatgcaaagaaaggtgcatttagtaccttttcatccttccttaaaaggtaggttgcattttctaaattacagccctcttggcacatgcagaaagagactgactctgatgtttagcaaccagagaactgactctctgccaggacactgtttgacaggctccaagaaagacagcatgagagaaatgagattagagagtctaatggcattctgcttccaccatttcacagagatggctgaattaatcttatatgagaaatttaaccttttgtagtcctccctctcttagctgaaaatgggcaacacatcaatgcatgcagtttgaaagtgttccagatattacccaggctacattcttgcttctagtgatatgattttctacccaaaaatctccaaaaaagaataaaaaccttccctccatggtctattccaatctgtattaaatatgtcctctacgcctattttcttagctcattttgaagaccttcctggaggctactgccattcccctacatatcagttaccaagcccgcatcactggccgctccagtgagaggagtgccggtggacttggacagagatcgggcagagagcggatgcccaatggctgttgactaaatgctgtgtctgcccagagctcaacccgccgcttcaatttcagccaggcccactaggaaattaacaacagcaacagcttctaacatgaatagccaataatacgaaaaaagcaaggatgtagagcactgggtcctccctgtgctgccatcagctctgctgagggggttctgagacacggtgccaattccctaactttaccagcagccagacacaaacacataaccctatatcctagacccaccaccttccttagatgcctcacagaaggaaaacaacgtcctatgaaaacaaccagggagcaagctataaagagaatgtccactatgtgttgccttctcttcccccatattacatttcattcaatataccgcagagggatgcttgctaatagtgggaaccaggctgacctatatgggctgcatttcttgggttgtaggaggcattcaaaccagccaagttaaaaagacctagccacttccctcttcctttcccaggctctctggcctctaggcctccagcacaagggttaggagtagaatggctcacccagagctccaaggggagctttgttctcctcccaaggccccagtgtctggcctactgcctggcacatagtggacatgcagtaaatgcttactgcattaatgaaggtatttgtatatcttttgaatcatactagctaatgcctgacagcacctcttctaccagggcaggctgcccactgccacccccactaatgagccattataattctctgctggccattattccctcagtccagagtcctggcctataaggcagccactgctatgtgcatgccaaaacctgttctccttttgtcttggacttggactacctttcctagcccctcttgcaggatgtgtggccatgagactgagctctggccaagacaatataggccaaagtgatggat

SEQ ID NO: 588420 - DNA, 4001 bp, Homo sapiens
gtgaaagaatgaatcggtaagtgggacttttctgtttacataggattataatatcctcactggccacaatctgtaaaagtcgatactggcacttttttttgccccctcaaaggaaatatgctaatagacagcccctttgcaaatataattcctccttcccaacccttcaaattgctaaggccccactggtcagcaccttccctttcgagtccaggactactgttctgtcccccacatgcttgcttcctcccggacgtcctgaacactgcagctagctttctggacggcagacgagttgggagtttctggagcttggaattggggcgggggaggaggtccaagaagtcaagctccggagaggagcttcaggggaagtgcccagagtcgtggccggggaaccggctacaccaagttgacttggaaaaagttttgggaagtatccccaaccatcccttctatctgtcccaagccacaggtgcccggcgcggggtcgaggcgagcacgggagtgggacgcgggctctcccgcagccaacggcggggggcgcgagggctaaaagagcggcccaagcagcagcagcaagatggaggcgagtggggtccaggcgccccggggcgccaagcggccgccgccgccgctgctcctgcgcccaggcccatagggcaggtccccgcggccgcccgatgcagcagcgccgctgcccgggcgcggtgggtgcgggacgccgtcgtcgtcgtccagcggctgctcaccacccgcgcccccggtgcgctgctcgtcatcgtagtcctcatcgtagtagtcgtccaggcccccgtccgagccgctgctgccggggccgttgcccagctcggcgccgaagcacaggcgggccatgttctccttgaccgactcgcagatgggccgctcgaggccgtcgcacacgcagtcgttgagcagcgccgccttgggcatagccagcatgtcctcaatgacggtgcggcattcgtccgtgcagcgcagcccgttgaagactttgccgcagtaggtcaggtagcggctcagcgccaggttgcagcggctgtcgcggtcgcagcgccgccgggcctcggtgcagcccatgaccccgcccgcgccggggccgcccgcgccgccgccgctcgtccggggcaggcacggctcaatggcgcgcttggtggacttgcagttctcgtcctgcgcgcagtcacagtcctccagggcgggcccgcggcgcgtgtggttgagctgaatgagggccgagatgcagtgactcgggcagcgccagcgcgacgagaaagaggcggccgaggccgggaaagcggcggcggcggccccgggcgcgtcgcccccgccgtgctgcgccagcaccggcgcgcacgcctcggcgtactggttgtaggcgtagctgcactccggctccccctggcactgcagcagcgcctgccagcagatgaggcggcggccgtgcgccagccccgatccccgcggcgccgagcccagcagctgcagcagcgccatcaggcacagccaggcgcccggcactgtccccccgcgggcctcgccgccgccgcccagcagcgcggccaccatcgcgggcagcggcggccgccgggagaggaggggaaaggagacgaggcgcggggagcggcggacgcggagccggtggaaaagtttgtccaagtcctgcccacttcttgcatgagtgtcttcataaatccatgcgcgccgctggctgatgccccgctggtggcagaaggtcccctttcgctctggctgcggtggcttcctggaaatgaacagctgtcgagatctggtcccgctctcccacccgagagccctccgctcggcccccggtggtggcgggagaggctcactgtcgccccgggggggtgcgggccgcggggccgtggcggggctgcaggaccgcgcggcgcggcgggtgcattttgctccgcgcctgcagatccgttgtgcggccggctgtccccgtgccggctgctcgcgctgcggccgcggcggctccttcctcctgggctcagtgcctcgccgccgccaccgccgccgcggtctctcgcatcgcgccgcttcctggcccggcgtccgcgcgctgcccgccttcccgcggcccggccgccccgcgtcccctccccctccgcccgcggcaaccccggcctccgcagagctccggggagctctttccgggaagcgcggggagaacaagaaagtcggcgctgccggagagcggctccctggcttcactcggcggcagcttctcgggtgaccaagagcccggggagcggatccgctgagcccggctgcagactcgttagcagcgaggctttaaatacaaaagtgggccgggagcccccgcgtggtgccgcggtgccccctcattatgcatgcatggaaaagcaaacaaacaaaaacattagcaacgctcctccggctcgccgagccccggccccgcgcgctccgagcctgcccgctttctcctttctccactctctttcgccctttgctcggccccctttcccggcttttcgagatgctattggtcctgcctgttgttgttgaaagtttttttttttttttttacgagccgctggagtggggttgcggagtgggggagggcgggagggtggtgggcagctcacattcaggcattcagggcttgaaaggaacggcttagggagcctgacggaggcccggagctcctcctactcttaaggaggctcggatatgcagccccagctcgcgcacagaaccagcgggcagggcttaggggcagctgtttgcatccggctcagccacgggccttttttgtttgttttttttttctttttttttttttttgtagttttattaattctcgctggcccccatctgtgctttcgactggattcagaactcagtttatcttccaggctccctgtctttgggtcttgatcaccacagaggggaaggggagaatccagagataaaatgtgagactgaaactgttttaaagaagcatacaagaaagaagcacacactttattagggagatgttgatgagatgcttacaacccgcccgccaccccccagccccagctaggccatctggcaggtaccgcccgtgcgccaggcatcgttttcaaattgcaagaccgaaatccaatcaaccgaaataatttcttaggaagataagcttgcaacacgtgcaataatgaaaaaatttaactagcattaaaaatattcaggaatgtcgagcaattaccacctggccgcagtcacaggacagaagacggaataaatgggcacgcaccaaaggtttatattaaagtgtaagtttcagcccctcagtatatttaagggaggctgctctgcagaggaaacctctgccttctcggcgagggagtttccgagctaccttaactggggcgcaacgcagccttccgccaccagaggcagcgggcgtctgcggcctgtcaaaaactggcgcttttttcctcccctttccgtggagagactatcaactccatctgtcacaaaaattaaggctaaatctcctctccagaagcagagggagccggggctccgacgcgctcagcgtcgggctgtctgcctctccctagaggccaagtgaatttgaaatggcaaaagtcacagccggaggcccagcactaggagattcctccggctgcgggaaatcttcctgtacctgctgaagctgctgcgttcctcagaggcgcttggtctgccgtgggaagctgcacctctgcagtccccaaaaccaaaatcaaaccttaaaagagccagactgaggtaaggcggaccgtcttgctctgatttgagtattggtagacaaacagcaatataaatcgatactaaaaaaatccagaaaggctgcaacttcatggcacatcaaaacaaccatatccctggctctctgtctctttttttttctctattatttggagttgtcctctcagtccggcctggaggacttggacaactcagac

SEQ ID NO: 588421 - DNA, 4001 bp, Homo sapiens
gctaagaggctaggatgcccatcttttcttgatctcattgttcctaccacatgcaactcagtgtacttctctatgtacactagatcctattttgatgcaaaaacttttggggtcaaacttggactgaattgattccagaagcagcctggagggatgattcttctctgctacaggctacccacaggcaccaacaaagccagatgtgcaggcagcatcaggcccttcccactccccagggctagggttagataactgatctccccatcacagccccacagcactgactggggaaatgaagggtctcctactctagaaactgtaagggcagggtttcccaagctttatgcctccctccacagttctgtgtgtattgtgtagactgagtcaggatgacctcagggtgatgctttctgtcctcacatccacctgttcctgttaatgggtctggctcctcatcactagtctttgaactcagtggggatctagatgggttctacatctatggcagtgcctctctgataaatgacttaatatcaagagctctctatcccagaacagaatgacagcaccttctcatcacttcagaggtgagggcagggaggctcttcttacctactccctggagctaaagcttgaagaaagaagcagtagtgttgggactctaacagtgtgtctaatgaggtacagagaatgccccagctgcttgtgggaaataaggggttgagacccccccacccccaaataaaacaacattgtgttagtatcacagcagccagattatcctttcctaccttgccacaaagtatagctaatcccaaagggaagtcattggaaaccagtatgtgagaagagcctgaatgggaaaggctgattgcatgaccaaatgttcctaccctttccttctgaaaagacaaaacactgggagggaagggtgttgcaaagagatgtgacctggtctcacggtccaaaaccacaggcctaaaatatgccagggatagggaccgcttcactcagacaagaagcccaactgctttcttgccctttcccacctctgctagaagttttgagctggaacaaagtgaagccaaaggcattctaggcaatggggtctactcacctcaagcccatgcctatatgctttatcatgttgcttagggagacgttgttagcttgaaagggtttcctcttctctgtaaactcatgagccagacagatgcgccagccaaagggaggcacctggtagcccatagctttaccctcataggaaaccatcagctgcccagagtcctccggattgcagcagtccgtctcttttgggggtcggctgtcttcgggactcttacagtctgtaacctgcacatccttggtgccgccagtctcttcagggcaataaacttgtggatcctctttggcacagcttatctgctccgaggctgggacgccggttcccatgttccctggatcctgggtccccatgacctcgatggcgccaagtcccgagccctcggatactaagtatctcgccagcctattccagatgcgggcgccggtcgttgttaggtatcgtcccggagggccgggcgttggggaaagcttaaatgagctggtgtttcagtggagccggggagctcttgcttcagtgggggcggcgacagcaaagaagccgccttgggctctccttcggttgtctctgtaggtcctggacgggaagggtcgggcctcgtcgtcattgagccgacgattagctcgcccggccaaagggcgactgggcccgcagagaggggaggagccgcggggccagcccaccaggcaccgccccgggacgggcccgcaaggcaccgcccccgggacctcggcccggcccctgggccacggcaccgggtcccccaggattgggcgccaggtcccgccggccggctccggggcagcgcccgcgcccaggtgccagcccgtgggaaggtgaccctgggcgccgggatgacccgagccctttccggtctggcctgccgggcgcttccggccggaagggactccgcggagggtgggggaccgaagggaagtcccgcctctaccgcccagcggacgccgccgccgccgccgccgccgcgtacctagccaggtccctgaggggcgggcagatgaggcctaggggtgccgatccctagtgtcgactatgcgaggtgactagcggcggtgatcttgggctgggacgtggaactttgaggaaagggggagcggaggccagtttgggaactccgcgggggtgcccagggagaagaacccgtcgcacaggggctggggtctagggcccagagcgatgtcctccccctgggcagtactgagtcttcagtcgcctccctcccacccgcctacccctcctatatccaggagctccctcgggcaccacggtgctgaccacccctgtcctcagccctcagccctaggtgctcaccgcaacgcccctccctgtcaaggtgctgacctccgccccgccttgtttccttctagatctgattccggagctgccatgattgaagtggtagcagagctcagccggggtcctgtatttttggctggggaggcgctggagtgtgtagtgaccgtcaccaacccccttccgcccacggccacttctgcatccaggtggggatgctggcactgaaggtggtggcccttctgggaagaagccagattatctctggggctgaggcagagctcaggttgtcctgtagcgacaccacctcctcttgctcactgtgctgtcattgtaggagagggctctttaacagaagatgtggatgacatagctgtacgctttccttcccctcccccgttcccctttttacgcacagtctgctactctttatttaatggtttctctttgggattgtggatttcctgatcactaggacagccatctaaccttgttggttaagatggtgtgatagggagcttgggaaagcatttgtgaggtcaggaactacctctgatgcctccttttccttttcccacagtgaggccctggcctgggccagtgcccaaatccactgccagttccatgccagtgagagtcgagtagcactgcctcctcctgactctagtcagccagatgtccagcccgacagccagactgtctttctgccacaccgaggttagagaggggcatttgcctgggagagggggggtgcggagggtgtgtgtggaggcattgtcacccatgggtgaagttgttaattgttcttgttcttatagtccctgtcatgctggggatgttggggagcatgactattgctttaggggtagaagactattcccatttcacagcagggacggagggcctggcagcctttcactatctccacttgccgtgctagtcttgttcagtactggacaatgggtcattaaattagtcatttttacctttttcaggtgagaggggccagtgtatcctttctactccaccgaaaattctattctgtgacctgaggcttgatcctggagagtccaaatcatgtgagtgattgtccccatccctgaattgccttctaagtctcctggagggaggactcctctggtgcctctggctgtcctgacaactacttcccaaccagactcctacagtgaagtgctgcccatagagggaccaccctcctttcggggtcagtcagtcaagtacgtctacaaactgaccattggctgccagcgtgtcaactcccctatcactttactcagagtccctctgagggttcttgtgctgactggtaagcaagggctcctggagggaagggctggggaagggcgatgccaaagcagaaattgtcttagagggcttgcaagagggactgcagggaaacttcctggtctcagtgacagtgctagggagttgggaagggagggagggttctggagatagagatgtaaacctcagccctggcaccccttacctttagccatctcatgttagaatctaaaaccctaacctctactctcatctccgttcc

SEQ ID NO: 588422 - DNA, 4001 bp, Homo sapiens
ggccagtacaaggcagaattcagaagccggagacactagttgggtcttgttggggctggggttggagaacaggtgagtcaggaggggttggtgggatctggaatcctatgaggagatcaaggttttggggttgatctgcagagacagggggagtcctgggtggggatagagacagggagagtcctgggtggggatagagacaggggaagtcctgggtggggatagagacagggggagtcctgggtggggatagagacagggggagtcctgggtggggatagagacagggggagtcctgggtggggatagagacagggggagtcctgggtggggatagagacagggggagtcctgggtggggatagagacagggggagctccgtggggcagactcaccacaggacactgaggcttgtgcccgccaacaggcagaaccccagacccagggccagtctccggcgatgcattgctgggggctgcacctgagcctgggcacttgtagagacccccactggcctgggcggatgaggctgtcccctcgcagggatgtcaggctctgagcctggtctctgaggtcccaggaacacctgcaaaggaacacttttgttgttttgagatagagtttcactcttgtcaactgggctggagtgcagtggcgcaatctccattcactgcaacctcttctcttgggttcaagcgattctcttgtctcagcctcctgagtagctgggattacaggcacaagccaccatgcccagctaatttttgtatttttagtagagaagaggtttctccatgttggtcaggctggtgtcctgacctcaggtgatccacccgcctcggcctcccaaagtgctgggatgacaggcttgagccactgcaccgggccaggaatgctctttatggggagacggtgaccccagccctgcagccctgccctccctcggtcacccactgcggtcatgtggactctaggtcccgctggaccccgggctcagctctggcagctctgggaggcgcacggtggcagtggctcggtgctcagctgttgcttccagctgtcctttgggagaggggctgggaccgacttcgcagaggccgcgaaggcggatccctgccttggctcccgcgtctccgtactaggtccattgtcagaggtgagccgaggccgccgggaggggtgcatgggccagtccaccgtccgctggaaatcaagcaccgaggcacagcgaggacacatgcagtcccagcgcaggatgcgcgggaaggggcgcccaggattccccgaggggagcgaggtggccgctgtccacctctccgggaggcagggcccgggttctccacggaacgatgggaacgcgcctcaactcgctggctcgttgaccttgggccagtcatcccctgctcccggcctcagtggatggggggcggcacgcggcgcccggggggaggacacgcgggaacggctgtaaaacgctgggcgcagcccgggccacagtgagcggagagccggggtcctggggattaggccgctgccactcgggagtgtccggcaagccctctccctctctcttcctctggggcctcagtttccccactcgggcctccaagccccgtctcgcccccgcctcccgcgaacgcagagcccagccccgagcgccgccggccccagtccgtggtcgggacccgggaccctgggtccgagatgcgcacctcctgggctcagggccctcctccttggccccttgcgtggcagggactgggtggggccaagggagcgcgactgtccctacggggtgcagacttactccttgctgccggcccggcgttaggacggttggaggggcgccaccccggcgcggaaaacggactcagctggcctgggcccccgcgatacccgggcgatcggcggcgcaggtggagcctggagcagggcaggcagcggggccgcgggccagacagaaaagaggaagacagacaggaaagaggacagaaaagagaagccagacgggaaagagggcgccgcagccccgcccacctaccgcaggccccgcccctgcggtcccagagccccttccctgcggcctgggagcaggatcccgggggaccgagcgcctgagctgacccctgggcctggcttccgctagccgcctagaactctgcctaggatgcagcaggcccagctcggggggccgagaaccgcaggtccggggccatggtagggtgcgggtggagaaatgaagcgatttgtggggaaaaccttaccttgtttataagagctttgaagcagtcacggaaagggagaaccagctggacgcagcttgctgtccggtttaggatctgtcctcctttgctgggggcctctgagccaggcgcccctacccagcgaggggacacaagtgagtggctcccagaattacccggagcctccgtgttctcttctgtgaaatgggactggccacactttcttcccacggcctgtcggggttgcattatcccttccacgaagggctactcttttccaccccagggactctgggaccccaggagagaccctcttgcagctcaccagaggtccgccagtgcatggggtagaaagttttcgtagcagaaacctctcctaggaagggtgcgagaggggagggacagtaaggcgaaatgaaggggccctaagggaaaataaaagagagagtgacccaaggggtggggggtgggacccagccagagacgggctcagagaggttatgggtgtgctccaggtcacagtgcagctggaagttggaaacccagccctgcctggtgcctgggcacagcctcccaggcccctcaggggtgtgatgattacctgtgtccttggggtttctctagagcaccttggggttcctgtaaggcagggcctgttttctcagtctgcaggagcctggcaccggccctgggagctggtgagtgctgttcaaaagg[450 bp omitted]gaaataggaatgtaggcagagacttgcagtgttcaagggaaccagaaagaacaaatccaagccaggcagagtgggagaagagcagtggggagaagagtcactgctagccttccagttctgtctctctctgtctctgtttttctgtctgtctctctctatatgacttaaagaaaactcttattaaatattacttaaggccgagcatggtgactcaagcctgtaatcccagcactttgggaggctagggtgagaggatcacgtgagcccaggagttcaagagcagcctgggtaacatagcaagctatgaggctggagcaagggtgccagagtgagactatgtctcaaaaataagtaaataaataaaatttatgttttacttaatttttttttaatggagtctcgctctgtcacctgggctggagtgcagtggcgtgatcttttgagatggagtcttgctctgtcgcccaggctggactgcagtggcacaatctcggctcactgcctcccagttcaacctctgcctcccagttcaagcaattctcctgcctcagcctcctgagtagctgggattacaacatctggctgatttt

SEQ ID NO: 588423 - DNA, 4001 bp, Homo sapiens
actcggtggaaatggccaatatccacccagccttagcaggttcctctgcagtcacctgggcccaaccaagcactcttgtgcattacctgtttagtccatgtggataaagtggattttgtgatcccagttttagggaaaaacgtttttcttactgttaagcaattcaattacaaacggaaaaggagtaactccttaaaaagtgagtggaagcattgctatcattaatcaagaatgaactataattaatgaaggatagaatctagtacaaacttggggccaaggctaaggagatcctttacagggccaagttgaaggacgggcagaggaggtggcagtgaccgtcaaaccctcatcatgaaatggaaaaaatatcaacctctcggccaataaaactttttaaaagtaaattcatagtttggtatattgtattttaaaataaaggagtttgccatttctaagaaatcagtttcccaaaactaccattttaagggcccgaaaaaaattcctttaagaaaaagcaggtatctacacagtctgagttttcctccctgctagaactgaaatctgttacgaaagcctccagcaggggggcctgcctggaattgcctaagctcctagcaggtaatttacactgatctttaaaaactactaagccctcctcctcccctctataaaacaaaccggcctttcagaacagctctggaaggggggcagaatgccagacgaagagacaacttccagaccacgtctctcacctcccacccatcaaattcagcccacaaaaagctgtggccgcattctcatctcaaggcaccacggctttctttgaacaccatatatcttcccaattggcctcttgccccattatgtgtaaaaaaccgactctcttttctgcagaaagaaataacaaggcaaagggtgtacagggcaacgtttatatgcatctacagcatgccaggtgcctacagaacctacctcggcctaggcggtccgtgccctagccgggatctgcaggcgccctcatccacgctgggagacgggaagaggagagggaggcgtgacaggcgagggtgcctgtgctgcgcagaaagcgctgccaggagaaaagaagcagtgagcaagggcttcttccatttcaaaaacctaataaccaaaacttggaggaatctgcctgagatacttaaaaaaaagaggaaagagaaacctaggagggggtaaaatgcttttaagacgaatcacttgttttcgtaatagaccctgcgcgcgagtttcctagactgccgcgagaagaaggaaagcgagggagcaggaaaggagaggcttcggagcccctaaactaacgtctcttttcttattagtaatagtttgctccagggtgagtcatttattatcctagcgttggcctctttatcagtaaagtaggggtgaaaatgcatcttagccgggctggcgttaggattcaatgaagttaaatgaagttaagcccctggcacccatgggatggcagcgagtctgttcgttccctgcctatccacgcccgcagccaacccctccgacatctaagctacacggaccaggggcaagaggccagaaagtgactttcaggggacacggggcaccggcgtcccagccccactgagcggacggaaaatgaaggtggaaggaagaggcgccgctccattccggtcccgggcgcaccccggttctgcttcctcctccgcgggggagcccagcccgcccggggccacggggcactggctgagagccggctccctcccacccatccttctcagccttcccccaccgccgggcggccgagcaggggaacacgagggagagccggttacctggagtgggcgtctgaccccggagtctcaggaggatgcccagccgctcctgctccaccaagctcccgccccgcgccgcgctctaggcgctccggagctgcgcctgcagccctcacaccagcgtggcccgccccggggccgcccccagaggccccgcctttctaggccccgcccaccacgtccccgcctcgcccacctgcgcgagctcggggctggggacttgctgcggactcgcggttcccgcctacaggcgagggcgccctctgggcactgacgtggtctgggagtagcgctgcgatcctagtgcttcctcgctcctcttcctcactgtgctctgattcttaagaggtgtgtgagcggcgtctttttaaacattttatgcctcccttcctcgaaagcaggaaactcgagaaatgctgccttttctgattttaaacatgaaaatatgttacagaacaacaataaaattaaattccaaggttctcgatatgtaaagtttagagataaccatgtaggtgtttttttctctcccctaacgaaccttgcttcctaaatttagcatttaagaactcattacattcatgtgtatttccacataaaaattaagatcaaattaaactgtggaacaatccacagtgctgtggaaagtaggaaaaaaccttccccgcccttatagcacagatctttgtgtcagttataaaagttgacacagttctctttgtaacaaggggaatattgtgtctgtgtcttctttcgttggatttttagctcctagaaaacagaacgaggtcttatttgtttccatgttgtttaaaaaaaattctggccgggcgcggtggctcacgcctgtaatcccagcactttgggaggccgaggcgggcggatcaccaggtcaggagatcgagaccatcctggctaacatggtgaaaccgcgtctctactaaatatacaaaaaattagccaggcgtggtggcgggcgcctgtagtcccagctactcgggaggctgagtcaggagaatggcgtgaacccgggaggcggagcttgcagtgagccgagatcgtgtcactgcactccagcctgggcaacagagcgagactccatctcaaaaaaaaaaaaaaaaaaaaaaaaatccaactcagaggccattagactgtgatatgtttgacacttgcctgatttgtcaacaaaaattaacataagatgatggtatagaggaagaaagacttcccctctactctctgaggcttggataactaagtctatgaaataaattgactgcaggtagattaacaagagaaaaagtacacagatttcgtgtagggggtatcacagaaaagaaaaactaatattccctctgcctcccccaacaaaaactgagattttaggagcttgtgtatcctcttcattggggagggacaatttaggggagaggaaatgattttgggaaaaactcctgaactccttcaatggctagctttgtttaatatctcatgaaatttttcatgagcaattcaagcataattgttaagagcaagtagattaggtaaatgtaaatggaataaaagtttataaacttttaaaaataatttgttttataaaatttgtctacttaaaaatagttttaaaaatcttttttggtgacttgaaatttcgaacatattaaattaagtaatagatattcattaaatgtctgagtcatttgtaagttaaaatactgacatgttaattgctaaacataagtttaaagtatagccggggctgggcacagtggctcatgcctgtaattccagcactttgggaggccgaggtgggtggatcacctgaagtcaggagtttgagtccagcctggccaacataccaaaaccccgtctctactaaaaatacaaaaattagccagctgcggtggcgtgtgcctgcagtcccagctactcaggaggctgaggcatgagaatcgcttgaacccgggaggtggaggttgcagtgagctgagatcgtgccactgcactctggcctgcgtgacaaagcaaggctccatctcaaaaataaataaattaattaattaaaaataaaatatagctggctgtttgcaatggctcacgcttgtaattccaacactttaggaagccgaggtacaagtatcacttgagcctggg

SEQ ID NO: 588424 - DNA, 4001 bp, Homo sapiens
cccaaaactggccataaacaaaatctctgcagcactgtgacatgttcatgatggccataatagccatgctggaaggttgtgggtttaccggaatgagggcaaggaacacctggcccacccagggtggaaaaccgcttaaaggcattcttaagccacaaacaatagcatgagcaatctgtgccttaaggacatgctcctgctgcagttaactagcccaacctattcctttaattcggcccatcccttcgtttcccataagggatacttttagttaatttaatatctatagaaacaatgctaatgactggcttgctgttaataaatacgtgggtaaatctctgttcagggctctcagctctgaaggctgtgagacccctgatatcccacttcacacctctatatttctgtgtgtgtgtctttaattcctctagcaccactgggttagggtctccccaaccgagctggtcttcacagacggggtttcaccatgttggccaggctggtctcgaactcctgagctcaagtgatctgcctgccttggcctcccaaattgctggggttacaggtgtgagccattgaacctggcctctatttcaaaatatatccagattaggatcccttttacccatctccattgctaccaccttgggccatgctactgctgtatctcacctgacatctcctgcttcctctcatgccccacatacagcctgggattacaggcatgagccactgagcctggccagtgtttgttttgttttaaatccattttggctttagtatattcccaacatctataaaagtgcttggctcaaagtaggaggagctcaataatatttgatgaataaataagagaataaatgaatgaatactttatcttcatatggtactttgtaacttaagaaccattttcacatttctcttactacttctgataatcggataatcagataaaaccactgtgttagtttctttctttcttttttgagatggagtctcactctgtcgcccaggctggagtgcggtggcatgatcttggctcactgcaacctctgcctcacgggttcaagtggttctcctgcctcagcctcccaagtagctgggattacaggcgcctaccaccaagcccagctaatttttgtatttttagtagagacagggttttgccatgttggccaggctggtctcgaactcctgacctcaagtgatccgcccacctcagcctcccaaagtgcttggattacaggcatgagccatggcgcctggtcacaactgtgttagtttcttattgctgctgtaacaaactaccacacacagcatggctataagcaacacaaatttattttcttaccgttctgtaggtcagaagtctgaagcaggtctcactggcctaaaatcgaggtgtcagcagaaccgtgtttctttctgggagctttagaggaaaatctatttccttgccatttctagcttctcgaagcctctctcattcattgactgtgggccttcctccggcttcaaaaccagcaatggtcagttaagtccttctcagatgaagtcactgtgacctctgcttctggcttcacatcccctgagccagagctggtgaagagaggtgtctctgagtcacactgtgcgaattgccatggaacagagttaagctgttttcacattgatccgtatcacaagtgagtgttttccccagctctgagtcagtctttctttttaaatccaaaaccatattattaagtttttaaaaaatcatgattgctttacttcttcaggtttcaggtttctcagacataaaaccttaaaacagaaatgaatacctgatgattgcattccagttgtctgcattacccattaagagtctctgaccttttctggtcccaggaaacctcaaagaataatctgcattttccacttcataggtcttaatgggagcaggactgtggaaggtgacactgcggcttctccctccttaacagttcacctatggtctgtctggtatgactcacactttcttcgtgtctcaaatttcccacatacgaaacagatactatgatgaaaatatagcccatttaattatgtgaagtgttttgaacaaaattgttataatgtcttagcataatgtggactttttgtacatcatctagtctgatggttctcaccattgctacccactggaattacttatggaaccttaacaaatcctgatgctggctgagagtggtgatggctcatgcctgtaatcccagcactttgagaggccgaggcaggcagatcacctgaagtcaggagtttgagaccagcctggccaacatggtaaaaccccgtctctactaaaaataaaaaaattagccaggcatggtggtgggcacctgtagtctcagctactctggaggctgaggcaggagaattgcttgaggccgggaggcggatgttgcagtgagctgagatcgcgccactgcactccagcctgggtgacagagcaagacttcgtctcaaacaacaacaaaaatcctgatgcctaggtcctgcaccaaggattctgatgtgattgctatggaatgtggcctaggcataggtttttttgtttttttttgagatggagtctctctttgttgcccaggctggagtgcagtggtgtgatcttggctcactgcaacctccgcctcccgggttcaagcaatttttcctacctcagcctcctcagtagctgggattacaggcatgcaccaccatgcccagctaatttttgtatttttagtagagatggggtttcaccatgttggtcaggctggtcttgatctcctgaccttgtgatccacccgcctcaacctcccaaagtgctgggattacaggcatgagtcactgcacccggcaggcataggcatttttaaaagctccccagctgattctaacgtgcaaccaagtctgggaccagggaagactcctcttaggtagctctaaacaagctcttgtggatgagccactttctggacccagtccccaagtcatcccctgtgagtgcagctcattctcccctctgggttttggtcctagcaaccatcaggaaggagacaggacaggtgggtgcaggacctcagccccacacagggcagggggacacacaggttgcaacatcatagtgaaaaggaccggaatctgatgaggacacactggaaacatggtaccactgtaacccaggtttcctcctcacctgtggagcaaatataaatcagggaaatgtagattgatgtcaccttcattcatcacagctttagtgaaacctggcaactggggaattttttgttcacaaggcaaacaaagtcttcaatttaattcctttaaattccttgaagattatattaactagtaggtgaggttaagacttttgaaagtcatgtgggtattgaactgaactgctcttagaagaaaattcagagagaaggtgatgtgggtcaggagcaggaagagatgctgagccaagaagagagatttgggacatgagatacctcaaaaggtttgttagtttattcattttttctttttttttttttttatttttgcgacggaatttcgctcttgcccaggctggagtgcaatggtgggatttcggctcactgcaacctccgcctcctgggttcaagcgattctcctgcctcagcctcccaagtaactgggattacaggtgcccaccaccaagcccggctaattttttgtatttttagtagagacagggtttcaccgtgttggccaggatggtctcgatctcctgacctcaggtgatctgcccacctcagcctcccaaagtgctaggattacaggcatgagccaatgcgcccagccttggtttatttttaagtgcaatcttgatatcatgtggtacaacttctctcttctagcttccttctaaaatattgaataaattttatattcctcactattgcattcatattagtgcaaggagagcactgttttcaaagaattcaaagaggaga

SEQ ID NO: 588425 - DNA, 4001 bp, Homo sapiens
gagcccgcattgccaagtcaatcctaagccaaaagaacaaagctggaggcatcacactacctgacttcaaactatgctacaaggctacagtaaccaaaacagcatggtactggtaccaaaacagagatatagaccaatggaacagaacagagccctcagaaataataccacacatctacaactatcttgtctttgacaaacctgacaaaaacaagaaatggggaaaggattccctatttaacaaatagtgctgggaaaactggctagccatatgtagaaagctgaaactggatcccttccttacaccttatacaaaaattaattcaagatggattaaagaattaaatgttagacctaaaaccataaaaaccctagaagaaaacctaggcaataccattcaggacacaggcatgggcaaggacttcatgtctaaaacaccaaaagcaatggcaacaaaagccaaaattgacaaatgggatctaattaaactaaagagcttctgcacagcaaaagaaactaccatcagagtgaagaaccaacctacagaatgggagaaaatttttgcaatctactcatctgacaaacggctaatatccagaatctaactcaaacaaatttacaaacaaaaacaaacaaccccatcaacaagtgggcgaaggatatgaacagacacttctcaaaagaagacatttatgcagccaacaggcatatgaaaaaatgctcatcatcactggccatcagagaaatgcaaatcaaaactgcaatgagataccatctcacaccagttagaatggcaatcattaaaaagtcaggtaacaacaggtgctggagaggatgtggagaaataggaacacttttacactgttggtgggactgtaaactggttcaaccattgtggaagacagtgtggcgattcctcagggatctagaactagaaataccacttgacccagccatcccattactgggtatatacccaaaggattataaatcatgctcctataaagaaagacacatgcacacgtaggtttattgcggcactattcacaatagcaaagacttggaaccaacccaaatgtccaacaatgatagactggattaagaaatgtggcacatatacaccatagactactatgcagccataaaaaaggatgagttcatgtcctttgtagggacatggatgaagctggaaaccatcattctcagcaaactatcgcaaggacaaaaaaccaaacatcgcatgttctcactcataggtgagaattgagcaatgagaacacttggacacaggaagggggacatcacacaccagggcctgttgtggggtggggggaagggggatggatagcattaggagatatacctaatgtaaatgacaagttaatgggtgcagcccaccaacatggcacatgtatacatatgtaacaaacctgcacattgtgcacatgtaccctagaacttaaaatacaataaaaatagataaataaaatgtattgctagaaatacatatatggctttacccatacaaatttcattaattcccttgaaagccaaaggaatgtccatgattgcattgtatctgaatgaagaccatcctaatggttaagaaaaagcacgtgataaacaagatgtggtatatccatacaacggatcagtatttggtcttaaaaaggaatgaaattctggcttagggtacaacatgaatgaatcctgaaggcattatgctaactcaagtaagtcagacacaataaaacagatatgctattgtgtctgaaatttattccttctggtgggttctgggtcttactcaccaagaatgaagctgcggaccctcccggtgagtattacagctcttaaagatgatgcatctggagtttgttccttcagatgttcagatgtgtcctgagtttcttccttcccgtgggttcgtggtctccctgacctcaggaatgaagccgcagaccttcgcagtgagcgttacagctcttaaagatggcatgcccggagttctttgttcctctcagtgggttcatagtctctctgacttcacaaatgaagccacagaccctctcagctcataaaggtagtgcggacgcaaagagtgaccaacagcaagatttattgtgaagagcaaaagaaccaagtttccactacatggaaggatacctgagcaggttgccgctactcgctgggatggccagcttttattcctttatttgtccccacccacatcctgctgattggtccattttacagagcactgattggtccattttacagagtgctgattggtccattttacaaagcgctgattggtgcatttttacagagtgctgattggtgcgtttacaatctttgagctagacacagagcgctgatcggtgcatttacaatcctttaactagacacaaaagttctccaagtccccactcaacccagaagcccagctggcttcacctctcactaggattccacttacagaggtacctagagtagtcaaatgcgcagaggcagaaagtagcatggttgtttccagagctgggggagggaagaatggggagctactgttttcatgagtacagtttctgtttgggataatgaaaagttctaggaatggctagggtgagatggctgcacaacagtgcaaatatgcttaatgcactgaatttcctcagatttaaccttgggagttttcagtctctttgttatgattttaaaagatgcagctgtcttactacgacgtgactagatgcaccttcagagcaggtaagtgaatgagatgaagaatgttacatggaagaggctttttttttttggagacagagtctcactctgtcgcccaggctagagtgcagtggcatgatctaggctcactgcaacctctgcctcccaggttcaagcaattctcctgcctcagcctcctgagtagctgggactacaggcacgcaccaccatgcctagctaatttttgtatttttaatagagacggggtttcaccatgttggcaaggctggtctcaaactcctgacctcgtgatccacccgcctcggcctcccaaagtgctgggattacaggcgtgagccaccactccaggccccagaagaggcttttaaaaattaatttaagaggctgggcgcagtggctcgtgcctgtaatcccagcactttggaaggccaaggcaggcagatcacatgaggcaaggatttcgagaccagcccggccaacatggtgaaaccccgtctgtactaaaaatacaaaaattagccaggcgtggtggtgcacacctgcaatctcagctactcgggacgctgaggcacgagactcgcttgagcctgggaggcagaggtttcaaacgtgagccaagattgcaccactacactccagcctggtgacagagtaagactctgtctaaacaaataaataaataaataaaattaatttaagagaagacagtgaagaacaatatattagaataagggaaatataagtaggtatgaccgcaggttgtctgaaaaataacctttttgagtttagtgtcatgaaagtttagagataaaagaacaaaggttgtccaagtttctccaaaaggccagtgtgtttccgactgcctgtgcacatttactgttaccccaatttgcttaaagtataagtaacagcgaaacacagttttacatggaaaaaacctgtcctctcaggcaggagacttcatttgcagaggctgactttgatgggcttgagcagaaatatctgtttatatatacatacagaaaacaaacagtgtttttttttttaaatagcaatcttcaacctcattatcattgcaggccaaaaatgagaataaaagatctcattgtctactttgaaattccacactgaagagtaatggacttttttctttttctctttttttttttcaaatctaaaagtaggcagtttataataccaaatagaacaccacggttttatggaaacaaaattttggattggaaaattaaagttca

SEQ ID NO: 588426 - DNA, 4001 bp, Homo sapiens
ctttttaaatttcactgttaggatctcaagctttaccttttggatttcatttacatcaccctgtaaaactttggtgcaattaatatcactactaggattctccccagcaagctccaagtgtctgacacttacaaattcaggcttttgatgaatccttaaaacggagaaggtgattagggataaaacaagaaccataaagtagtatttggtgggataagaaaaaagtctccttcgcagcaacgtcctcagcatttcaaacaataatcagggatttcctttgtgaagggcagtcttctatgctccaagcaccaatgattttccctccgtcgtggccttgaaggttgtcagtttgcatttatcagagctgcaacggcatcttgaaatgaagagcagcactgaaataaaagaagcaattataaatataaataaatatatatatatatatatatatatacagagagagagagagagagagagtttttcacaataaatcttctcaggctcaaaaaactgtcctctttgctatgaggttaggtttaaaacaaaaacaaagtggctgaatcagaggataaattgtagtagtacaggaagcccacagtctctagtatttataccacagattgaaaaagaaaacaaaagaaaaaacaaaccccaaatcccagtacatggatgcactagaatatctaacaacaagcattttacctctttggtatgttgaggtgcaaaaccatagttggacgcctaggcaataatgattgaacagtctatagttgatgagtttctgacactgtgccagaattaccaccccttgttcttgaaatcgttagtaatttaagttcctcctgacatgttttaatgtccattagctggtgtcagcagccctaaaagagatcagatccattctgctttttgctgatttaggatttggggcatacttagggagaagtttggaaatggttgtgacttctaagaatctttgaaggaagggcaagtcaacagaattttcaaattggattgaaaaggctcagatgaaacaaagccccgtttgggactgtgttgggttagtcccacaatgagtttagttccatgccagaaactacaagaaaacaaagtattcataatccaaaagagagatacagcttgcgttttctgcattagttataacagactgtaataactaagtcttgcagaaaacaatagtgtatacaaattgtaatttatgacagaccttcatctatattcaaattccaggaacacaacccacttttactatatgaaatgcttacaaacattaaatagctttgttttcaaaaatcaattttataacttggcaattggttctacagctgataagcgctgctgttctaaaaaaagaaagtcaagtactaccaatttgaccgttataaatctgttcataacaagatttctagagatttgacacgagtttttaatgccagaaacttaactatttcattaggaaatgagttgtgaatagtaataatacaaataaaaatgaataactgaccatcattaatataaaataatgttaagaaaagtatttagactttttaccatttaaaagtaaggaaagtctgaatcacttagtgctgattccaggtgacatcctgccccattctgagcacttcacatgctgtcaggtgtattacatgtccgggcatccagcgataatgatgtgctgcacgagtctttaaagaaatctgtgaaattaaaaaacaatgtgacaagggatatatggacacatagtattcacacactcagaaaatatgttggtgaactaatcctacatatttgcttttttttctcaaaattatgggtggttaacttttctcttttaaaatttccttctctctagtcttacttatttttctaattctatgtttgtggattgctaaagatttgaaaacaccctgaaatttaggttaagttctttgaaagaaaactctagcagcatttcccttaatgtataccaaggaacagtttaacagtccagtatgattagaaaatccaacatatcctttcccccactgtgaagattcccaatgctcactggcaaattaatgacaatcctgaagctgaatttgttgctcatctcattttcttctaacaatcttgatcaccaccccactccacacctctatcagaaagcgaccacggggagcttcggtaacaaaacataagaatttcaaccactaaaatatcaaaacactacaaaaagtatgcctttaagtaattcctgccccttactggttcaaggcacataaggaaatctctatggaatcattagcagaccactaactaactgagagaaacttgagtgggtctcaaataacaaagaatataaactttagacaactggtccaggaaagccactaaacaaataacaaaaacaacaaaccctcctcagggtaggggtagagatctgatttccatggttgacacattataaactatccagtttcaacaaaaaaaaaattacaaggcatgcaaagaaacacaaaagtctggtccacatacaggggggtggaacaaaaaaaagcagtcaataaaaatgtccccaaggaagcccaggcattggatttaataaatacttgaaatcagctcttataaatatgttcaaagaactaaataactgaaagaaagcacgagtatggtatctaaccaaattgagaaaatttcaataaagaaatagaatgtacaacacaaagaatgaacccttaataataatttatataacaagtttggggaggtagaaaaatagttgaaaaaaataatgtatcaataattaataataatgtataaatactggcttaattgtaaaaaatgtaccacactaatgtaagatattaataacagcagaaacagtgagggggtaaatggaaactctctgtactttctgtgtaatttgtctgtaaacagaaaactgctctaaaaatagtctattaatattgaaacaaaaattaatttgcacatccaagaagttcaatgagcgccaaagaggataaactcagatatccttacctagacatttcataatcaaactgttgaaagacaaggacaaaggattttgaaaatgttaaagaaaagtgattatacaacaaatcctgaaaatgattaacaacttcaaataaacaacaatggagaccaaaaggcagtgagtgacatattcaacgcgcagaaagtttgttggctaggtgtggtggctcatgcctgtaatcccagcactttgggaagctgaggtgggcggatcacttgaggtcaggagtttgagatcagcctggccaacactgtgaaaccccatctctactaaaaatacaaaaattagccgggcgtagtggtgcatgcctgtaatcccagctaattgagaggcagaggcaggagaatcgcttgaacttgggtggtggaaactgcagtgagccaagatcatgccactgcacttcagcctgggcaatagagcaagactccatctcaaaaaaaaggattgttaaccaaaaattctataatgagcaaaatcattcaaaaacaatgagaaactaggatactcccagataaattaaaaaaaaaattatcactagcagccttaccctacaagaaatactaaatgaagatattcaggcagaaatgaaaagattctagacagcaactcaaatccacatgaaaaaatagaaagcagcagtaaaggtatatatatacagacaaatttatagtatgaatgtaattttctttgtaactctcttcccatctgatttaaaagacagctacattaatttatgatgataaaactgtgttgacaggctgacagtgtgtgtgtatacactttttttctttttttttttttttttgagctggaattttgctcttgttgcccacgctggagtgcagtgctgcgatcttggttcactgcaacctctggctcccgggttcaagcaattctcctgcttcagcctcccaagtagctgggattacaggcacccgcccccaca

SEQ ID NO: 588427 - DNA, 4001 bp, Homo sapiens
tccactggttcaggagctctgtaccatacattccagccactgactaactcacctttgtattcaattcctaagtcattttgtcttgtgggggaagggcatgttttctaaatttataacttcagtatgatttttagtgaggaatagactccctgactcaactactaattgtgtgtttgggaaactcttttattcttcttctgtacaagcaccagaaaaggtatttttattacttccttttcttattcctctccactggtaaaaccagttgcctgttaccctaccaattacaattctggatatgggaaattaatttttaaaaaagaaacccaagagttgaacagcttcttgtgattaaaataacacctctaatcttacaccagtttagcaatctccgttcctttgcttcctgggacttgccccaaacctgagttccctgaaacttgaggaccaagtccccaagcatgggttcatcagtctcagggtttaccggaatctccctgggagagctctgagagttttatcaccttggaaacacaacagcaggctccctgaacgtgcatagaaagagtattttttaaagcaccatgagaaaacagtgtttagttacccccaaatgtaagagtcacgattcaaaactgtcaccgactcggtagcatcttagtcaagaatagtatcttcaacttgacaaatcacaagtatgtgtacttttgctaaccaaaccagtagttggaaaacagctcaaaaaatcccatctccatatttattttatcatttttttgttctaaaaaatggaatggcttcacttatcaaacttgccaggccatggctgatatagtcactatatgtgtgtatggaacagtaaatagtagacatcaagttacctgtgtcatttgtagaaatcctgattttggaaaaggaagtgtaaaagatacattcaaagaagacattttgaaccttaaaatggaactgcttgctttgatgcaaatggctatggtgtgtgtgtgtgtgtgcgtgcgtgtgtgtgtgtgtgtgtacgcgtgtgtgtataagagagagagaggaaggaaaagagatggatgaattatttctttcggaccatcccttctagtattacaagttgtggaaccttcatcgttagtatattatctctgttgaatgatagggtgaatgtaatcagttctatttattctatgttctggacacgctaaacaacatcaatcaaatgaccccctcctcttatttctttcacaataaattcaaccacatttatggagagcctcctgtgccaggcacagtgctaggtgttggaaacaaagatgatttaagcaagattgaagattattgccggtatcttaggattggaacggggggcgggggagcggggggtgacatccttgctcccggctctaccgcagcccggactgctgtcgagccagttgtggcgttagcacgccactgctcccgacttctgggaactccccagccagcccacgaacctagcgccagggttctctctgcgttgcccaagagccaaagactcaagttcaactccggagccgcggcgctcactgcgcaccgagcgaaccccgggctacgcgaagcaccgcgccaggttccttgcacctatcctcccgcccgtcggagtgcgctcgaccccgcgcctgcttactttgccgctgtcgctcacgccgaggaggtgatcccgcagcacctccatggggcaggtccaggtggagtggacgaacgtccctcggaagatgtgcgccaggggcggcatctgagcggcacacatgtcagcggcggagcgcagcgcgggtctgctggtcgaggagggcgcacgcggcggagacgcagcgggactctctgcagctgcgggcggctgccgggcggacacaggctccggccttgtcctgcccccgcttacccgggcggttgccggtaccctgcaggccgcgcccaggggctggctccctacctcctcaatgccaataggatttttctcccgcgagttggctccgcgctcccgtggggtgtggtctttctctccacccttgcgttagttttggttgtgttaactctttgagttatcaagatcaaccacagctgaggctcagaagatcagcttcctccaccttctatgagttgtgtcagcctggctcctctgacccttcaactcctaggatcacttacttcttcaacctgtagcactcaggtcctgtacttgcattagttcaggcacaggtgaaaggtcagctggggctgcctaccttatgaccagtttcatttttagtttatgtagactgcagaattagtattggtcctcacctggaaggttctggaagcatgtcttaccgaacatctctggggacccctaaactgggtgtcattgtggacgccaaggttcctctcttcaccttgaggctaatgtttttggttcttgtgtttgtccgcaaacaattccaataccaatttttctcgtgtaaaatgaatgaatctcttttatttacttccagttgtacaaagggagaaaattaagttctcaagtcaaataggcagcaatggtaccatgggtgctgaattgggaatcaagagactgtggacaagacacgtgggcctcagtgtgcttatcatccccacttatgaaaatggagcttggactgggtcataactagggtcagcgttcccaccctacacaatgaccacagggtccttcactaagttcctccatgaaacccagctggcttccattcagggccctctaacgtgctgttccttctgcccctaatccctcttgtggcgctttacttggcagctcttctcaccactgatttgtctcaaatgtcaggctcttcggagtcacctttcctgaccaccaagtggcaccggactcccagcagtttctactccactaatccatcttgtttctgccattgcatttattgtgtccattcttctttattttgtgttttttagtttactcctgtttccctctcaccaatacacacacacacacacacacacacacacacacacacacacacatacacacaccaataacagaagcaccacaggagcagggaatgtgtcttatgcctagaacaatgccggtgttccatacatgtttattgaataaatgaatggatggtttttctgtgagcagagccataacctgagacaaataactattttgacaactacataaagggtgagggtttcattgcagtgtgtgagcagtttttctctgaattgctgcttttaagacacagggctggcttatagaaatgattcgttcccttctcagttccttcagctcccccataaccaatgtctaaggtgaccaacaaatcctggtttaccaggcactttcctggttttagcactgaaaggccgttcaggaaaaccgtcagaaccatgcacacagatggttgatcaccctaccagggatccagaattaggaatctctgcagctgaggtcattacacttgtccctgctccttgtcactttctcctgattctgccaactgcactccctcctggcagtaccgacagccagcacactgaaaacattcccttgtatacacaaaaacctcagacagaaaggtgaagaaaatggcttttgagataggattcaatcagatgtttccaacagatgtattactttcctaaaacagatacggttaataatttttttgatgattaggttttaatgaaaacctaaatgtcaaaaaaaaaaaatagagactagttttatgaactagaatatatctacttgatagaacattatacagttattaaaaacaacaggagaaatatatagccacaatgttaagctttcaaaaatggcttctggctgggcacgatggctcacgcctgtaatcccaacactttgggaggccgaggcgggtggatcacgaggtcgagattgagactatcctggccaacatggtgaaaccccatctctactaaaaatacaaaaattagctgggtgtggtgatgcgtgc

SEQ ID NO: 588428 - DNA, 4001 bp, Homo sapiens
ggccaaccaacgtagtgaaactccgtctctactaaaaatacaaaaattagctgggcatggtggcgcacacctgtagtcctacctactcggaaggctgaggcaggagaattgcttgaacccaggaggcggaggttgcagtgagccgagattgtgccactgcactccagtgggtaacagagcaagactccatctcaaaaaaaaaaaaaaaaggctggggaaacttcatagaggtgtagagtcatttagccatgtggcatgtggtcagtaggcattgtaaggtgctttgtaatctactttgacttgatgcttatataggaaacacagaacaaaataaggaacatatttcataaattttttttttttgagacagtttcattcttgttgcccaggctggagtgcaatggcatgatctcggctcaccgcaacctccccctcccaggttcaagtgattctcctgcctcagcctcccgagtagctgggattacaggcatgcaccatcacagccagctaattttttgtacttttagtagagacgggtttctccatgttggtcaggctggtctcgaactcccaacctcaggtgatcagctcacctcggcctcccaaagtgctgggattacaggcgtgagccaccacacccagcccaatagttattgtctcttactattatgttgtaggtaaaaccttggcatatgaaaatagtaactattgctctcatctgtggaagatctgctcatttgcatctccccctttttcagcagctcaaccttgttgagttatgatttacatttgtacaagtttctcattttgttaaattaatattcaagatcagcagtttacttaggatcaatttacttaggataattgtctgtattttacgtttttgtggtattactttttaagtataagttagggatcttaaccaataaggcgtagtttctacaaataaagcagacttagatgaatcttgacttggaaatactttagaccaaatgaattatgtttctttgatgcaaattttaaataacaaatattctatcttgtacatcacaatacaattcagattttttcttaattatagctgatctccttcacacctagcccaagtttttaagacatgtggattgagaagtctacgttcaaaaagttcttttcttccaggaggatgtctgagtaagtgccacagaattaacattctgttaatactctataatgggtcaactcattcccttttagtccaggttcataatgtaacctgtgcaccacagaaaagaaatccgtatatcattggattgaaactagtcagaaacttttagacacacctggtgattttaactgggtcaagcaacactggacaatggttttttgagaatggcttgagctgttccataacccttgagtgcacaagaacaaacttcttaatttttctaaatcaaattaattatggcttgttttttccacagcctgccccaaccagcactgggaggtcataaaatgccacttaattttctgggcctttatcccctgctcctcccggtagatcatacacaaactcctacttgctcaatccacagggtgggttaaggccatagtggcagttcctgtgatataccaggtccatcaaaaataaacttacctctgtaccaggcacacactctctctctgtcccattaagcccctgggacagggctgtggtactcagtatggattctctaggcatccctctttggggtgctgtagagagcagaaagcaagtcctcacctctggtggaaccaccaccctctctccttatagtgctggggagtccagttcttctgagttgggctgctgccctcttcttcaaacttcggagtgcttcctgtctcagacaatataggtttttgtacccctaagcctggattttgaaagcaaagaaggaaggggaaatacaaaaaaaattagccgggcgttgtagcgggtgcctgtagtcccggctactcaggagactgaggcgggagaatggcgtgaacccgggaggcggagcttgcagtcagactgaggcgggagaatggcgtgaacccgggaggcggagcttgcagtcagccgagatcgcgccactgcactccagcctgggcgacagagcgagactccgtctcaaaaaaaaaaaaaaaaaaaaaaaaaggaaggggaagtttagccctgtaagctcaggtctgactttttgagcattttgtgacaaaaacattacacaatttaaatttgcctgttaagttatagcacagcactagaatatcaataaatccttattctacatttgtttacacaaaagcccccctgccaagaccttacctttttcactgtgtagctcacatatttagaagggtatctggtgcttagtaggtacccaaaaattgatcaatgaattgggcctacatatagtaggtttattggcctacatatgctagctctctgaaaaagaaagctaattggcctaagtatgttagctttctcagaaagaaggagttgcgggaatgcaaggaagagaggaagagtggagtagaggttggaggaaaggaaagggcaggagataaagaaataaataattattgagtacctaccgtgttttggctccttcttgttactgcatttaatccccagaaaataaccacataaacattctcatccacatttcatgggggaggaaagagtgattcaatgatttattaaataatttatccaaggctgggcgcagtggctcacacctgtaatcccagcactttgggaggccgaggagggtggatcacctgaggttgggagttcaagaccagcctgaccaacatggagaaaccccgtctctactaaaaatacaaaattagctgggcatggtggcacatgcctgtaatcccagctacttgggacgctgaggcaggagaattgcttgaacccagtaggcagaagttgtggtgagccaagatcgtgccattgcacttcagcctgggcaacaagagtgaaactctgtctcaaataataataataataataatttatccaagatgactgagagctaagatgtaaaaggatatacctctgaattcaatatcctactaatttctacaactttaccacttcctgactgtccaaatatttccaattaatctggtgataacttgagactctgtctgaagctgcctgcatttgaagatttaaaataacataaaaatgctcctgtgtttgtcctgaggtcaccaagatgtgaaatgtaagcagctggaagccagttctgagagatggtttccatggtggccaacagtgattggagcccagcatgactgccattttgtctcttcagtgacagttaaaatgccctcagttaactagttctgggcattctaatggctctgaacacactcttctaaaggaaagtgctccccggttactctctaataaccttttactgacaggaggccttttattaataccagtgatttttcaaccgctggttcagggtttctgaacccctaagaggactaggcatctggatgttcatgctgtctgggggaaattatacatgactattccttaagttgagaaagagtactttgtgtccctagaatgtaaagctgcatgttctagatggacaagagctcttagggtacagtttatttcttcattttgcacctgctttttttttaatgcctccttgatgtctctgtgtctatgtctacagaagccccttcttcgaaacattgcatgacacagctaaaatcacccactgtgtctaaaagtctaattcatttcaatttaatgatgcaaggatttcttttctaggtacacaggttgcttcatgaagttggattaaagaaggaatgagctggcccattactagagtactaatagaatgtcagttcaatgttatctattcaagcatcacacaggggggaaaaaaagaacttttgaatacaaacttctcaatccatatgtcttaaaaacttgggctaggtatgagggaggtcagccagaa

SEQ ID NO: 588429 - DNA, 4001 bp, Homo sapiens
tagatagaggttgccagaggtgaggggaagggaatggaagttactgtgtaataggtatgaagtttcagctttatgagatgaaacagttctgtggatggatggtggtgatggttgcacagccatgtgggtgtacttaataccattgaatggtacgcttgaaaatggctaaaacgggaaattttatgttatatgtattttatcaaaataaaaagacaagtgagtgaatgaaactctttctgcatatctctatattatagactaaagcagctcccattggcttgaattcctggcaaggaacacacgaaaagcctccctctagactaagagggggtggtgtttgctgatgtttcaaccaagggtctggatattgtggcacagacagtgaagaatcccatttgatcaggctgttttccctgggtgatctggagccatctggtcccagagcctttgaaaatccttgtactgtccaataagattcccacccaccctaccctgccccgctgaaagcttcggggcaatggtctgcgctggttttgagtgattccattaatcaaaccgaaaccaggtatagctctccaatgttccccaagaactctcttcaggaagaccaaactctgacagaaagagcaaggggaattacgcattttcttgtccaaagaattccttctgcaatacttccgaggacaagaaacttgacactttgctagacttggaagaaatattctgcctgttgcctactaagaaacatgcaggcgcgtccaggcggtcaggtgcagctcagctggcttctaatatctaccagactcatgcccacagattgtaatcgaatttactccctaagaactcgtgaaagctctggactttctccccggaaaaatgtacacgggcacatacccacggcgattctgcagacctcctcttcacaagtcctgttttagagtgagcatgtctcctcagatgcctcaacacttaaacttggttttttttctccaaaaataggtggaaagggctaacaacagccacagggaaaggcgagctgaaacagtacctctccatggtcggtcctattgttcctggagcctgggcagtgtgtgggagagggcagccctgtcatctccccttagtaggctctggaggggagagcgcctgactctcaaagtgtcctgggaatttggctgggcgcagtggctaatgcctgtaatcccaacactttgggaggctgaggcaggtggatcgtttgaggtcaagagttcgagaccagcctggccaacatggtgaaacccgtctctactaaaaatacaaaaattagccaggcgtggtaacacgcgcctgtaatcccagctacttgggaggctgaggcaggagaatcgcttgaattcgggaggcagaggtttcagtgcaatcgcaccactgcgctccagagtctcactctgtctcaaaaaaaaaaaaaaaaaaaaaaaaaaaagtgtcccaggaactttagtcaagtccctaaagtctgggactgtctccgagggggaacacaactcaggcacttggaagtgtgtctccctgagcactgcccaggtccccaggacagctgggttgtgggtatgactttgtgcccgaaggtgacgtctgtcagcctaaaatcaaattttgaaaagtgtttctgcgcagccggcaaaggcgcaattcctagcacagtggctcagacgaggctacgtcctcaccctgtttctcccttggctccttgccttccagagcttttccagcccacctcacctttcctaggaccgcaggaggagccagggagcctgctgtgaagccacctgcggcgcacaggcacatttcaaaacaaaagcgtagaaacgcatcctccagcactcacctgtccggagctgtccctcgcctgggttctgccggagcttcccgaggtgggaactgcaaagcctctctcgggactggcctccactctgtcaactgtgtgactctttgcacaaatagatacttctcctttttgctctgtctctctgtgtgtttttcctcttctgttcccctccctgattttcaatctgattatttgtgtcaaaatctggcggtgaacaagcagccaatgaagagagcgcgggagctcagccgtatttgcttatcaaaactttccaggacacaagacttcgaattctcatttctaaccctcgacacttggagcggcacgctttctctctgcagagaaattcagaatttcgctggaaattttgaataacatctgcacaaaaagaaagtgatggctaaattattaaattttaaaaattaaagttagaaaaagctctaacttataaaactcgattttgcatagggaagtcattgctctttggtttttttcttctttcttttctcttgccttttttcttccttccctccttccctcctttttccttccttctcttcctcctttctttcttcctccctccctgcctccttccttcccttccttattttccttcttcctccctccttctttccttccctccctccctccttctcctcctctcctctctctctcttccctcctttcctccctccttttttccctgcctccctcctcgctgcctcctcccctccctccctccccaagttcagcaccctgaggcttgtgagagccaggctggtgcaatgcccctagtacccgagccggccacatgcatagaggcccctcttgtccttgcagaggtcatatctcagaagagacatcaaatttgcatttcccccagatatgacctttgagcgggtagaggcaccctggaggtgtggcagtgagttcggaggccaggagacgctcggcctgctgaagctgccatacagattgaaggccaggtgccagagcccgtgtgtgctgccctctggtggcagacaaagtgatggggaggccagtgggggcctctggggtgtcccattgatgctggggggagtgagggcggtaaagcttggctgagctggctggggcatttcttcccatttggcagggcgtcccatcccctggctccccaccttctccctcctcctctggcccccgcctcctcccgcttgcaggatgactgatttatttcaggaggttttgcataagatgagaacgccacaaacagagcactgttaggctgctttgtctgctcttccagcccgggtgctggagatattatgtttccctcataaagaaaacaagtctggtgacaggaagccccaatttaaactgcaagtccaaggttcaaaatgaagaaaaaggggtgtttcaggcgaggtctttctgctgggccagccctggagcaccagccaggaggacacaaccctgtggtcaccaggcctcagtaatgctggggtgtcagtcccagccccaggctacagacagcagaccactgctcccagctctgtggtctctcttggtggaaagaaacatctttttaaaaaattattattggctgggcacagtggttcacgcctgtaatcccagcactttgagaggccgaggcaggcgaggatcacttgagatcgggagttcaagaccagcctgaccaacatggagaaaccccatctctacaaaaaatacaaaattagctgggtgtggtggcacatgcctgtaatctcagccacttaggaggctgaggcaggataattgcttgaacccagaaggcagaggttgcggtgagtccagatcgcaccattgcacttcagcctgggcaacaagagcaaaattctgtctcaagaaaattattattattattattattttcttagagacaggagttggctttgtagcccagactggagtgcagtgttgcaatcatagctcactgcagcctcgacctccctggctcaagagatcctcctgcttcagcctcttgagtggctgggactacaggcgcaccaccatgcctggttaatttttttattttttttagagatggggtcttgctatgctgtccagtctggtctaaatcattatttttatttgaaatttagaagtt

SEQ ID NO: 588430 - DNA, 4001 bp, Homo sapiens
tgagctactgcgccaggccactttactttgtctataaatttgttctgaccccgggagtctctctgaatctgttgattctagaggctgcctgattcatgaattctctttttctttcttttttttttttttttttgctcgattaaatttaatctaattgaacttgtcttaagctttcttttaacaagctccatgatgggcatctcagattggccaggcctggtccacctgctgtggcctggggctggtactgtgattgtgaggaccatcagcactgaaagaattgaggatgggcggttcacctgttcagaaggcgagggggagatgtcacacagccaaatgcagcagatgtcctccaccacgtgcatcctgtcagcacgcccgcctatggagggctcagccctttcatgctcagacaggccggtcaggaagccccgtcacagggaggctccagggtggtgtatggaaggtagtggtctgaatagtgtctgttgagcaaatgacaaaaatcaaccccagagaagcagaaaacatctaggtggcccagcctggtaagtggcaggagatggtagtagagctgtctctgcctgtcaccttcagcctcttcttgcaagcccctggtggtcccatattgaggtaacaatgcccattcttcttccagacagtgtagaaacagtgacaatgtggttatggccccctggaaagtgagcagttgatgagctctgcttatggctgctctcctccatggcagaatgcattcctgcaggatgaggtcatggagccaaggaaggtcagggtgtgggggggcttcctgggtcagagctccagagcagtgctgctccccctgccctcctccttaggtctcccatcactggtggtctcagaaatctctgaagatttcagaaatcttgaatcccttccctggtgtgaatgcaaagggaagagtctgttcctgtaaagtagtttgcagattggtggaactgagagaacccagacccttccccgtttccctcgacctttccatctctggaccccatgcagactatgcttgggtggtgacacagaagaatttagtgtttggtggacccgtttctggaagtgatggatgctgacagctggcacttaacagttatcaaaaataacattaactggagtaggctctgtgccacttagagcttaatgactcactgacttcaccccaaatccccatgaactagcattattattagccctatgttgcaggtgaggagactaaggctcatccagttagaacatgatggctgaaacctacattcaaactctggtctgtttgaatctagaactcttagcttccccccagcgactgtgttagaacagaggaatcatcagttcaattttcacctccctcctaagccttcgtggctctagacgtatggttataaaggttgttcactgctcaagggcccaggagggtttggggctggtggataggggccaaaatacagcccaggggtgccatttttctaattctcaccaaggccctatactgactagcagcggctctacccgataccatccagggccttttcagaattctgaaggcacccacggtgctggctactcacacacctggccccccttaaccatggctgccttgcactgtgacccaattggttcccatgacaaaacctgttattcccataactcacccaacacttttttgcccctaggctcttgctcctttggttccctctgcctggaatggccttctctcccgagccgcctcgcctggttctattaggttgatgcaaaagtcatcgcggttttaatggtaaaaaccgtgatgacttttgcaccgacctagtatttcacaaaacctacatttcctttaaaacccaacctgatgcctactccttcaaaatgcctttcatatcccacagttcgacttcatctcactctgcctcctctcacagggctttgtgttcgtgctggatggagcccatcatactcagcctcgcaataaaggccacctatctagtgagtgagcatttactaggcgcaggactctgggctaaacgctgtccatacttcatctccttgattcttcacgtcacagatgtcattatgcccatttcacagaggaagaaactgaggcttggaggacttaaagccttgtttcagcaggaaacggaataaggcgttctgattttcaagctgtctcctattagggctggtttcccctagatgtcatgagtaggtgtgaagtgtgagctacttgaaggcagaagccaggggggtcccccgcaatcccggaggcgggcttctgaaaatgtttagcccaggaaggagggctgccctggcccgcagctttccgccccttcccaggtgagctgcaactccaaagctcccaagcaggcccttcacccacgcgggccccagcagctccttgggaaacaggatcgctgctctgaggccgcccacagagagaccctcggagggcgccacgcaagcgaagggcagaaacgactcggggggcaggggcagggcgctccaaccacacccaggcgccgccagcttgtttacgcctctccgccgcgtccccccgcccgccagtcacgtgaccgcccgccccgccccctcgggctctcgcgtggctcctcccgccgcgccggcccttctttttgcctccttcgcggagtcacaagatctcttcgcagcctcctttcggatccttccgcccggccccgcccccctccataaaaaccctccttactttttttctcgtccaacccacatcgtcagttatgagtggaagagcctcttccttccggcggggctgccgagcgcggccgtctatccttcctttcgagaaggaggggaggtccggagggggactctttttcgtggcggaggccgccgtcggccttggccctttcacgacgggggaggtgctgtacgtccaagatggcggcgccctgtaggctggagggactgtgaggtaaacagctgagggggaggagacggtgggtgagtatgggggtgtctccccctcctttttatgggggcttcctggggcagccccggcaccatgactccagccggggaggctcggaggggctggagcaagagactcacttgcttggtagggatcccggggaaggggggttcggagagctctcccctccctcttattacacgctatctccggctggcccggccgggactggcgggtccctggggaggagaggcgagccggacggagcacttcgcccctccttggcccccgaggggacggctgcaccctgggcctcggtccctcgggcaggggcgaggtgggccccttcgtcagtccctcacttggtggggtgacaggttcacgctaggtgcggagggcagggtagagacgcttggcgggaggggaagggtcgcgagggtggggctggtcccagaacttaaagagaggggtcggggtataggggcgtggagaatgaatggaggtcgcctgtggggatcaaggactcgcctggattcggtgtctccgctgaaatttgcatgactcgctctgggtgtacttgtgggtgtttaattggtggtgaaagacagttaccttaaagtgggcaaaggggattcctaagagacagctatttgcagagcccctcctaggcgttcattcattcatttgaggaactggaggatgaagagcctgcaatcggagggaccttgtagaattaaagctctttctttgtgtttcctgttaaagagttttgctttgtgtgttttggatgtgtggtgaggacttgggaggggacgcggtcctcctaagaacaacagctaacgttaatggagtgctctctgtgtgccaggcactgtgaaagtgcttggcagtcattatctcctttggtcctcacgacaaagagaagaggcagccactgttaacacctccaatcttctcaaatgaagaaactgaggcccggagagagcagggtactttgcctaagttcacaccccaattgtatctgagccag

SEQ ID NO: 588431 - DNA, 4001 bp, Homo sapiens
tcatgttctgttcttcagataaccaaacagtatctttcactttggcttcttaaaaattagggttcacaggccaggtgtggtggctcacacttgtaatcccagcactttgggaggcagaggtgggcagatcacgaggtcaggagttccagaccagcctggccaacaaggcgaaacaccgtctgtattaaaaatacaaaaaaaaaaaaaaaaaaaattagccaggcgcctgtaatcccagctactcaggaggctgaggcaggagagctgcttgaacctggaaggcagaaggtgctgtgagccgagatcgcgccattacactccagcctgggcaacaagagcaaaattccgcctcaagaaaaaaaaaaaatagggttcacaatcagcaagtgtgaagtgcatactaaaactctgctccaaacacacttactgtaagtgatgtaaacccaatgggtatgccccaaactccatttttttctcatagttaagtactgagatccctctccaatctgcagctcccactttctgcaggccaagaaagttaaacaaaaaatacaagcaggtactcagtgaggacctgagggattctcccacgagtaaaatacatctattttcacacaaggttcttttggtcaacttctgggttttgctcttactccagaattgaagctactatagtgttataaatctgttgagaaaagaaatctagacttctatgaagatttttaatattttaatttgccaaaaagcttctcaaatatttttatagctacaagtcacatttattaaatgattccagttacaatcccaagcacatttactacacaacagacaatgctaaatggtgaagaaaagtgtctccggctttttagtgtaagacagacgatctttcattagttcttctaatgaaagcacttgcatctactctgaaaaatctggcgaaggtaaagagtgaaaaagaggaggaagagaaaaggcaatcagccaatttgataaactatttttgtcgttactgttcaatatttatgaagcaccttaatgctagagatctgacaaaaattcggtaaggctgttccaaacaataacagaaaaaaaaatcacttttcaatagctggcgggggaggaggaggagcactatattcaaaaagtaattcactatacctcattcatgaatgaaagccaaatttcacccataggctgttaaccgatgctccgaaacttattcgcaaagtacatagagaaagaaattgcgctgggcgaaacctaactcgggcagagaagcggcttcaaaacctgaaagggagaaaacgagtcaggtcgttgctccagaaatttccgagcgcccggctccccgggagggagcgcgggcgccagcggcggggaggggacggtggcacctgtcactcgagcggcccccacggggtctcgggaggctcagcggtcgccggcctgggagtcgggtgcgagtccctccccgccgccccgagccttgcgccgagcgtcgggccgcggccctcccgtgccctctgcccagcggctccggtcagtggggcccgtcgcctcaggccgagtccccgccacccgaggccggggcgccgaggggagcgctgtcgagccgctgcctacgcctccggggtgccggagcggacacccgcgaggcgggcccgcctccgcgtactcaccgggcctcccgtgccgccggctcggccctcctctccctcctccccccgccgccgcctctcccgcggctccccgggcggccgcactgggcgttgggactggtctgggtcaagtgtcggcagagctgggggcaggctcgcgccgggcgggggtcgcggtcggcccacaggctgggcactaacgggtcccggggcgccggggcggaccgcggaggtgagcgcggctgcaggctgcggtgaggggcggggagagcgcggctgagagcaggcgggcgggcggagggtggagggaagcccgggcggaggaggcggcgtgagagcctcggggcgggggcgggggcgggggcggggcctggcgcgtccgccgagcgcgggggtttgtttattttcgcggttggtagcggcgctggcgctggttagaggttcgccggtgacgtgagcgcccgagttgggggagaggaccagaaccacctgctggagaaggggagctacgggggccgggcagggtccaaacgcctcacgtaggcggcggcgccacggtcttcggggtcacagggaagagaagggctctcctcaagcgggtggaaggagggaggcctcccgagggagtgagactctaggccactcccccgcagcaaggcaggatcacctgcgacgcggagagcggttagagggccctggagtggaaaagggcagtgggacctggtagcttgggttccctgcaacttggggttcgacctccaggcaatgaagtagggatggtcctgcaagtcaagattccagtagcaagagtgcatcagatctctgtaaggaaaataactaacattgctcagttccctgtagagttgcagggcgctttaacgttatctcccttggttctccatcaggtcgtagtggactaattttacaggcgaagttaagtgacttacccaaaacctcacagctaataaacggcagagccggcacccagctgtactggcttccaattctgttagcttaccagcgcatcacattatctccataaatccccatgattcaactaatattagacgccccacaggtaagatgcttcagagttagaggggagttgaagatacctttgccttcaaagaagtaaggaataaaacaaagataaaacagacaataaaagacaaaccatgataggtgccacgtgaaaagtggcagagtactgccgggaatcaaagaaccgtgtatatctgtcttggggataaggaaagaaaggcagcatgaaggagtaggcatttgggattgaccttgaaggagacagggagagttttacagcaagcagggatagcatgagaatatatatgaaggcgaatcagtgaaagttgtgttggggaaagagcaaagactccagggtatgttgagaggtagaaaagacaaaggagtatggggcctaagataccaaatggatgaatttatatttaattcagtattttgagtttttatggttcagaagtttgggggaagaaaaggaaggtttttttttttctttgtgctagtgatttatctgtgaggggaagcagaaatcagaggtggaaaaacggacagatctactgtaggccaggtaaaaatgatgagtctgacctaaagggacagctaggggaatttaaaagagcatagttgagagatgatgtgcatgcagtatctatagaatttggcaactgattgattaattgtgggtaggaagagagaaatcaaagaaagtggaggttttgagtttgtagataattgcaagagagaaaagagacaattacaaaggagagggagctacttcttgagagatcagtttagatttggacattttaagaattcaaagggttgtcaagacagccagagagacatggacactaataagttagaaataaaggttttgtaatatgggaaagaggactgaactagaaaatagactcataaataatcagcctaggagtgatattgctgtgagataaaagaagaaaacaaaggtcagaatcttggaaaacaccctctttagagtctcgctactcaaaacgtggtcagtggcccagcagcactgacatgaggatgttagttagaaactcagaatctcaggctccaccccagacctgctgaaccagcatcttcaacttaacaagaacccgaagagatttgtgtcacatcaaaaagtttgagaagctctgatctaggtgagccaagccagcaaagaaaggggatggagcagaaaatgggaggagaatagggtaacgcagaatcatcaagacaaggtaaattggagtttcacaaaaacagggctggaaggagtgttgctcaacaatatccaaa

SEQ ID NO: 588432 - DNA, 4001 bp, Homo sapiens
tgacctttcttaaacaaatgtaaatcttatttgtgtgtttttctagaaaaaccattcggggtagggcacagtgactcgtgcctgtaatcccagcattttgggaggccgaggcagacggattgcctgaggtcaggagttcgacaccagcctggccaacatgaagaaaccctgtctctaataaaaatataaaaatgagcctggtgtggtggtgcgcccctgtaatcccagctagtcaagaggctgaggcaggagaattgcttgaaccagggaggcggaggttgcagtgagccgagatcaagccacagcactccagcctgggcgacagagattctgtctcaaaaaaaaaaaaaaaaaaaaacgaaaaaaaaaagaaaagaaaagaaaaaccattcggactcgaaaagtactgctgtctttcagttggtaaataataaaatttggacgtgaggtaagaaaacaattggaagatactgcgatctaaagaagcctgggggagggaggcgagatgtctggtcacttccccagttgcacgaccttaggcaattcctagatcctttgagtctatccgggtctgcgcaggtaatgacacctctcaacccaaagtatgagagcaccctggccggtgagagggtgcctgggaagtggggaatctgctacaaaacgcaggggaagctcgcgggggccctaggataaagaccaagaaccgcacaacaccgactctctcctaacacaaaactgtctgctccgagaaccaaatatcccaccttcccgcggctccggaggtacccgccactgttttattttaatccacacattcccagtcctgagcaatccttaccccagagctcgattttcagggaaccacaaaagacaaataggccagaataatctaagtccaagggagccctcccggccacttacaaacagggtcttccattttcaagggtcttttcaaacggatgttggcagggaccgtcttctcgatcaattcatcaatgctctaaaattaaaacgcaaggcagaggaaagtgcctctgagttaaaagagtcacctctgtgttttgcgactacaaagccttgtgggaacctcattgaaatcgcctaattagggttctttttaaaagaaaaggaaaactctgagcaagccagaatgatttggaggaaagaaaatcgtgaagtggggtggagattccgccactcggggttggatttcagttgcaaccggagctaaccggtaagcccactcttaatcagggggtcttcctcctcttgcaaagtttaggtccatccacagggccacttgggctgggggtggtttaaaaatgtacacttttgaggcacgaagactgggtgcaggagaaagtaagctgttaagaagtaagaaggcacgaggaccaaaggcacgaatttgcttccacgccacggcccgggacccagggtgcggggaccacgcggagcgcagcagagctcagggtaggagccgggaggccgcgcaggcagagcccgggcagggcggaggggaggccgcggagggccgggtggaggtccttaccgccagccccaaggtctgcagcatctctctctggtctttgtccccagggccgatgtgcctccgagcgaagtcgtcgtgtctgggcagaaggcgctccaggaggcgcgaggccccagccgcggcgctgtccccgccgccactgctgctgtcccggctccgcggcgcccagcacggccccgatcccccagccaggcggcggccgcccccgaccccgcggcccaggcgcagcccccacgccctggcacaggactgcatggccgcggccaccgtcccctgccccggcccgcaagggtcagccgcgctcttggcccctctcctggcctcggtcccccgggtggcggctgcgcccggcctggagcccctttcgctggacagtcggccggacagatggatggacgctcgcgggcaatgaatgggcgctgcgctcaaccaagacactcgcgcaaagttgtggctccacccaaggcacctgctccgcacactttaagcggcgccctggaggcgggaggtgggttggggccaggaagcccttggccaatgaaagtagacagagggggagggggcggaacagttcccgcccccgccccctcttcctaccctcttcccagcccttccgtggagtcccgcttcccctggaccggaggctgccatctccagtcctacccactccgacgctggctggtgccgggggccgggacgctccgtacgccgcccgccagggtgtggagccgcactggggcaagatcaggtgggacagcccaaagactccgggccaagttcctgggggactcggcggagatggaagatgattctcgaagctctccatttccttaattttgaggtatctttctctgtcacatttcatctcagggaaattaatatgggcagatggcggttcttttatctttgcgggagcgtgataaagttactcaacctctcagagcttcagttttctcatctcaacagagctggatgggattttaaaaagagattatatgtacatggaaagcacttgaacagtagatttgaacaccctctctatatttcttttcttttctttcttccttctttctcctcctcctcctcctcctccttcttctcactctctctctttctctctcttcccccccaccacatgtaacgctatggctcacgcctgtaatcgcaacactttcggaaaccgacgcggtaggatagcttgagcccaggagttcgagaccagcttgggcagcattgtgaaaccctgtctctacaaaaaatacaaaaattagtggggcgtggttgcgtgcttctgaagtcccagctactctggaggctgaggtgggaggattgcttgagtcagggagtttcaggctgcagtgagatgtgatcgcaccactgcactccagcgtgggccacagaacgagactcaggaaaaaaaaaaaaaaaagaactgtgtgtgtgtgtgtatatgtttttttaaatatatgtactgtatatacatatacgtgtgtgtgtaaaactacaaaggatattttgttgttgtttttgagacggaatctcgctctgtcgccctggctggagtgcagtggcgcgatcttggctcactgcaacctccacctcccgggttcaagcgattgtcctgcctcaggctcctgagtagctgggactacaggcacgtgccaccacggccggccattttttatttttatttttagtagagacggggtttcaccgttttaggcaggatggtctcgatctcctgacctcgtgatccgtcattacaggcgtgagccactgcgcccagcaaaagtacaaaggatattaagatagacattgttcactgtcgtcttactttgaaagttagccatctagaactggattttttgtaaatgtaccatctccagctgtctcatgacagttttagcaagagaatgaacttttaaaattccagttgttctaatatggggaagagaggacagaagtaatcagaacattacttgtacttagactaggggaaaataaaacctgttctctttcttgcttatctgctaagtttcctcctccaatcacccttaacagattctgggctccgtacccaggaggcacagactatccagagaggcaggaaagtagagatggaaaagagggcaggaaaatacaccacaaagaacagtaggtaaaatgtctgtatggcagacggaggcgggtggtgagctaggacggctgggctgaatgtctccgaaaagtttttcggccatttggaattgaaattacaaccttcataaaagttgggagatctcctcagtgccagatggtgggggttgtggggaaggattggagggaggaggtaatctgcatttattcctattcctgtctatgttgtttctatgtatcagagggactggaagccagggaacaataattcccagatccctttggctccgtggtgatggatgttatttgcctt

SEQ ID NO: 588433 - DNA, 4001 bp, Homo sapiens
ctagctctgtctactgagaaggcctagaagcaatggtacccaatcaagaatctcaacacactcaactcccagatcttggtttgccaatacagcaccatcctccacttcaaaagagtcagcctctttggagaaatagctgattccaggattaagacagggaaacttgcacctgggacatctttttgtgtcaaaaagtaaagaaatgtcaatgaaagatggaaatatgtcacaggaacacaggaaccaacttaatgaggtgcccagtagccaaatctgggacatttttctttttaattcttatgaatacataattgttgtacatatttacaaggctacatttttttttttgagacacagtctcactctgtcacccaggcttgagtgcagcagcacaatctcggctcactgcaacctctgcttccagggttcaagcaattctcatgcctcagtctcccgagtagctgggattacaggcatgcaccaccatgctcggctaattttgtatttttagtagagatgcggtttcaccatgttggccaggctggtcgcgaactcttgacctcaagtgatccgtccccctcggcctcccaacgtgctgggattacgggcctgagccaccacgcctagccttgcatgtgattattttgatacaagcttacaaaatctgggacatttaaaataaaataaataaataataaaagtaatggattacaactcactgaataaaatagaaagcacctccttacagtagaatgccaactaacaaatgcagaaggaatagcggatataaagaaacaggatctggcaacgtcatagaggtatcgattcatgtggaaaacatcaatgaatgctaaagccatggaggattaaggtttgcccagaaaaaaggatactggtattattacttcccaacaattactaagggaaaaatgacgaattttaaacggagagaccaggcagataataacgtaaccaggtgatcaagattagcatcaccagtgttgggatgggttgacatctgtgtgcctcctcatgtgacttactgagaaagccatggcatcatttctgtggtattcctgccaagaatgcttaaccttggtctggtggtttgaaagcacatatgctggcagtcaacctacagaatgtaaggtctgtatttttcaaaactgtcaacaacataaaagacagggaaatactttaggattgtttcccaagaagtctgaggatgcaggacaacgccttatctgtagctaactagcagcgactcgggaatgggagctcggccttaactctccacatccctccacttctcgcgcagagctttgcaaatgctaggtacggtgaccacgcccccattcactttccaggtctgccaaatcaatctaaaaatttggtcatttcactagtagcaatggattaggtcgtgtcaatcgttcgtcgcaaactctagagctcccagcacatgagacatacagtaagttaactgaacctggggccgagattgctttgacaacagcagaacggagaaggcgcccaactggcggagggtagcaatgaagccttcagagcgcggggcacctgtgaagtcaggggagctccccgaaacgctaaaataggctgaagaggacagaaaccccaggacagagggatgtacacacagaagtcaagaaataaatgcaggttgttagactgcacgggttcccgggagcagaacgtgccaacggctagggagaaggtttcggtcgcgaggggccggaaaggcctacgtcctccggggccaccgctcacctcgcgccgcagcagccagtcgcggtagtagcaaaggcgacctttgtcggaactgcgtagggccttcaaggtctcccagcagcgaccctcagacggcatggttggctaaggggcagcttctctgacgccccccttctgaccaaacaagccctcgaatcagccgccgggaaggccacacaggcttctgcttccgggacgcgcgcgcagcacagccccgcccctaacgcctgcacgccccacctccggcgacgctcccgcgttcccgccctcccaccagtgcgcctgcgcgcagggcttggctgtcggggcacgttccgcagaggtaaccaccgctcccaatccccggggctgctgaaaatttgtctgtgccttgagactgtgcagaaactggaaccctcatacactgctcatgggactgtaaaatgaagcacctgctgtggaagacagtctggcagttcctcaaaaggttaaacaattaccatttgacccagcaattctcctaggtaaatatatatatatatataaaatacgccaaagaaatgaaacctatgtatatataaaaacttgtccatgaatgttcacagcagtgttattcataatagccaaaaagtgaaagcaacccaaacgtccatccattggtgaatggataaataaaatatagtactatgtgcgcggttcccgagttcccccgctttctgtgcactgaccaagtatcagagtgccttgaccgccctgtgacccagccagctgcaagttttttcctgcagacttgcaaccaaacacgggccttgcatatccctaggcactaaggatatctaggttattgcccaaaacgctgaaactgacccctgcttttagccaaattccataaaccctcatataaacttcataccctgacccctcgctggggatgtacctaggtgaaacaccgcttctctctgtctgtcgcgagaattgctgcagcccactctgtaagcttccctaataaatgttttgggtttaatgctgcttttttgagacagagtcttgctctgtcccccaggctggagtacagtggctcgatctcggctcactgcaacctccgcctcccgggttcaagcgattctcctgcctcagctccccgtgtagctgggactacacgcgccagccaccacgcccagctattttgtatttttagcagaggcggggtttcaccatgttggtcaggctggtctcgaactcctgacctcagttgatccacccacctcgacctcccaaagcgttgggattacaggcatgagccactgcgcccggccatagtgcttctttggaatcccaaccagccctgtttggcaggaggaaacaccacatctatataatggaatgttatggggccataaaaataaagtgctgatgatacgctgcaacatcaatcttgaaagcattatgctgagagaagccagtcatgaatggccacatgttggacaattccacttatgtgaaatatccagaagagacaaatctatagagccagagaaactttatgactagttgccaggggctgggggaggggaatggggagtgactgctaatgggtatggcgtttcttttttgggagtgatgaaattggttggctgggtgccgtaatcccagcactttggaaggccaaggtgggcagatcacctgaggtcaggagtttcagacaagcctgggcaacatggcaaaaccctgtctctacaaaaaatacaaaaattagccaggcaaagtgccatgcacctatagtccccacaggctgatgcaggaggatcccttgaactctggaggcagaggctgcagtgagccgagatggtgccactgcactgtagcctgggtgacagagagagactccatttcgaaaaaagaaaaaactaggtctagaattagataatggtgatggctacacaacttggtgaatatactacaaaccattgaattatatatacactttatcttttcgagacagaatctcgccgtgttgcccaggcaggagtgcagtggcgtgatcttggatcactgcaacctccacctcctgggttcaagtgattctcctgcctcaacctaccaagtagctgggactacaggcgtccaccaccactcccggctaatttttgtatttttagtagagacagggtttcaccatgttggccaggctggtctcgaactcctgacctcaggtgatccacccgcctcggcct

SEQ ID NO: 588434 - DNA, 4001 bp, Homo sapiens
aacaactgattaaggtgtagcctaggctgggcgcacctgtaatcctagcactttgggaggctgaggcaggcagatcatgaggtcaggagttcaagaccagcctgaccaacacggtgaaaccctgtctctactaaaaatacaaaagttagctgggcgtggtggcgcacacctgtaatcccagctactcaggaggctgaggcaggagaatgacttgaacctgggaggcggaggttgcagtgagccgagatcgcaccactgcactccagcctgggcaacagaaggagaccacgtctcagaaagaaagaaaaaaaaaaagtagcctaagggaatttgtggattttctccacaaatttctacagagaaaggagttgatttcccaagcagatatctcgaaagactcgctctcatctgccatacttttgctccatcaccatctgtcatcctgttaactaaatggcaacccattatatcacctttccatactgtgaagaaccccagggctcatacggccaccctcattgtacagacagggaggaacagagggaaggaggcttgctcagtatcacacagccagtgattggctgggccagggctgaaagccagacctgcctctacagcctaggaaggctggttaggaccaaggccagggaaagccacttgcgcccagcgctggcatctcctgagtccagatcttggaggacagatcctagaagggacctagccttactcatctgaagtggacaatccggatgaagcaggacttctgaatcctgttcaacagctgttctctaagagcctcctgtgaggcagaagcaatgctgagataaacacggcccctggcagccaggggtgaggacccggtgggaaacaggtctatggctgaactcttgtccccggcccactacaggaagggctgcagcgaggaaaacaccaggttgggcgctccctcccggggggaatcacagatgggctccagcccaggagctgagcctagagggatgggattttcaggctgagagttggggtggtgaaggcccggcaaggaaacctaggggaagggacctgtgcaccagcttctggacagctctagtgtagggcggaggtaagggctagggacccactcccaggggcccgaaggcaggactggagtgtgtcctttcactctgaggacaatggtgaggaaggtgttagggagcgacaggaggagagctgcgctgcagaaagttcatcccgacagccacagtagagaggatggggtgccccaggagaaagggagccagaccgagcctagcacagggggagcccggcacggcgcgggcgctcaggagagaaggaacaacaaatggatgagggggatgctcagggctgtcctcgggacagccgagcggggcaaactgcttcgcagcgagagctgttgtcacactttggtgacttttccaactctaagtctggcctcctgaaacaaagcagaagccacgccttggcgggccgcggcgcgcagcccctcagggtcgggaagcccaacttggcgcgatccccggctctccggcgggggcctccctcgggctcgccttccccccgggttccccggaaaccgcgccggggcgctccgcccgcgcgccctccacccgcaccccgggctcccgcactccccaggacctggcttgcggcggacgagggagacggcgaggtccgggagcgcggggttccgaaccattccgcagcgggcgagcccgcgggctcacctgacttgcccatggccggctccgcgcgctcctcgctccccgcggctgcgctgcactgcgctcgcccggcccagcgccgccccagagcccaggaccgggctgatgccgcggcccctcctccggcgccgcccggcccccgccttataaggagcgacagctgagggcggaggcgcccggggccaccccgtgggcctcccggagagctcacccctgggaagcagctccgcgactgccgagggctccccggatgcggccgcggggctcaagcctcccggaccccacaccgagctgtcccttcccggggcgcgtggggaagcccgcgcctgctgggccccgggtggctgctctgcgccgacgcgcggcgaggacagaggggcgcgcggtcgcggcacgaggggcgttccggccggcgccaccaggggacggcctctccctgccgcggcctgacacgacacacgcagccccggggtgtgcccccatctccggtgactctgggctccggagggcggctggtccggggagggggatgctcctctcctaggacacgccctctaatgccagtcggggtggaagcgccgccgcctctgacccgtccactcgcccctcattgcctcccagaccaagccaattcccacccctgcagtctggccccagacctgtctccccaacgccccaccttttccccatactccagtcaaactagatgtcttgtcattccccaaacatgttctgggatttcccacctccctgcctttcctcaggcggtccctcctccgggagtgctggccctggagccaccattccagtgctgcccatccctcggggtcggccggtctttccaactgccaggtgccctgaccctgggagcagcacacaccaggtactggggagatgtggtcccacccatggcccctgccccgtgggagaagtgcacttacttgaccgcacagccctagtcacctgtgccagacttcccgcaagcgctcctttctggggaaggggctcagtacaccccaaatgaaggaagcgaattttaaggcttttcaatgaatgggcactgaagtgagctgacccactgatgataaggctagaatttgtaataccaacggcttacgaatgtcccgcagggcgatggctgggcactgtgctctctattcctttccccatgtcaggcaaatacacctactgtattttagtaccgtcatgagtaatgacatttcagtcaatgccagaccacatatactgtggtagtcccaagagattatgataccatatttttactatgtttctatgtttacatctgtttatatatgcaaatttttaccattgtgttacagtcacctaaagtattcagtatgggtcaaattggtgcccaaccctgattcaaaagggactcctggggctgggtgcggtggctcacgcctgtaatcccagcacttcaggaggcggaggtgggaggattcttgagcccaggagttcaagaccagcctgaggcaatatagtgagaccccccctcccatctctataaacaaacaaaagggactcctggtgctaggtggggatctaaccccctctattcaattccctctcccattttgtcaacaaatgcctattgaaataatcaaataaacacagtaggaagaattccatgttgcccctagaatctctagaaggctgtatttcacataacaaaaactttaaggccgtgggtggagacagtgaggctcagcgggctgctcactgcacgcagagggaagcccatctgggaccaccatgtttcactgacaccttgaggtctgaggactggaggtgagaggggctgagagtggatgcatttcctaacttagaaattcataaccttagcagcaggcacatgaaggaacagggtgctgaatggagggtgttagggcagtgccaaagtcaaccccgaccaagggccgtgggctagttggagagggagtcgctgtccaggcatcagacacaagagacaaatggccacaaaggtcagacacaaagaagagtgattgacccaatgtattgtctttgtgtgtgtgtgtgtgtgtgtgtgtgtgtgtgttttgagacagtctcgctctgtctcataggctggggtgcagtggtgcgatctcggatcactgcaacctccacctcctgggttcaagcaattctcctgcctcagcctcccaagtagctgggattacaggcatgtgccgccatgcccagctaattttttgtatttttagtagagacggggtt

SEQ ID NO: 588435 - DNA, 4001 bp, Homo sapiens
tgtcttgtggtttggatcattttccacctcttactcgagccagatagtgcctgtctatcccctacatagctttatgtattcctttcacaatccaagtggatgcacgccccggcactgggtccacagcttgatacagagctgctagacagtgcaagggagggaaggaggaaggggcgaacagacagaagaatgggcacacagctgaatatgagcagttctggaaaaccgtgccttacataagatgccagaaacaactgattaaggtgtagcctaggctgggcgcacctgtaatcctagcactttgggaggctgaggcaggcagatcatgaggtcaggagttcaagaccagcctgaccaacacggtgaaaccctgtctctactaaaaatacaaaagttagctgggcgtggtggcgcacacctgtaatcccagctactcaggaggctgaggcaggagaatgacttgaacctgggaggcggaggttgcagtgagccgagatcgcaccactgcactccagcctgggcaacagaaggagaccacgtctcagaaagaaagaaaaaaaaaaagtagcctaagggaatttgtggattttctccacaaatttctacagagaaaggagttgatttcccaagcagatatctcgaaagactcgctctcatctgccatacttttgctccatcaccatctgtcatcctgttaactaaatggcaacccattatatcacctttccatactgtgaagaaccccagggctcatacggccaccctcattgtacagacagggaggaacagagggaaggaggcttgctcagtatcacacagccagtgattggctgggccagggctgaaagccagacctgcctctacagcctaggaaggctggttaggaccaaggccagggaaagccacttgcgcccagcgctggcatctcctgagtccagatcttggaggacagatcctagaagggacctagccttactcatctgaagtggacaatccggatgaagcaggacttctgaatcctgttcaacagctgttctctaagagcctcctgtgaggcagaagcaatgctgagataaacacggcccctggcagccaggggtgaggacccggtgggaaacaggtctatggctgaactcttgtccccggcccactacaggaagggctgcagcgaggaaaacaccaggttgggcgctccctcccggggggaatcacagatgggctccagcccaggagctgagcctagagggatgggattttcaggctgagagttggggtggtgaaggcccggcaaggaaacctaggggaagggacctgtgcaccagcttctggacagctctagtgtagggcggaggtaagggctagggacccactcccaggggcccgaaggcaggactggagtgtgtcctttcactctgaggacaatggtgaggaaggtgttagggagcgacaggaggagagctgcgctgcagaaagttcatcccgacagccacagtagagaggatggggtgccccaggagaaagggagccagaccgagcctagcacagggggagcccggcacggcgcgggcgctcaggagagaaggaacaacaaatggatgagggggatgctcagggctgtcctcgggacagccgagcggggcaaactgcttcgcagcgagagctgttgtcacactttggtgacttttccaactctaagtctggcctcctgaaacaaagcagaagccacgccttggcgggccgcggcgcgcagcccctcagggtcgggaagcccaacttggcgcgatccccggctctccggcgggggcctccctcgggctcgccttccccccgggttccccggaaaccgcgccggggcgctccgcccgcgcgccctccacccgcaccccgggctcccgcactccccaggacctggcttgcggcggacgagggagacggcgaggtccgggagcgcggggttccgaaccattccgcagcgggcgagcccgcgggctcacctgacttgcccatggccggctccgcgcgctcctcgctccccgcggctgcgctgcactgcgctcgcccggcccagcgccgccccagagcccaggaccgggctgatgccgcggcccctcctccggcgccgcccggcccccgccttataaggagcgacagctgagggcggaggcgcccggggccaccccgtgggcctcccggagagctcacccctgggaagcagctccgcgactgccgagggctccccggatgcggccgcggggctcaagcctcccggaccccacaccgagctgtcccttcccggggcgcgtggggaagcccgcgcctgctgggccccgggtggctgctctgcgccgacgcgcggcgaggacagaggggcgcgcggtcgcggcacgaggggcgttccggccggcgccaccaggggacggcctctccctgccgcggcctgacacgacacacgcagccccggggtgtgcccccatctccggtgactctgggctccggagggcggctggtccggggagggggatgctcctctcctaggacacgccctctaatgccagtcggggtggaagcgccgccgcctctgacccgtccactcgcccctcattgcctcccagaccaagccaattcccacccctgcagtctggccccagacctgtctccccaacgccccaccttttccccatactccagtcaaactagatgtcttgtcattccccaaacatgttctgggatttcccacctccctgcctttcctcaggcggtccctcctccgggagtgctggccctggagccaccattccagtgctgcccatccctcggggtcggccggtctttccaactgccaggtgccctgaccctgggagcagcacacaccaggtactggggagatgtggtcccacccatggcccctgccccgtgggagaagtgcacttacttgaccgcacagccctagtcacctgtgccagacttcccgcaagcgctcctttctggggaaggggctcagtacaccccaaatgaaggaagcgaattttaaggcttttcaatgaatgggcactgaagtgagctgacccactgatgataaggctagaatttgtaataccaacggcttacgaatgtcccgcagggcgatggctgggcactgtgctctctattcctttccccatgtcaggcaaatacacctactgtattttagtaccgtcatgagtaatgacatttcagtcaatgccagaccacatatactgtggtagtcccaagagattatgataccatatttttactatgtttctatgtttacatctgtttatatatgcaaatttttaccattgtgttacagtcacctaaagtattcagtatgggtcaaattggtgcccaaccctgattcaaaagggactcctggggctgggtgcggtggctcacgcctgtaatcccagcacttcaggaggcggaggtgggaggattcttgagcccaggagttcaagaccagcctgaggcaatatagtgagaccccccctcccatctctataaacaaacaaaagggactcctggtgctaggtggggatctaaccccctctattcaattccctctcccattttgtcaacaaatgcctattgaaataatcaaataaacacagtaggaagaattccatgttgcccctagaatctctagaaggctgtatttcacataacaaaaactttaaggccgtgggtggagacagtgaggctcagcgggctgctcactgcacgcagagggaagcccatctgggaccaccatgtttcactgacaccttgaggtctgaggactggaggtgagaggggctgagagtggatgcatttcctaacttagaaattcataaccttagcagcaggcacatgaaggaacagggtgctgaatggagggtgttagggcagtgccaaagtcaaccccgaccaagggccgtgggctagttggagagggagtcgctgtccaggcatcagacacaagagacaaatggccacaaaggtca

SEQ ID NO: 588436 - DNA, 4001 bp, Homo sapiens
ccgtgcgcgagcgagcgagggagcgaacgcagcgcaacaaaacaaactagtgccggcttcctgttgtgcaactcgctcctgagtgagtcgggggccgaaagggtgctgcggctgggaagcccgggcgccggggacctgcgcgcgctgcccggcctggccggagcctgtagcccgggggcgccacggccgggctcgcagtccccccacgccggccccccggtccccgccgagccagtgtcctcaccctgtggtttcctttcgcttctcgcctcccaaacacctccagcaagtcggagggcgcgaacgcggagccagaaacccttccccaaagtttctcccgccaggtacctaattgaatcatccataggatgacaaatcagccagggccaagatttccagacacttgagtgacttcccggtccccgaggtgacttgtcagctccagtgagtaacttggaactgtcgctcggggcaaggtgtgtgtctaggagagagccggcggctcactcacgctttccagagagcgacccgggccgacttcaaaatacacacagggtcatttatagggactggagccgcgcgcaggacaacgtctccgagactgagacattttccaaacagtgctgacattttgtcgggccccataaaaaatgtaaacgcgaggtgacgaacccggcggggagggttcgtgtctggctgtgtctgcgtcctggcggcgtgggaggttatagttccagacctggcggctgcggatcgccgggccggtacccgcgaggagtgtaggtaccctcagcccgaccacctcccgcaatcatggggacaccggcttggatgagacacaggcgtggaaaacagccttcgtgaaactccacaaacacgtggaacttgaaaagacaactacagccccgcgtgtgcgcgagagacctcacgtcaccccatcagttcccacttcgccaaagtttcccttcagtggggactccagagtggtgcgccccatgcccgtgcgtcctgtaacgtgccctgattgtgtacccctctgcccgctctacttgaaatgaaaacacaaaaactgttccgaattagcgcaactttaaagccccgttatctgtcttctacactgggcgctcttaggccactgacagaaacatggtttgaaccctaattgttgctatcagtctcagtcagcgcaggtctctcagtgacctgtgacgccgggagttgaggtgcgcgtatccttaaacccgcgcgaacgccaccggctcagcgtagaaaactatttgtaatccctagtttgcgtctctgagctttaactcccccacactctcaagcgcccggtttctcctcgtctctcgcctgcgagcaaagttcctatggcatccacttaccaggtaaccgggatttccacaacaaagcccggcgtgcgggtcccttcccccggccggccagcgcgagtgacagcgggcggccggcgctggcgaggagtaacttggggctccagcccttcagagcgctccgcgggctgtgcctccttcggaaatgaaaacccccatccaaacggggggacggagcgcggaaacccggcccaagtgccgtgtgtgcgcgcgcgtctgcgagggcagcggcggcagggggaggaggaggcagaggcggggtggctggaccctcggcatcagctcattctcccctgctacacacatacacacacaaataatgtttctaaaaagttcagttgcgactttgtgcctcgcctgtcctgttcatcctcgtcctgggccggggaatgcttctgggggccgaccccgggatgctggctaattgctgccggcgggttccgtcgccggtgtgaccctggacggcgcggacggcgtacagggggtcccgggaggggcagtggccgcggcactcgccgccggtgcccgtgcgcgccgcgctctgggctgcccgggcggcgcagtgtggacgcggctgcagggagaggggaagggggaagagggagggaggaaggcagccgggcgaggagtgtggatgtgtgtgcggccgcgagggccggcctgtagccagctgcttcctgagtgtgagcgccggagggggagggggaagagtgggggcgggctcgcgggtcactaggctggccaattcgaaggccgagcttgtgtctccctcttgacgcattcacacacacacacacacacacacacacacacacacacactccccgtgcgccagaagtcgaggaactccagaacagggtaacagcagggagacacttcgccttcttcctggccttatttgttaaactgacttattttaacatgaaaaagtgttagtgtttagacaggatttgatgtcaggtcataaaaaaataaacaaacaaccaaaaaaatccggtagtaatacggagagaataacacagtgaaaaatggcaaaagggttgctttgaaatatcggatcggatgcacatgacagcttcgaaactggataggtgaagcactaaggaaggctttggcatcctttccaagtataggcagggaagagaggaaggtgatggaagtgttagaagggtataaaattctgaacacaggctgttaagaatggaggtatattccctgcgtatgttacgtctataaagtggcactttatccttatgaattcaacatcctcagcctcataccccacctaagctctgactcgccaccgcttctgcttgtgttgaccagagccctcaaaaggttgttacaagaaagtctgctcctagtagttcatcacatgtattgccacagatgcaaggacttccatcttgggaatctaggtatgtaatgcacacaatatcctccaggtaggcctttctgcagttgacagtattattcaccatcatgaatgaaatgagtgaggatgccaccagacacttagaatttcacaagtccttatattctattctactgttaccactccaatataaattagcaatcaggtagtagatgctttgatcaagacagaagtcctcaaggacacaaatgacttaccccagaaagccaaaactaaaagactattggcagttttcatttatctaatttcagtgggaatactactaggcttggtctgtatccatgatattaacataaccaaaagaagcctggtttccacagtactttttcttttcttttccttcaccttgggacacaaactcatcagaatatttgtcagcagaagtaggggatgaaaaatagtaagaggtcaggatatgtcattctgtcagttttccagtttctctctgttcatctcttttaaatacaagtattcaagcccaagatggcaatagatgggctcaaccacacgtaagaaaagaaaatactcataaaatgaagcatgcagcaacatcacaaaaacaaagaaaccaagtggtggaaattgccatgactattccattgtggctagttattgcaacatgcctgacattcacataaaaactcttcctcattaactccagccttaaggaacagagcaagatggcaacactaacccttcaatgcatcatgggaacttctgttcatcagattcttgtgctgtacaactgcttcccaggagcaagacaagcctgggtggagactgcaaaaaacctttccaatgtccctcaaatatcattttaaatacaatggttttgatgcatagaatggtatcctaggggcttgcagaagcttctaaaacttcccaaatgatgggaacagcttagctggaagagaaaaaaatatagtgctacacccaactttaatcaatagctcatggaaaaaaacactgggaaagttaggagtcatcaacctggagatccccaaaatctcttcatttataagagcccaagagtgggaatgtcattttatttaggtgtgattttcatgaacctctaacattcctaaaatatttaccactgaagaggtatagtgctttggttgaatttttttctttttttttttttctggccaagaatgtagatctgcaatgttctt

SEQ ID NO: 588437 - DNA, 4001 bp, Homo sapiens
aacctaccttaaaaacaacaaaaataaagctgaaagggggtcttttctaaaattctgcctcagtagcccaaactttgatcttacacaactggactgacctaaaagcagagtccaaccagccactgactgtcctctgcttttactaaccaataaaaatattcacataaggaggaggaaaacgtaaatttgtaggtagatggggccagccatatggaggcaagaggaatctatgccagggcaaagtcgcaggccaggaggccaagttcagtctgtggcaagctcagccaaatcaccacattcagcctggtaagatcacataccatctagcacacagcctggcacaaaccaaatgctcagaaaatatcgattcctcttcccatctgcaaatcacatcagaaaacctttactctctcatatcttaaaagactatctttaaaccagaatagatgatgaaacaatttcaagggtttccctcataagaaaaagatgtatctctgcccccaccatgctttgaattcatagatttagatgccaagaaggaagattagaaatcatgtgtccaacctccttattttataaattgtaaaattcaagtccagagatgtaaagtgactttcacccggtcacacagctagttaatggcagcatcaggacaaaaatccaagtacttgggcacccaactaaacccactttctaatgtatcctactacttttttggggctgtcagttataaatggtgcttaatgatgcaaatacctctgaggcagttaaaaatgtcttttgccttcaaaatagagtgaagatggcagatgatcgactcctacacaatgagcattgggttggggacaggagcgtccatgaagagatgaagagctgaaggaaaaaaaggggtaagcacagaggaggagatcaggatgaaaagcgacatagagatgcctacttaacaactgtgcctagagatcgactctgtttcagtccacaggttgaatctgaaaacgccaccagagacttctctcttccaagtgtctttgagcctagaagatacaaaagcctgcattctcccagatcagacaaaatgtatgactcttcaggagaaaaaagaaatcagattgttacatttttaaaaagaggttcagtttgagtttgcctctatctcctcaaactatatgttttagcagaaacacagctaaaccacaggttttattagaactagtgcctgcttattcatccaccaaatgtaaatctgccactgaaccaacattcagactgctcagggagagcaagcaccttgcttagaaagggggaaagtctaatttaagcatatggaacttgacagcataatttttttaaagattctcttctcaaagaaagtttacaagcagtaagtggggctctaaggctattatttcttggcaaaataactgcagaacaattgtccagttcacagttttgcactgaggggatttctttggattgtggcctttcttcatctttgttctaaggaaaaaatctgccttcaggagtcctaaacaatgaaagcgctcttcattatgtctatgagtttggatagagtcctgtggcacagagaccatgcctggtaatgaagcataataatcatctgttcctagttaaacatactcataccttccacagcaggagagaacctttggaaggcgacagaatgaagggcatttgaggttgagaccctcagtcctccttgggctcaactcttacccaaaggactctcataaaaaagaatgagaagacataaaaacatcacgtaaaattcaatgttattcaacaaatatttatgggatctccagtttgcacaggtcttgtatgaaaaaaccagaacctcaaaccctcccagtctcatatctcacctagacaacaaacaagtaacacaatatttttctacggccattcaaacctctattagttgccacttcagcagctgatgaaaactctgcttcctccaacacccttcaaccataaaggatgtgtgagcctcaggaaggaaccaaaggaagaactttctagaaatcagaagtgactgggaacctttgtgaggcagggttcttgttcctggaagaatacacgacggggttgccaggatattgcagagaatgtaggaggaggggaatggaagagaaaaatccctaaggacattcccaactctataacatctcaaaggctttaaacacaataacaaggtttacattttaatgtagattatgaggattttcacagccttcatccaaaggctattgtttgggctactttccattctaggagcctacacaaattatgtgacatgaagcagagtatttaacttctctaggcctcagatttatcaccactaaaatgcaggtgagtaattaaataatctctcaaatcctttccaacccattttctgagtaaacgtggtgttcactctctccttttcacaaagttaaatttcagaaattctttctacctataaaattcaacagaatccactaaaaattgttataaacgaaaattcaataaggtgacaagacgcaatgtaaattttacaaaagcaataggtttcttatataccatcaattataagttttaaaatataatgaaaaaaagaattaaaaattcttaagaatggcatgtaatatgaagaaaactacctgtttctgaagacctaaataaacatagatatgtaaatgtttctggaggagaaagcaacatataataagtatgttcattcttcctaactttcttataggttgaatgcagtgcttcttagcctctgcattactggcattttgtgttccatagttttttgttgcaagagcaggagtgctctgtgcattgtaggatgctgagcagcatctctagcctcttacccactagatgccagtagcacccctcgtggtgacaaccaaaattaaactctgtctagacattgccaaatgtccccaaggagcaatatcatgcagagagaaaaccactgaattaatgcaaagtcctaatgggcctttccttattcactaccttgacaatgaattctaacttggaagaataaaatagtactaataatcaaaaatatgaaaataaaaattgtgggctgtgcatggtggctcacacctgtaatcccagcactttgggaggctgaggcgggcagatcatttgaggtcaggagttcaagaccagcctggtcaacatgttgaaaccctgtctccactaaaaatacaaaaattagccaggtgtgcttgtgcactcctgtaataccagctacttaggaggctgaggaaggagaatcacttcagcccaggaggcagaggttgcagtgagctgagatcacaccactacactccagcctgggcaacacagtgagactctgtctcaaaatatatatatattgtggaacacagaaggaagactaattaaactaaataaagaaagagaacagaagtataaaatcatgacctcaaatatatagtaaagtttgcatattattgctttacaaatgagtggatgaaaagagatcaataaatggtagtgggtcaacagtttattatagtttggaaagaaaaatcaaagttaaatgcttattcacatgacttgtatacatgttctgattatctactgctacatagcaaaccactcaacaacttagcatccttaaaacaacaatttattattatctcttgtggttctaggggttgactgggcccatcaggatgcttctcatttggggtctctcatgcactgcagtcacatgtcacctaggacagcagtcatctgaagggtgggctggatggacatctaagtggcacactcccgtgctgccaggtgatgctggctatcagctaggagctacgctgaggctgtcaataagaacaccaacacatggcctctgcacatgacttgagcttcccacagcatggtggctggtttccgagaggcagaaagagggggctttcaggccatttagaaacatgcctccaacagatgtagcatcactt

SEQ ID NO: 588438 - DNA, 4001 bp, Homo sapiens
tcaccagaagctggttttcagattttagatttttgggtgttagccgttctaatgggtgtgtagtggtatctccttgttttcgttgcaatttcctgatgacaaatgagactgagcatcttggcgttcgcttatttcccatctgtatatcttctcttgtgagattctattcagttcttttgctcatttttaaatgttttaaatgtcaatatttaatttttaaatttaggtgtttgtttccttattgttgaattttaagagctctttgcatattttgggtacaagtcccttaccagatacatgttgtgcaaagctttcatttttaaaaactattatctgtcatgatactactgctgttcaaatagcctctggaaacactgcattgcttatgaagaagaccatgaggagtggtatggagaaagctagaatttgagtttttctagacgggaaaatattagcaggtgtattagtctgttttcacgctgctgataaagacatacccaagactgggaagaaaaagaggtttaattggacttacagttccacatggctggggaggcctcagaatcatggcaggaggcaaaaggcatgtcttccatggcagcggcaagagaaaatgagaaagacggaaaagtggaaacccctgataaacccatcagatctcatgagacgtattcactatcatgagaatagcatgggaaagaccagcccccatgattcaattacctcccccgggtccctcccacaacacgtgggaattctgggagatacaattcaagttgagatttgggtggggaaagagccaaaccataccagcaggtttacagatgcgtcctctagtacacatgcttctatatgcatagaattaggttgactttagtcttgtttacattaaacacaaagatggaacctttagtattatttatattaaacacaaagatggaaacttgagatagtttataattcatctaaaatggcattgtcacctttattttttattatgcttgttttataaaatattatatccctggcattgtcttttatgtgtatttattgtctaccttctccaaatagaatgaaagctccctgaggacaggcactttcattatcactgcatccccagcacctagaatacagcctggcacctagaaggcactctgtaaataattgttgaatgtttaacaatgaaataattaaaatatgtatattttcctttgtcccacaaagagaaagtaacttctgatttatttagagagtagtattgatatctttggacaaaactcagcagtttagattatctctgccagcctggacaacataagtctctacaaaaaaaattcaaaaatcagttgtttgtggtgacatgtgcctgtagtcccagctactcaggaggctgaggtgggaggatcacttgagcctgggaggtcaaggctgcagtgagctaatatggcaccactgcactccagcctgggcaacagagtaagaccctgtctcaaaaattaaattaattaatttaattaaattaaaaccacctctgccaatcactaaagatcatgatttatcaatactttatatttacctgaaataacgctcaaccaacatcagtgaaaaagcaaataaaaccaataacagcattcttttagaattcattctctcctagggaaagaaggagaaaaaattagattttaagcaataaaaaatgacatatttgtcatcatctaacaatgggttaatgtatgggcattggacaccaaccttagaggttgcttctagaatgttcagctggcaggagacagcgacttgagttagggaagcctctgttctccttcaagtgcccggggctgactgttccccgtgggtcagctgcacgtgcactgtctctccccgtgttcacatcaaagtctgcgttgattgcatgaaagaaacgcaataaatctctccactgcagggctgtgcaaatagaatgaggtcttgatgaggaagtcttcttgatctaggagaatgtattctgcccccgaagtcgactttttattctttcttcctcactaagatagtaagatgaataatttgttccaagactatgccagtctaaaaatttacaagtgctctcaaaggtagatcttgtaaacggagaatgaagtctacattaaaggcattagactttacaatggaagtctggactctcaccagtgcctgagcttgtgttggaggcttcacgtgggatttggtttacaagcccatagggaacacgccactgcgctgtgtgtccacacaaaatgcaggtctctgattctctgattttcactttttttttttttttttttgagatggagtctcattctgtctgccaggctggagtgcagtggcacaatcttggctcactgcaacctccgcctcctgggttcaaacagttctcctgcctcagccaccacatccagctaatttttgtatttttagtggagacggggtttcatcatgttggccaggctggtctcaaactgctgacctcaggtgatccgcccacctcagccttccagtgattttcaattttgaacactcatttaacaaacatgacactttagctctgcactgatagccatagagtagccacttgccacatgtggtcccgagtgtgtgaaatgcagctgctgtgaaatgaggtgagctgcaagtgtacaaaacacatggggtctcaaagtcaaacacagtgcgaaagaaaataatttaccatctcactcataacttcacatcgatcacaggtgaaacggtaacagtctgggtgtcatagtctggaaagaatgagttaaatgagaaataaattatgaaaattaattcacctgtttcttcttactgtttgtaatgtggctactaggaaaccggacattgataatgtggctcacaggctgggcgtggtggctcacacctgtaatcccagcactttgggaggtcgaagggggaggatcacgaggtcaggagttcaagaccagcaggaccaacatggtgagacccccgtctctactaaaaatacaaaaattagccaggtgtggtggctcacgcctgtaatcccagctactcaggaggctgaggcagcagaatcgcttgaacccaagaggcggaggttgcagtgagccaagatcgcaccactgcactccagcctgggtgacagagcaagactccatctaaaaaaaaaaagaaaaaaaggagagaaagaaagaaaatgtggctcacattatatttctatggggcagttcttcatataatcccttcctgggcaggcttcggttgggcccagttcttgtacctctgcaattggaaactgaccaccttttaagttcaagatcactagaaatgccatgtggatggggtaagacaggcccatctagccaggttctctacagcagtgtgccctcctccatgacatcatccctgggcatgctactagctgtatgttgatgagctgcctgtctgtcaatatctttctgaggtcaaggttagaggatgacccaaaccctgattttaccacaatcatccaaactttcctagatccctctttaaaagtcctttaccttgggttagagtgatgcaaagagatggccaaagatgttccacagggacagggatcttctaagcatatcttttggtctgtgtcgtgtcacaaaccagctgccatctactgctctcctagcgctggagtcttccgttggtgctgacgtcactgggcacctttgatgatgcaagcgtcacagtgatgcctctgcccacaggttcttcccatggttatgaggacaagactttgtcccatttgaaaaattaaagggtaggccgggtgcggtggctcatgcctgtaatcccagcattttgggaggccaaggtgggcagatcatctgaggtcaggagttcaaaaccagcctggccaacatggtgaaaccttgtctctactaaaaatacaaaaaattagccgggcatggtggtgggtgcctgtatcccagctacttgggaggctg

SEQ ID NO: 588439 - DNA, 4001 bp, Homo sapiens
tgggtccctttgggctgggtattcattccatccaggtcttgggagggagggggcagcatggtctctgggtagcaagcccctttggacctacagacttccagctctgtggggaggggcacacccccccccaacccccagaaggccagactgggccctttaaacccaggggataaggataagggggttcttccgcccaggtctgaaggccatactggctgagagccttctctatattacactaactagatcaactttttctttccttgaagctttctgggagggtgattcctatacaaggaataaagatgaataaatagatggtataagagaagattcctgttcaaaaggggtgaaagaaaaaaagttgaaatctttgtggctatctagaaaaaaattgacagctgatatcatggtctgaaaggtagaaaaggtaaaatattcctcaaacagcaaatgtgttgacagcgttctagaaagtctgagatgggatccttgcctcatggcataacttgggcaaaccttaaactgtgttctttctgtgtttgaaagtggatgtcctacccagacctttgcagagacaccaaaagagctggatgaagacctgccagaggcaccagggcagccaagctgaatcctaggacgtggacacactgagtcaagctgggcaagggaggtttgggtccgctgcaaacacaaaggcctgagggacccccatgggaggcaggcataggagctcacggtcagaggagcagcaacggcatgggcttcacccccacagctgacctagcatcggctttgccttttctcaatcagggcaagttggtcagttctccaggcctccatgttttaattctctagaatagcgatatcacctgcccgcatcaccaggtggtgatgcccttaagaacttagcacgatctggcacatggtaaattctcaagatgcttcatctagaactgaaagcgtacgggtcagagctagcgctgaacccaagatgtgggtcaccacagaccccaagctgggtgtgctgcgggcggaggagtggacggggttttgaggagaggggcacaccggaacacataaggtacagcggtcaagaggttaagtgttacaggtccctatcctgttttggggcaggggaaggtgttgcttttgcaagtcgcccagccagagatggaaagaacaggcacctaaggccccaagttgctggcatccgtgagctccgagggggagaaggacgaagccgccctgcaccccgctgggctccagggccgcgcgggtgccagtggagaggccgggagggctcggaagaaaaacgcccggctcactggagtcggagacgcagccactcacccagcagcagcagcttaagctcacggcgcgcgtccttcttgtcccgacgaagctgtcgctcgatctccgcgctgatgcgctgcgactccttctcctccgcggacaggcagcagcagccggccatggtgcgctcagctcagtacccgacggggcgacgcggccccgggcacccgaatcctcggcccggccgctcacccggccagcatgcgacgggcacaggggtgtggaaagaaaagacgggggccgacttgagctttggagtaagacgcctggacctccgaggctcaatcccccttcgaaagtcggctctgaggcggggtgaatgccgagcgctgggaacgctcgagtgcaccccggatccgggctcagcccgccccactctcgctctggggaggaggagggcgagtcgagaagttgggagcgttgctggccccgggaagatgcgcgcgccccttggcacaggagccggacagcagtcgggggcgcagacgagttggaacgtcggtgctcgggggagagtaggatctcctgggcctaggggtgtccccaggcgggaggtaggcgcggagtgggttggaggcaaaggacctggctggcctttgcctggaaagttctgaaaacctcagcagtgaccgcagactaagactgagtggaaaggttcccgctagcgtttgtggctctaagtggcaggaggaggcggagcatcttgaacctgcagccctggcgtctgctggacttgcccttctgggcaccccaagccgaaggcgcctggaagtgaaaggggacgagcagggggcgcggagctgggggtgggagctggcacctctaggagcagctcccacacttgcctccctggctggggcgtcccggccaaggtttgctgtaatctgcgcgtctggccgccaggcaccgggttccgacaggtgagtgagtttcgccaactcactcgctcggagaaggcggcagcaggctggaagaggagcggcgccaagcgtctgttgcgggacacaaagccccggacctgaagtggaagcttgcccaccagcttcaccaccacgcacacccggatttcctagactggctccttccgcttcccggacgccccggcccagctcgggcttggccaaagcccttggtcagctcggcaatttgcctgtaaagtgtggctgggcctgagcctgctggctctgagctcggagaaggagccgccgctgggttcagttataagagaactgcaagagcccagggtaaatatcctctcggtctccggacgagggggctggggagaaagggaacggctgattgctttgcattttatgatgggaaagacacctgctttgtagaaagggctgatacgttcctagtagcacctggcaagtttcctgcccagccctgaagcctaacagccgccttgcgattgtgtccgcactgacaccttggcctgtatcctggaccgtcggggtcaagtttgagcagcattaataaaaactttaaaagcacctcttagtacttaagtgacacgataaaatgcatattacaacatctgacttttgtctgtgtagattttgatgcagaaaagggaaggtggggagaggggatcctattggccacagcaatgaacgttctttccttctcaagtcagtataggccatatgctaatggggcgttaggcaattagctagcgcttcctctactaagagcaggcataagtgcctttcatttgagtagcatatattttataaattcaaactgaggagcacattgagtggaatggtacgtgtcattatataaagaagttggtatcgcgatgctatctggctgcatgttcttattattttacagtttaagaaatgtagaggaatcagacattaaaaatgtgcatacatgctttaatgtgtgactattttagttttcttgcaggcataaattgacagtaacagtgacccctacaggaaaactcctggacatttcagatttgatctttggccatttaatagcctgtttcttctctcttagctcttacggattcatttacaatttgagaataagatctcttggcttctcaaagtcatggttgcatcataattgttatcatttaaaaattataaaaaatttttaaatgattaaaactagggcaaatttgaactcttacgttaacgggaattactgatactgacctattaggtttaaagttggcaagatttcaaaaacagttatgaaacatattgattagggcaaatctgtacaactttcctgggctagtcagcttggcagtatatatctgaagccttaaacatgtccgtccccttcggccaaaccagtaatttctcccttaagaaataactagaaagaagcctcatgactgatgcaaaggttttattgccaatacaacaacaaaaactcacaacctaaatacctaacaacagggaagagatcacttaaatcatggtttatccatacaatgagatgttttggagccattaaatatgtggatatgcgagtagtaaacatgtgaataaatttggagaaaatcctcaaaatatattgaatgaaaaaggcaagatccaaaaatataaagagtatgataagattttagtataagaatacgcatacacatttttaagagactgaagggacacacatcaaaa

SEQ ID NO: 588440 - DNA, 4001 bp, Homo sapiens
gtagctcaaaatgagaattaaaaaaaaaaaaatctttactttccaattgcagtttgcctcctccctggcttcattcccctaagcccaactctttcatccagtgcttttgccttctgctttttataaacatgtgcacatttatctaattgagtttcaaaatgaagacataaagaaagcatgtcatgggaattaactattagtaactatgtgtgtgatcagtatattttgttcctgcttgtaaatgatccagtacataagcagttcattcccaaaggcaattggttccttgagccagcaaatggaatgctcaagataagaaagaaaatgcatgcttctcacaaacaccaactaacagtacaatattcttttcttacagaaatgtttgagaaacacatttattatacatgcaaatacccagaacacaagtgcagacatttttcaggcccgttactgcaaagctgtttgctcttcctgccacagtagctcagggttctgtcactgtggcttgtatatgaaccctgatcgcttgattctgaacatcctcccagagataatcatcaataaatttctatttgagaaatggcattttcttgctaacttagtgttgaagcagaatttttttttcaagactagagggaaatttttcctgtatgcttcccgtttttccttctcgcccagattccaaagacattaaaatgctatctgttttaaacaaaaggtttctatttgttgccaagagagtaactgagagactgcactggttttcggtagtaactattgtgaactgaggcctacatctaggttgcctcattaaacaaaagataccggtcgctgtcaacaaccacacagcacaacgctcccctaccctcatctttatctagaaggaatggtgcagacgagaataacgcctgtcaccatccactggccaactcttctaggctccctcctttcgatggtctggtggctagagaacagcacttgtgtgacacatttgggcttgccctcccgcctcgcccccagtacacagaccctttccttggagggccaaccacttggcttcctcaccatgagtgctccgggaatccagctgcgagtctgcccaccgttcccccattccctcctgaccccatagggcactgataatggatgcacaccggccactccaccgcaggccatcccccaacgtgccccggctccgctcgccacccgctgggccacacacacggctccccacgccaccaccccatggggtgccgcggccacgacactggaagttcaacccctctgcccacctttccacccccgcgcctctggtcggagtgatctgccatttagcagatgcacagcagataaggtacagccctcagggacacgaaaaggaacaagccaaggcaccgggcagggcagccccgacccctgtgctgcgtgtgtgtgtcgctgtgtgtgtgtgtgtgtgtgtgtgtgtgtgtgtctgtgtgtaacgcgcccgcgcgcccgcgcgggtgaaggcagtggccgggggcgcgcccgggagggtaggggcgaaccgcgggcgccggggggcgggggcgccgaaggcagctgccccgcagggccaaggatggtgggctgggggcgcagaggcccggcggggccccggacggtactcaccgagcagcagcagcttgagctcccggcgggcgtcccgcttgtccctgcggagctgccgctcgatctcgtcgttgatccgccgggcttccttggcctcctcgctcaggcagcacgccatgatggactccagagtcattcttccaaagtgcctccgctgcagccccgccggcaccccctgctcacagcgcgcacacacaccctcccgccctcgctcccccgaggcagcggtggccgccgagcccccgccgcccgggcgcgcgtccgggacgagctccgggaaccgccgcgggggcggcggccagggccggggccaccaggtgggccgggggcgcggtgggagcggatagtctgggccgacgggagaagagaggcgggcgcgggaggcgggcgctggctcggggggcgcgtgagagaaggccgccgcgcccggcctcgctcagacgcccgcgcctccttccccgggaacaggcggcccgcctcgccccccgagccgccgccgccgccgccgcctgcgaggctcccctacgccgtgcgcctggcggcgagagctcattcaccggggtgtccccgcagcgagcggccgccgacggctccccgcgcccggcgcgcccgctcctcgccgccgcctgacacggctcccgggcgccctcggccctgtccgcgcccaccgcccggctcgcgcgcagacccggttcccgtcccgcccggcaaccgcgcgctcctccgcctccgcctccgcccccgcccccgccagacgcccaccccctgccccgattgccaggcgcggagcggctgctcagtgcgagccctccccctcgccacacacacacattttcttctttctctgaactggagcacagatccgggagggaggaggcggcggcgaaaggaggaggaggaagaggcggaggggatgggcgcgggaggagggagccgggaggcggtgccgcccggcccctcctggaaggctttcctgggctcgcggccgccgcggcgcgcctcccagtgcggctctcgcctcgcccgcgcggctcccgggctgggccggcccccgcgggctctgcggacgcctactgctcccgcaccctcggcagagtccgcgggcgcagcagtcacggccgcccccggccgaagtcggggccagacccggccgccgacgcgcagcccgagccggcggccgccgttgcgtgccagggccgcagccgacctgcggctgccgtccggccgggcgtggtgagacaggaatatggcggcctctgcctgcctcagcccaccggcccgggagcgcggccgcggcccctgctgaagtcgcgggaggcggccccgcggagccccgcacgcgctccctgcggcgccggcgctggcgtccgccgctcccgggctgtgcctgtctgctccacggggtcgctcctcagccgtttctgtgtttcccgttcctatttctaaaacgccattcggttagaaactctcacgtcacctctgacaccggtgcagtcttagaaaataagctcctctatactgtgtggggctactggggaagggaagggaaggaattggcaccggtgcccagaggtgtagggggagattcacaggcgaagctgttcgcaaagtaacgtgagatagaaatctaaatcctgaacagagaaaggaagctgcccaagtttccaagagcctcccgataggttccaacttttcatgcctttgtttttttggtggttgttggttgtttttgtttttttaagttgtttttgtttttgttttacaagttctcttgtttctgagaaggcacacgatgtttagccgccgagtaatcgaatttactcttctagactgagattgaattatggatgacttatgggaaaatgtaaaataatgtggaataaaaggaaaggaaagaatgaaatagaagagaaactaaggaggccccagcaaaacggcattctagtttttttgatttgcaatatgtgattgaggcagtaaactgtcgtatgcacatttcattgtgatcgtctactgataaatagcacacgaaaataatcttgtttaatcaggcccaggagatgaaactcatattgcttcctgccttaaaggaacctgaggtcttcaaagaaaattgtcttttatgaagagaaccgctttttcacgtttcatgtgttctctgaagtgtccctggtgcaacctgctgatccagagtgtaaggtacggtcatgactctgcttttgctacagatcaagaactcatatagggttcttagacaacaggtgtgtaacttccttctttctttcatttgccattactccaccgtttcacacacatacacacactctaaaccacgatttaaatcaagcaag

SEQ ID NO: 588441 - DNA, 4001 bp, Homo sapiens
tgaatttctatcccagtcttctcagtccaaacccaaatattcagctacttataggacatctttatttggatgtgttctacaagcacttcaaatccgcttgtccaaaattgagctttcttcttccttataaacctgggctttctcttccgtcctaattctcagtgaatcgtattatcacctactaggatcttaggaggcattcttgacctctgcacctcctttctgtctcacattcagtgtgccacaaaaccctatcagttttacattttaaaagagtatttcctggaagagagaacatgatgtgattgaagacaataaaatgggcatgagaatagcatacaggggagaccagcctgacaggagaaaggttttactgaggaatattggaaaagataattgaattattaagtggcagagtaacttggaagataacttaaaggccatatagagtatttcagagcttgtgtggccatagaaaccaccaaacattaggcaaatgaatgaaatgattatttcaggccatatttttaaagtcagttatacaaaaaaaatggatggagagatgagtagaacaactattactttcataactagaaacaaccatttctaagcagattttattgatgacacgaggaaaaaaacttacaagttccagctagaagctcagaaagtctgaccttgaatttcaatttaagtgtgctaataaaaaataaaaataataaattctcattgaagaaggcagatagaaagtatgcattggtgatacagctaggagtaaactgtgttggcaataattgcaggaataatatcatctgattgaaaagtttttataaggccaggtacaggggctcaacgcctgtaatctcagcactttgaaaggccaagccaggaacatcacttgagcccaggagttcgagatcagcctgggcagcgcagcaagaccttgtctctacaaaaaatttaaaagtttgccgggtatggtagtctgtgtctgtagtcctgactacttgggaggctgaggcaggaggatcccttgagcccaggagttgaaagctgcagtgagctatgattatgccactacaatccagcctgggtgacagagcaagatcctgtctttaaacacacacacacacacacgtttgtataagccattccttaactatagatgatctttaaattgaatatatattttaatcacctaattgaactgtgatgatgatttcctaaaacatttggatttccatatgcctcaatgaaaaattaggtttaataaactacactatagtatagcacactatatgtcgcatttatatattgataaacatgataatttcctttttatttgacttagatactaattaacttggagtaaatgcacccaccccaatcatgtgatcagtcaatagttaaataactgagggaaaagaagtacaaatcaggcagctctacatgccatgtttcaaaagggaaggaaacaaaatagttaaactttgcatgttttggaaataaactgtatttatgaaacagagatctcaaaaagtaaaaggaaccccactttatctgatgaaagtgccaggaatctggagaaaagagttcaatttcaactttcagtttggagatgcagaaagaccctgaattttggcacagtaactgagaagcaagtagcagccacagaatgactaaactgagttagcagtaaaaaagtctttaaaaatgatggatttgatagatttaaaaccaaagctttcctcttcctctttgtaattttcctttttcccccctttttttctgattgcaatttcaataataaagctctattgaattccgaattacttacatgaggtccttgaaagcatgactccctctgcagataaccataggtttccatcccgaagcacgagctctgtaccctagtgtggtttgaaataatgagcagagcagctgttttcttggtttagctgccacggagcagtcaccaataggcatctgaattccagactaaatcgtaagccccacctctctgaaaaggaagaaaaaaaatgtggctctgaattcttctcatattcctggacagtagctcgaaagtaggtggtcagtcagcgtctgagtgttacttccctgttttggatttcccattccatccaataattttactttccactagaaaaagttttcttctgagtttcttaaaatctacaaaagtcttttttgtagttcaaaaatctacaaaagtcttttttcacattgttttcacacatacgtaattctaattctaaactttttttttctattcttttcttttttttttttttttttttttttttttttttgagatggagtcttgctcgtgtcttgcttttggtgcttagggactctcacagccagattggtagcaagggatactgaccaatgatctacttatcaaacaactctccatttcactggtaaatgctcatttgaccactggaacagcctagccttatctaccacacaacttcacattccactcaagagaaactatactaaaaggtatcccccacaggcacagaaattcttagttaaccattgtatgtttatagattttgaagtcaaccatggtctgaagtctattttattttatttgaaagagactgggtctcactatgttgctcaggcccatctcgaactcctgggttcaagcaatcctatcacctcggcctcccaaagtgctgggaatacaggtgtgagccaccatgctaaaataactcatttttttcttatatttttctttatttttttttcttcttgagacagtgtcttgctcttgtcgcccaggctggagtgcagtggcacaatctcagctcactacaacctttgcctccagggttcaagcaattctccagcctcagcctcccgagtagctgggattacaggtgtgtgccaccacgcccagctagtttttgtattttttagtagagacagggttttgccatgttggccaggctggtcttgaactgttgacctcaggtgatccacccgccttggcctcccagagtgctgggattacaggcatgagccaccactcctggcccttatatttttcaaatatgttaaaggtatacataaccctcaacaacattttttgttaaatctctgctctttgctctttcttcccatctgtttcctcacatccagtctgctcttttttctctcttaactaaaaactctgttaaaaaaaaaaaaaaaagttgtcttctccgcttcctccgtctttatagagaggcaggagagaacacttctaagtgtgccagggcaggaccttcttttttcaggcagataaaggagtggatccatggatagtattttttagaggtggggtcttgctgtattgtccaggctagacctggactcaagtgatcctcctgcctcagcctcccaagtagctggaactaaaagtgtgcaccacttggccagttttcatggatgattgttatgctttttcacttcctcttggttaatcttgacagacatcccctcctcccaataaaaatatccaggcatggtggctcacacctatagtcccagcactttggaaggccaaggcaggtggatcacttgaggccaggaattcaagaccagcctgggcaacatatttagatacccatctctacaaaaagaatttttttttaattagctggtcttggtggcacatgcttatagtcccagctgctcaggaggctgaactgggaggactgctttgagtccaggagtttgaggctgcaatgaactgtgatcttgccactgctctgcagcctgggccacacggcaagacactgtctcaagaaataaataaacaaaaatatccagtatttaatatactgtccatagactgcctataggacctcacttgagagcttacaaatcagcaatgggagagaaaaagctgtccaatagaaaaaattggcagaatagcactagggaactcaaaaaaatatatgatcaaaagtctgaccttactacca

SEQ ID NO: 588442 - DNA, 4001 bp, Homo sapiens
ctcccaaagtgctgggattacaagcgtgagccaccacgcccggcagaaacccaaattcttaaagactactttctgcattctctcaactcaagaccgtccattataaatgctgacaaaaggtgattaaccctttccagaaaaataatgccccactcaaccgtggaaagagttctttgtgaagagaatatttttaaggctatcaaataaaaataatgaacacttgggtcaagcagtcactgaacagaggaaacaacagtaaacatttgctgagcgcttctgaagtgccaaacattgtgctaataggtttcttcacatgtattaactcatttcatcctcacagccctcgtattagccgcgttttacagacaggaagcacagagaaaataatttacttgccccaaatcactgtttaatagttcatcattggccaggcgcggtggctgacgcctgtaaccccagcactttgggaagccgagatgggcggatcacttgatgtctgttcaagtccagcctgaccaacatggtgaaaccccgtctctactaaaaatacaaaaattaaccgagcatggtggcaggcgcctgtaatcccagctacttgggaggctgaggcaggagaattacttgaacccaagttcatcattgagagaaccgaaaatcaaacccttgtctgaatgacttcagcgctcagaacactgtcccacacccagtgtttgccttgtgtctgttcattccataaacatccatgagtacaaatcttcctcgaaaacatgataaatcgccctttcatcagtgcaatgaggatgggactcaaaggaataagaaggaaagagctatataaagctgtctgaaagtcagggccccattccgacgctataattcggtttggcttcaactgcggcgctcctacagttgggttaacgagttacctatactgcgaaactgtaccccacccctcctaccagagtagtaaaaaatacgttcttgtgttctaacaattttacaagcgtaaaactggggggaggggccgggcgcggtggctcacgcctgtaatcccagcactttgggaggccgaggtgggcggatcacgaggtcaggagatcgagaccatcctggctaacatggtgaaaccccgtctctactaaaaatacaaaaaattagccgggcgtggtggtgggcgcctgtagtcccagctactcgggaggctgaggcaggagaatggcgtgaacctgggaggcggagcttgcagtgagccgagatcgcgccactgcactccagcctgggcgacagagcgagactcagtctcaaaaaaaaaaaaaaaaaaaaaaaaaaaaaaaaaaattggggtgagggcggggaattaacgtttctcaaatatacaaggaagcccagactcagaatgtagactcagagcagggaggggaccttttagcccagccttttcacgccaggacagctcgcctgccaggcagttctccaccctctctcgccccgccccgctcctaacgggacagtcagcatcccccctgattggacagcactgttccaggggacaagtcaacctgggcctccctctacatcccctcccctgctcatcagggcccaccccgagccacacggcggagccctgaattgggccaaagaggtgccctatggtgaggcctgcaggacattgggcgagagccgggtccagtgtgggcctcggggcgcggtggggtggaaagcggccggggaggggaggcctggggcaggaggccgggggaggcggccctgggggtgggcaggatgctctcccggagtcccacgccgccgcgcggctctcaccagacgccgtcagaggctccctcccacgccgccaccgcgctcctcgggcgagggacgaaccaagcgccacgaagcaggcagagcgcgagcctgcccctcggtttccgcgctcgggcgcgcgggtagacgactcgtcgctcgaccttgtccccactcctcgctcgcccagccacgcccacccggagtgccgaatccgcgatcgcgccctgacgccacccgagagagctcgcgtgattggctgctcccgtccccgtcccccaccttcccggcggtattttgaggcgcaggcagggtgctgaccagcggaccatcttccatggcctctgccgcgctggagctgctgcggggctgtcctgccagcttgtgctcccgccccgaagcgtcctcctccactggcgacacacgcactgaagcccgagtcttcccgctgggtagttgttttggtcttgcacccaaggagggatttcttgcgcctcttgttccctcagttatttcataaaccaggaccgcaactatactgtcgtgtagcgcggccaccccacagcggtccctgacgttaacccttgccgtgactgctagaagacactggtggagtgtgaattgatgaccaaggcatggcagagcctctctcatctttataatcagttcagcggcggcctccactacagggaactcccagccagtcccgaggcctagggacatccagggagaaacgtggcggtggtaaagggcttgcgcagctcctgaagataaataagactttgggttgctgttgtttttgagacaagggtctcactatgttgtccaggcagcactcgagctcctggcctcaagccatcttttctggcttcagccttctgagtagctgggactacaggaccatgccaccgaatcaggctttaagactttttaatgaccctttcaaatttctgagtcactcccagcattttaggaagccaagtgagaaggctagcttgaggccaggagttcgagaccaacctgggcaacagattcctgagtcaccattgacaagaaactttgaatgaagttgatgatacaaaatattaacatctttttttttttacaaccattaaaaatttaccacaggtgaaactaagtctaacagttcattgagatttcttgctgtacagcaaatttcaaatctcatcaaactgcagtttgtgatgcatttcaattaataatgaagctctaatttgtaaaatacttatgaactcttagttctcctgtggctagcttggagccacgaaaaggtcacattagccacaaaagaaaagacattaagggatttttgcaaggaagtgctatcagatttcttttttgtttgtttgtttgtttttgagacagggtcccactctatcgcccaggctggagtacagtggtacgatctcagctcactgaaacctccacctcccaggttcaagcaattctcctgccttagcctcccgagtagctgggattacaggcacacaccaccatgcccggctaatttttgtatttttagtagagacgggggtttcaccatgttggccagactggtctcaaactcccgaccttaggtgatccgcccactttggcctcccaaagtgctaggattacagacatgagccaccacaccaggcccagatttcttttttaaatcacactggctgctctgtggagaatggattggtagcagtgaaactcaactgaagtggatggatatgatgtttattttggaagtaaaattgatgagacttaattataggttagatataaggggatgacagggaaaaagactcaagaatgacctccgggccaggtgtggtggctcacacctgcagtcccagcactttggaaggcagaggtgggaggatcgcttgtgctcaggagttccaggcaacagtgagctcgatcaaaccactgcactccagcctgggtgctggatcgagacctcatctcttaaaaaaaaaaaaaaaaagaaagaaagaaagaaatgacttccaggtttctgccattaggaattgggtggttggttgtgtgctaagatgagaaaggctgggagagtgacctggtttgggaagaaaaaagtaaagttttaatttagggcatgttatgattgagatgcctgtgagccacatgaagctattaaatgtgcagtgagatatatgaatctgaagaca

SEQ ID NO: 588443 - DNA, 4001 bp, Homo sapiens
cccatccagggtgctgcctcctttattcttcctttattctgctctgacctcaccgagatcaccaggcatcacctcctccccttctgtctcacctatcaccaggaggctggctgcattccttctctatccatctaggctcagcctctttctggccagaccttcacacgccttgccctccggccccacctccacctttctggcatacctcccctgctaacttactcctctttcaactaccgttcaccttcagcactcacattccaggatggtaaagattgctgcaggaaaaaaaaaaaatcacaaatatgaccagcagtctcccttgtcacagcagctgggtcttcagtcacagcgcatctgcgtgcctgctcaggggccactcccttagtcccctttcctctgccttagaagaaaacctggcctcctatttcacaaagaaaagtgtcaccatacaagtttagcccatatctagaaacttatctttacacacacccttaccttctttcttcctgtctcagaagctgtgccaccaatcccccacccccccgtagccctgtctcctctaccagcaattggcttccatttgtttcttccctggaacctaaaaatataatttgttacttcctctcaaccctaaaacatggcttttcatttcctaagttaaaaaaacacgttatttcctctttaaaactaggtttctttaaaaagaaaaaacgtctgcctaccctatgacagtccagattctgcttttactaacacataagccaccagacctctgcattccacagccctctctccctttaccctgtttattatcttcactccacttagtacatgaagcgatgctatgtatccgttaagttgctgtttaccttcccctccagaaccaccctattccctgtagcagtgccaggcacacagcaaaggagaaactgaggcacagggactatcctggttgtgttccttcttacagatcttctgcaaataatgctgcactcgtagctaaacacagctctacaacagacgccttttagccaactgactaaacgctggacatgttgactgagcccccagtttttggaaatccctacttccttgctcggaaaccttgctgtctcttatttcctcttctctaggccttgctcggaaaccttgctgtctcttatttcctcttctctcggccaccggccatcggtgtggctggtccccgggtcccaggctctgagctctgctcttcatagaagaggctttttcgccccaatgcacttgaatgacctctttcagccctgggcgctgagcttcaggccatgaggacaaatacctcccggatgactccccggagtccccaggtccgcagccgaactcatcatttccccaaacctgttccccctcctctctacctcggcgggtggcagcgccgtccaccctgtcacgacgacagaaacccgagcatcctggctctcctccctctcgctctcatcctaccaatccatcaccaattcgccgccctgcggtggcctccccagccctgggtccaccctcccggcccgcgcgtcgccggcatcccttgcgccctccgaggaactgaccacggccgccttctggagtgggcgcacccccagggaccgggaccgaccacgaccgcggggccccccaggcgcggcttcctcccgtcaggcccgggcccccggcttgccccgcgccctccctcaccgcggaccccaccgcccccgcgccccgccgaggcctcgccgccgccaccgagtcccccgctggcgcccggtccgggccgccggcctcctcttctcacgccccgcgggcggaaggaccggagcgtgggtacccggggcccgcaccttgatcctctccacgccagcctccaacttgagctgctctaccaagcgctgcagggcgctcgcgctagccccggaggacatggcggcggcgctgggctcctaggggctgctgggcccggccgggcggggaggagccgccagccccgagcgcgggtgccgccccggggcggggaagcagctgcgcccgccccgccgccccagcccacccggcgcggagccgcttgccagagacagcggggaccccagcgagctggcagtgctctccgctcctcagcgcctgaaacctgggtggcacctgcagctgggcctggaaccgaggcggggacccgcagagcgcggcgtcctccagcgaagctggcgcccctaggatgagcaggaatcgcgagggcgtgggacgcgaggatggagtgggcggcagcaaacacgcacccctgagaaatgagaactggagccaaggtgtgacatgagttggagagataaggggccttgccagacagtatcaccggggaaccaaggagagttcataggattttcatgaggcagcaacaggtttctaaatgaccctgttactgtttcacggagatcctaccagttgatttggtggagtatggtaaattggataaaatcccagaccctgacatctttgtgaaacatacagaataaaattaaattcagcgtttctcactctcatctcaccatttaactgtcatcattgtttctattctgctgctttttttttttttttttttttttttgagacagggtcttgctctgtcacccggggtggagtgcagtggcgtgatcacagctccttgtagcctccacctcgtgggctcaggtgatcctcctgcctcagcctcctgagtagctgggactacagacacacaccaccacgcccggctaatttttgtatttttagtagagacggggtttcacgatgttggccaggctggtgttgaactcctgggctcaggtgatcctcccacctcagcctcccaaagtgctggcattataggcctactgcattttttaataagtgttttacaaaactgggatcgttactatatttaaaatttttgtgttgcttttttccatgtatcattaatacgtcattattcttgtacaccattgtatttgtcagaactcacttaaactgaatattgcaaaaggtaatatattggcttgtgtaactgaaaagtccagggactttaaactagtgaattcaattacccaaataataattttggggctctcatcctccttgttttgattctgcttttcctgagattagcctcattttccttggtggtagatggacttctctagtggtatgaaggaaggcaccacactttcactgtccccatctagcaaacccaggaaaaatagtacctcttttctttctaatcgttccagcaaaaatccccataatgaacctcactggctggtattaagtcatgggcccacccctggcccaattactctttgaaggcaaggatgtgtggcattgacgtgctcagattagctgtgcctgggccaaagggagacttgcacatttgaaagccctctctagtggccaatttcctcaccacaaagaaattaatatatatcttagtaaagagatgaaagtacatgttgggaacattcaacaatcaattctgagactgatgaataggacaaaatagaatgatttcatatttaaaagatatggcaaagaactcagtgcaaagatatacatactggattaggaaaggctcatcatagatcgtgagagctggactttggagatacgtgtcttgcagatggctcagaaggaagaacagtccagtatggaggacagctggaggcgatgcacacatgtagagtgaataaatttaaaaatagaggaagctctagtgactaatagcagatacaaagttgctagggccagaagtcatagaaaacctcacatacacacaaaagtttatggtaaacagtgggatagccacagggtaaggcattttgggaatattaatctgagatgaatgtgcaaaatgaactgaagttgagaagataaatggctgatggtgggggagtagctggaatgaggccctgggtaggactgttagagtaggaatgagggggaacaaatttagaagacaaaatcag

SEQ ID NO: 588444 - DNA, 4001 bp, Homo sapiens
tttgaacagaggactctgattcacaaatctctacgttttttttttttaattacatgttggctatgacatataacacacttggtaaaatgtcccagagcagacatcaacatcatatattcatgacttaatgatttcaaatccttcctccaataagcttaactacagtttagtgttctttaagttgaagacaaaaatgcatgtaattcaattcatatgtaattcaatattcaatatgtaattcaatatgtaaaaggtgtaatatcctactgtttcaggatggtttgcaatcaactgtccaataggaaaagctggtaacagaaaaaagaagacacaccagacaactctattatataagtatctgatatccttgaacattttctagagacgctgtgtggttttgagtttgataaaattacctccaatgagtttattttctttctttctttttttttttttttttttttttttttttgagatggagtttcgctcttgttgcctaagctggaatgcaatggcactatctcggctcaccgcaacctccacctcctgggttcaagcgattctcctgcctcagcctcccgagtagctgggattacaggaatgcgccactatgcccggcttattttatatttttagtagagacgaggtttctccgtgttggtcaggctggtctcaaactcttgacctcagatgatccacctgcattggcctcccaaagtgctgggattacaggcataagccactgcgcccggcctcacagtttcttttcttaagaatgtttgacatgatattcaaagtaagattcaaaaaccttttcctcctaatggtgtataaaacactaatattctggttccaaccttaactttccatgttttgtggaggatacctaagctctgctctgagatacacaaatgccatcttaccacttcagatcctccattaaggctgtacaattcttcagaaactttactttcaatgtgtgtaaaccacttactcacctggcttatctactagatttaaaacagcttggaggtcaaagcattctgtcctgcatgaagacaaagataaaatgcattgggtatttcttttcaagtgtatggccaaaatgttgggtggggatagggggaagaagtgaaggaagaggaggggcagaagaaggattaaagggggtaagaaaacctgtcacaactctcaatgggataccctccctaaccctgatctcctatgaaattgttttttgcctaagagcttcacttacaagcgcatagaacagaattgatcaccgcagcgggtgcctaaattcacttctccctgggagccctgagcaaaacaatttgaatgaggttaagttttcctggagccagtatttatttctcagttgattactacactcacatactgtttacccggccagaccctgggcgtctggtcacggatgtgcactgacaaaaagcaaggcaaaattgggtaaagacagatgtctaacccccagggaggcaggcaggtgcctgccacggcagtttggatctcactccctcaggctacctccagccccgcccgtgctttggactgtcaaagaaaggaaggatccaacatctctcccatttgacagcaaggaaactgagccctagagaggaggagcgacttgtccaaggtcgcgcagggaggaatcccggaaccctaggctccagactcccaggccggggcagcccgcctccgcccccactctcaccctttcagcaccccggtgccgccccccgccttggggctcgggcaaccctgaccgggccgctgtggggacagaccgaggccactgggagaataaggggcctgctcgcattcccggagtcctggcccgcgcacctgcctctctctgggaagccagcaaagccccgcctcccgggcctctcgtgagccccggcccgcgtcaccaacccccaccgcccagccggcgagccgagcagcgacccggaaccgcacgtctcccagcgcgccggaagtgactgcgcggtggggggagggggttggtccgacgcgcgcatgcgcccgtgcgcggccttggcggctactgttaccacctctgagcggcgactgggccggaacggctggagttctcgggtgcccagccgggcgctccctcagcccagttcgccacgtcagcgagcggccagagccacagatgatgactgagtctccgaggcctctcggtctttttctattttaacaggggcgcgtgcagagcgtggtaagtgggaggggcttcgtgtcaaaagtaaaagaacccagtcggtgccacaggccccgctgtgctgtgctggctacaaacccggccggggctgcactgcttggccaggcgcccccccgcgccgcccggtcccgccgcaccctaggcagctgccttgccaccgtgtgacccgggaagtctgcgcctccagcttcactcacaagccagtagctccagaaactagtcctgggaccttacaccttgagaccagtttttagactttggcgcctgtcacctactgtagatgatgcgttttatatcgcaaccgagtacataacgtccagcagaaccacgttcttactatgtaatgcacttaaaaacgctggtggcagctcactatattggattagcttcaccatccgctgctgggccgtctcctttctgcttaggaaggaagttgaaaacatcaaaagtgcacggcgcgcgcttctgtggtcccagctactcggaagaccgaggtgggaggatctcttgagaccagggcttccagaccagcctgggcaccgtggcgagactccgtctctttaaataaatagcaatcatgcaggcagtaggaaaataaacaaaagaggaaaaactatcttgttccaagtcacagtccaggccgggcgcggtggctcactcctgtaatccccacactttgagaagccgaggcgggtggttcacccgaggtcaggagttcagaccagcctaacatagcgaaacctcgtctctactaaaaatacaaaattagccgggcatggtggcccatgcctgtaatcccaattacttgggaggctgaggcaggataatcgcttgaacccgggaggtgtaggttgcagtgagtcaagatcgcgccattgcactccagcctgggcaacaagagcgaaactctatctcaaacaaaaagtcacggtccaaatcagtaccctaagtcaggtccctgaactcgtcaatgccaagccagccattccaccttaaggaactctggttccatccccagactcaacacaagcccaagaataagcagattccacccaattcttcaacagtcccttccctcgcgtgttccagttctgacctgcaggagcagggcagggaaaaaaccaaaaccaggattcaaacattgacaaactaacaagaagcatcaaccccaagatagttcaaagcctctgagatatttgaatgaagcaaaccctaacagttcagctgtcaataccgaaaaagtaccaaaaactttaagcaaataatgtttatttttatattgatgatacacttaatatatatgtggattcaaggtacaaaattcatgtacaagagttcacacctgatgaatgtagacacattcctagagaacatttatcaatgtgaaaatttctttaatacactgacaacaaaaatcaaatattctctaatctcgttattcaataaacatcaaaacaacgtttcagttttcatcctctagtactgaagtgccctcaaggtggtaggcactgtatagcaggagaaaacattggaaagcctactgaatccgctctgcagaatcacagtgtttactctgaaattcatttagtgaagtagtggaaggctatcttttatgacaaatcacatctcatacaagagtcaaaagtgatgaactcaagaaaataaaatgtttcaagaacttctcaatttctaaaatctatggagtattaaccataacagacaaagaagaaaaaggctgctggaaaggaagaaa

SEQ ID NO: 588445 - DNA, 4001 bp, Homo sapiens
aataatattcatgagatctacaagcccccacagttacatcctactttacaatttttccaaaatactcttatataccatctgatttaatgccactaacaactccacaagttcttgtcacaatcacttagtgactgagagggattgataccatggcttaaaaaaggcaagaattgaacttaaactcagtcttctgactccaagctctggggttttgccacaaatcagcagctgccaggggccaaaaccagaggcagaggtacttttccacctctcatcccagaaacgggatgagaacacttagggattgggtcctaagatcaaaagctggtttcacgcactaattacggttccgagggggactgcgacatcactacattccactccaccaaggagaattcaaatatgaggtggagaagtcaagcctggagtcccagctacctgggaggctaaggcaggaggattacttaaggccaggagttcaaggtcagactgggcaacacagtgacaccccctctctaaaaataaatatgtatcttaaaatgtgggccggaacattaagtcggcaggaactgtacactgtgtggtttagagtcatacatcctcacacgtttggtaatgttaagaaatgcaccaatgcctctcaaacttttacatcaatgtatccacatggcagaaggcagcctttctgttgaacctgggaatttaacagaaagaggacaacccaagcctcatttcagagaaaagtctggtatactcttagaaatttatgtgactgtcatccctaagtacattaatgttttttctctctcaagagaataaagggagactgatgcttcagaaagatgccccgtatttatcctgtggcactccaagtaccccaggttgagatgatatgaggaagattcaagctgtcaagttcagtttcccaagacctgttccacagaagataagcagatctcattccagagaccactgaagggcactctggtcccagaaccatggagaattcgaatatgaggtggagaagtcagaaaaaaatgttaaagtctctctggagagtagaagcctgggggaaaaccaaaccaatcccgttctcacattgccacccagagatactgccaatgttttcagttcacgggtgaagtgtaggcttttcacactgtcaatgtctatgttaagggtgtaaggcagcctgaaacctctccctcctaggtcccatagtccccaatccccttccagctggaaatttatgctgtgaccagaggaaccagaagcgggatgagaacacttaggggactgggtcctaagatcaaagactggtctcgcgcaactaattacggttccgagggggattgtgacgtcactacattccactcctagggggaacatcagcgcgacgtccaagtcgccgctccgcgatgggggaggggaccgcagggccaggacccaggtccttggagacccgagaccaaagaaccccgggaggtccggtttggggcggcaggaggtgagggtcgagtctggagcggggggccccgggagtcacgggcccaaagtcactggcgagggcaggggctgaattgctggggtcctaggtccttggagacgccagcccaaagagcccagggaggtcggacttcggggggcaggaggtgagggccgagtctggagcggggagccccgggagcaccagcccaaagtcacccgggggcgactggcgagggcgggggctgggcggctgagggggcggggctggctgacaagactttggtggagggagcccggacgcgccgtggggagcccagcccggtgtgcctcaggagtggcagagactctggccatggtcctgccatcggagtggggctggggctgggtcggggggccgcgacccggtgcactttacctttttcttcgctgcggccaatttgctctgtcgggtttcttccgacatcgcggggcggggagggaggcggggttggggccacatcagcgcgatcccggcaaccactgcggaagtcagtcagccaccgcgcagctgtgcgacggagccagaggaggcgtaaccagggcgatactggagcgcagaatgggggcgtggcctcaaagatcaaagcccattggtcaatgagaaatatgaagcggaagggggcgtggctatgcagcggcgtggccagagggacctgtggcgtcacaacaaaagctgcgcacgcaaccgctgtccccgcccacctcgggagaggggcggggccggctttccttgggtgcgcgcgcagctttctgtgcgccagttcacactccgggtcagagttcctggcccggtgcacctgagaggtcgctctccgactcccgcgctggaccctcttgcgccattgaaccccctgatccgggggcctcggaccccagggctcaggaggtgggcgaggaacggactccacagtttctttcctgactcctcacagccctgccccagactctcccttcccagaaatcacctccaaagactcccatccagtgctccagacaacccccgtctcagaacgcccccttcctagagggtctctaccctgatcctgagagcgtgtctgccccctttccagatggatccagtccctggcgctcctacttcccaactgctcctcctcccgcatccccacagtaccccgtcctcacagcgggctgtgggtccaatcagactttcccctcggattcctctctaggactgaaccaagacttacccgaagttgccgcggggccttccgatcccctgtgagtatttcttcccccacaccccctttcccatcctcgaccttcccttgtgcgctcccggccccactccccatcccaacagcagccaatccccgcttggccctcttccatatcttctcccagtcgactgagaaccgccaggtcattcccgaatccctccccttcctttcctcatgcccgccagtcttcaaagaagtgttatcctgtcctgtcctaggctaactcctctccctccccatcctgtctcctggctcctcagatgcctttcactccagtccagcaccagccatctctcctcctcgctcttttcacccctcacccagccctgcctttaaacaaacccatagctccccagtcaggaaaatgcttggcgttcaccctggccactcctttcgttgctaatagtctctcctcttcgctggcaagccacccccaaaacgcagcctactccttctctcatcccccagatggagttgccactacaactaccaccactcttaaggtagatcgtgagggccgggtgcagtggctcacacctgtaatcccagcactttgggaggctgaggcgggcagatcatttgaggtcaggagttcaagaccagcctgcccaacatgatgaaaccctgtctctactaaaaatacaaaaaaatcagccgagcgtggtggtgcaggcctgtaatcccaactactcaggaggctgaggcaggagaattgcttgaacccggaaggtggaggttgcagtaagccgagattgcaccactgcactccagcctggacaacagagctagacaagtctcaaaaacaaaaaagaagttagatcgggaaagacttggtatttgttcattgatttagcaactgctgcaatgcaggtgtatgccagatagccccctgccctccaggagccacaggcaaaaaaataattccaggacaagtatgcacatggttctgagatggggagcccaggcttgggcttgcaaagagggctctccagagatggcagggtcagaggcagggcctgaagggcaactcacagtgagctcagatgacgatgacggggtggcagccatagtttgccaaaagcactgggctgattgagcttctctctgcaagtgggttggtatccactgtctttgaccatgcggtaactcactgcagatcatgcctttctcattcatgctaattcattccttctcttttttttttttttttttttttgagacacagtcgcactctgt

SEQ ID NO: 588446 - DNA, 4001 bp, Homo sapiens
tgccttcaagctccctcccaccaatagtgcccatcaactgacacctgtcttcttctcagcacacctgcctaaagtgatgctccacccttcctactgatccacgcagacgcattttccccaggttctgccctctgtacttccaatgcagaaagccagctcgcactttcacaggataagggtagcagttccctccttcctggggaaggtggccatatatatataaacccgggtagccctgggcctgctatggtcagctgtcctaactgttgtttctgcccagccctcaacaacaacaacaacagcgggtggaatgtaaatgcaaaatcttttcatttcccatcaataactggacctaaaccagccattagaaagcagatggtatccctggcccttaatatccaagtcaccacaatttcctggccccaccctcagcactactttcctctcatttctttcgttttcctgtaaaaccaactttaaaaaaaaatgtgaaaattggataacctctccataggagaacaaaatgtatcttaaaagctaacctcttttctttaaccatcctaacaattcaatttttgttcactgacaccttaagaattgagtgtctggcctaaaaacagtaagtcttagcaagttactagtttctattaagaaagaaagtaatgagcttagcttcatcttttataacacaactggaagaagctaggatgcctttggagacccacaaaaactgacaagagattgtcccatgccctccaaaattcagaaatactaaaactgagatttgagccaacctgatggccatgagctaaacaaagccactcaagcgctgctaaatacttcatcaggttattgtgtatctcactaatccagccctagaaatgttcctcaataatgtgcataatgtagggcctagggaccccaaatcagacaaagaaaacctcaaaatcgtgaaagtcacacaagtttagttttgcaaatctggctatgggacatctgaaattgtccagcatcatcatggtatttcaaatataataattcttaaattttgctaaaaaatttcatcaaaattgttattcttcacattttgtttcttaaaagcaaatcattaaaaatattaaatgggatatgatttttacagcagggcaaagttgtgtggatcctccacgttggcaaaggtggaaacacaggtatgcgagaaaaccccgagcatccacgagaacgggatgcagccgcgctctggacgcgcggcgggaggacccggagcccaagctccggggtcaccagccacgaggcccagcggcaacgtggaccccagggcggccggagcgcgcctggggctggaggggaggaagaggcggcgggagccgagagactcgcggctcggccagcctcccgcgcctggtgcaaatcacgctgcagaactggaactagtgcgacttagggggtgcacgcttttgactttggatgccgacgcgcgtgacaaagctcagaacaaaaagacaggccccgcatcgcctgagactgcagggcagggaatcctcgcgaggcccctcatcgcagggcaagggggccgcgcgcccggtcttggggagcgagccgaggggcccaggcagccgcgggctactcggtgcaggaaggtgcggagccagccccgagcgcagccagcgaaggttgcagccccggcgcaagccgcggggaggctccggggaccgacgcgaggtctcggcgcgcggggtacgggccctgggcaaaggagggaggaagcgatggaccgcggttcgggcagcctggggccgcgcgccgcccactcacctcttttcgaggctccggccgccactcggggatccggggccccgctacgaggccgcccgggtcgctctcccgccgccgccggcctcgagctccggccggctccgcgccgtgcgcccagcgcctccgcgtccagcgccgccgcgtctccggcctccgcagcggcaaggccccgcccccgagcagcgccggcggcgcgaagggaggaggcggcgccgcgagcgcggagaagcgaggcaggggctgccggggccgcgcggactcccggccccacggtgcgcgcgccccggccggtggccgcccctcggcgggagcaggaacgccagcgtgcgcccagttctcgccgctgggcgttgccccttcccccgggccaccccatcgccccttccgacgcgggagctggcgcctgagcagcgacgcggagcggggaagcggctgtggggaaagggtacctggggggagcccccatcccacgttccgccccgagggaatgttcccgaacagccaaccgcacccagcgccacactcacgttaccttctttataaaagtcgtcgggtcaaaactgcccagagaaggaagcgaacgaaaaacaggtttttagggggcttatactcacaaaattgtcttttttctcccacgaggcattccctgttgaccatcatctcgcctcggttgtcaccgctcaggccttagtgtttggtctgtgacccttccactgctagcaacggaaaaagtgaagattcccggacgccttcgggtgtgatcttatagcccgggcagctgcatttgaaacagcgcctcagatgacgctcaggcgcactgatgtttgagaagccctatgaggccgtacctcccggagagaatgccacaaaactagtgacctacagggaaaccatgctagaaaattctaaagcaatggttcttaactctggcagcacctgccatccattagaattatttggggagcttttagagcatttaggaaccagggtcccacttccagagttcaaagtgaacttgatattttttgtttgttttgagcttcccagataatcctaatacagtatacggccaagattgagaacagttttcctagaatcatgtcttcatgtcttcctagctctggtgtctgggaaaggaaactccttcctctgcgcctctctcaaatcacaataaaaaaacaagtaaatacatgaacacctaaaggaatgctcacagctgaaattgattttaaccagaacaaagagtcaccttaaaaaaggtgatcaagataccctattgctacctgagcatggagcttcttaactgcaggaaacgtatctttaccagctaaaacctcttagctgaattagaagctgaccatacatgacccctttagaggaatgttctactatattccaaaatgatatttttgttatctgcaactgttaaactgttgtagggtcagaccaaagcattcagaagctgaggctgtatcagatgtcagccctggttttgcagacttaagttgtgtcactttgatcttctagtgagcttaaataaccataatcggggacaggtacaggaaattccctttcttgcccattttagctctcttagtatagtttacattcttagactggtggactgtaacttctatatcatttggctctaaggagggtctccattagtctctcatttatcagcaactaattagcgactcactcagtgattcttaaacactttatggaacaggtccatatgtctaggtgctaaggcagctggctgaatgagctatattttaattgaagatgaattagtccttttcgttagattctttatgacaaaagttgaaaattttaagatgcagttttatatatatctatatacataatttacattccttataaaaaagctaatcagttgctggccctgaaaattcaattggatgggttttgattaaacaatgtgcaaggggctacagtggttggttgaaggaagcatccatgttttgcctgttaagcatcctttccttaatgtcttagtccattttgtgttgctataacacaattccacagactcagtaatttataaagaaaagaaatgtatttctcatagttctgaaggctaggaagtctaatatcaaggtgctggcatcttgcaagggccttcttgctgcatcagcctgtggtggaaggcagaagggcaa

SEQ ID NO: 588447 - DNA, 4001 bp, Homo sapiens
tggcctaaaaacagtaagtcttagcaagttactagtttctattaagaaagaaagtaatgagcttagcttcatcttttataacacaactggaagaagctaggatgcctttggagacccacaaaaactgacaagagattgtcccatgccctccaaaattcagaaatactaaaactgagatttgagccaacctgatggccatgagctaaacaaagccactcaagcgctgctaaatacttcatcaggttattgtgtatctcactaatccagccctagaaatgttcctcaataatgtgcataatgtagggcctagggaccccaaatcagacaaagaaaacctcaaaatcgtgaaagtcacacaagtttagttttgcaaatctggctatgggacatctgaaattgtccagcatcatcatggtatttcaaatataataattcttaaattttgctaaaaaatttcatcaaaattgttattcttcacattttgtttcttaaaagcaaatcattaaaaatattaaatgggatatgatttttacagcagggcaaagttgtgtggatcctccacgttggcaaaggtggaaacacaggtatgcgagaaaaccccgagcatccacgagaacgggatgcagccgcgctctggacgcgcggcgggaggacccggagcccaagctccggggtcaccagccacgaggcccagcggcaacgtggaccccagggcggccggagcgcgcctggggctggaggggaggaagaggcggcgggagccgagagactcgcggctcggccagcctcccgcgcctggtgcaaatcacgctgcagaactggaactagtgcgacttagggggtgcacgcttttgactttggatgccgacgcgcgtgacaaagctcagaacaaaaagacaggccccgcatcgcctgagactgcagggcagggaatcctcgcgaggcccctcatcgcagggcaagggggccgcgcgcccggtcttggggagcgagccgaggggcccaggcagccgcgggctactcggtgcaggaaggtgcggagccagccccgagcgcagccagcgaaggttgcagccccggcgcaagccgcggggaggctccggggaccgacgcgaggtctcggcgcgcggggtacgggccctgggcaaaggagggaggaagcgatggaccgcggttcgggcagcctggggccgcgcgccgcccactcacctcttttcgaggctccggccgccactcggggatccggggccccgctacgaggccgcccgggtcgctctcccgccgccgccggcctcgagctccggccggctccgcgccgtgcgcccagcgcctccgcgtccagcgccgccgcgtctccggcctccgcagcggcaaggccccgcccccgagcagcgccggcggcgcgaagggaggaggcggcgccgcgagcgcggagaagcgaggcaggggctgccggggccgcgcggactcccggccccacggtgcgcgcgccccggccggtggccgcccctcggcgggagcaggaacgccagcgtgcgcccagttctcgccgctgggcgttgccccttcccccgggccaccccatcgccccttccgacgcgggagctggcgcctgagcagcgacgcggagcggggaagcggctgtggggaaagggtacctggggggagcccccatcccacgttccgccccgagggaatgttcccgaacagccaaccgcacccagcgccacactcacgttaccttctttataaaagtcgtcgggtcaaaactgcccagagaaggaagcgaacgaaaaacaggtttttagggggcttatactcacaaaattgtcttttttctcccacgaggcattccctgttgaccatcatctcgcctcggttgtcaccgctcaggccttagtgtttggtctgtgacccttccactgctagcaacggaaaaagtgaagattcccggacgccttcgggtgtgatcttatagcccgggcagctgcatttgaaacagcgcctcagatgacgctcaggcgcactgatgtttgagaagccctatgaggccgtacctcccggagagaatgccacaaaactagtgacctacagggaaaccatgctagaaaattctaaagcaatggttcttaactctggcagcacctgccatccattagaattatttggggagcttttagagcatttaggaaccagggtcccacttccagagttcaaagtgaacttgatattttttgtttgttttgagcttcccagataatcctaatacagtatacggccaagattgagaacagttttcctagaatcatgtcttcatgtcttcctagctctggtgtctgggaaaggaaactccttcctctgcgcctctctcaaatcacaataaaaaaacaagtaaatacatgaacacctaaaggaatgctcacagctgaaattgattttaaccagaacaaagagtcaccttaaaaaaggtgatcaagataccctattgctacctgagcatggagcttcttaactgcaggaaacgtatctttaccagctaaaacctcttagctgaattagaagctgaccatacatgacccctttagaggaatgttctactatattccaaaatgatatttttgttatctgcaactgttaaactgttgtagggtcagaccaaagcattcagaagctgaggctgtatcagatgtcagccctggttttgcagacttaagttgtgtcactttgatcttctagtgagcttaaataaccataatcggggacaggtacaggaaattccctttcttgcccattttagctctcttagtatagtttacattcttagactggtggactgtaacttctatatcatttggctctaaggagggtctccattagtctctcatttatcagcaactaattagcgactcactcagtgattcttaaacactttatggaacaggtccatatgtctaggtgctaaggcagctggctgaatgagctatattttaattgaagatgaattagtccttttcgttagattctttatgacaaaagttgaaaattttaagatgcagttttatatatatctatatacataatttacattccttataaaaaagctaatcagttgctggccctgaaaattcaattggatgggttttgattaaacaatgtgcaaggggctacagtggttggttgaaggaagcatccatgttttgcctgttaagcatcctttccttaatgtcttagtccattttgtgttgctataacacaattccacagactcagtaatttataaagaaaagaaatgtatttctcatagttctgaaggctaggaagtctaatatcaaggtgctggcatcttgcaagggccttcttgctgcatcagcctgtggtggaaggcagaagggcaagagggtgtatgtgaaattgaacttgcagcctcaaaccctctataattggcattaatttatttataagagtggagcctttatgacctaaacacctccctttgggccccacctcccaacactgttgcactggagattcagttttcaacacgtgctttatggagcacacattcaaaccatagcattctgcttctatgccccccaccacccccagttcatatccttctcacatacaaaatacatttattccatcccaacagccctaaaggctttaatatttatttatttatttatttattttgagacagggtttcactctgtccccccggcagaagtgcagtggtgtgatcatggctcactacagcctcaacctcctgggctcaggtgattctcccacctcagcctcctgagtaactgggactacaggtgtatgccatcatgctcagctaatttttttggtattttttgtagagatgaggttttgacatgtggcccaggctggtctcaaactcctgggctcaagcaatccacctgcctcagccttcgagagtggtgggactacagtcatgagccactgcacctggcagccctaaggtcttcactctagca

SEQ ID NO: 588448 - DNA, 4001 bp, Homo sapiens
tcccaaagtgctaggattataggtgtgagccaccgtgcccagtcaagccaggcttttaatttcattctgtattctttaaattctacattaacaaaatacaatgcttcatagtttgctaaaacaatgtgtttttacaagacaaactttctacagttccacttctttttttttttttttttgagacggagtctcgcgctgttgcccaggctggagtgcagtggcgggatcttggctcactgcaagctccgcctcccgggttcacgccattctcctgcctcagtctcccgagtagctgggactacaagcgcctcccaggttcacgccattctcctgccttagcctcccgagtagctgggactgcaggcgcctgccaccacgcctggctaattttttttttatttttagtagagatagggtttcaccgtgctagccaggatggtctcgatctcctcacctcgtgatctgcctgcctcggcctcccaaagtgctaggattacaggcgtgagccaccgcgccccgcctacagttccacttcttagaagactgtatggtatgaaaataatgtacaagagtttgggtcataacaatttacttttctatgtctctaattttgtttatatgttttgagaaagggtcttgctctgttcctcaggctggaatgcaatgagtaatcacggctcactgcagtctcaacctcctaggctcaagtgatcctccagcctcagcctccccagaagctgcaggcgtttgccaccacacctggttaatttttaattttttgtagagacaggtttggggagggggtccttagcacgttgactaggctggtctcgaactcctgggctcaaacaatcctcctgcataggcctcccagtgttgggattacaggcatgagccacagcacctggacaatttcccagatatagtaaactgctgaaccaccttagggtgcgtttcagccttagaggtcttttctctgctagttacaaagcaagatccagagtatcattctaggtttatcaaaaatctctcttccctagacaatggctggatagaggaagaaaaagcaggccctttgattagagacacaccttaatgctggctttacattctcagtcacgtgttttaagcaagatttgaaattccttctctagagtctcgctccagagagcgccctaaaccgaaatgggaaactgaggctaaggttccaagtaccttcaaaccgccggtacagtacaagggcacagaagagcggagaccgcggacaaggaaagccagcataaaagctggaggggagaaagaagaaaggcgatcgggctgccctgagtgaggaattcagggaagccagcagggatttaagagcagcctcccgagtccgtgggggcaacgccacagttcagccccttcccctccctcagctcgagtcttcccgccccgtgccggtcagcccgaagaccccagcgccgcccagacccgccttccccacagaccccgccacctgtcagtgaaaggccgcagccaggggcaaagaggtggtccagtggctcagaggtccccaatgggccaaagttgccctaaaacccggggagtggcctcggcctccgccccccggcccggccttgccaagctttaccttgagtgccaggtgatggacgcggcccaggccaggctcggccagcaactgcagcaaacccagcattgggagcagccggaggcccgcggccagcctaggaccgcgggaggcgggggagccgacgggcgccagagcggccatgtttgttccagcatcaccagccgcttcctctcccgcccacgtccggggtgaaagggcgcagccgccggaagggcccggggagcggggctcggcggctagctccgctgaccctgtggtcgttttcctggagattgcgacctaggaagtcgtcgaggagcctgtgctgcccacctcggggcccttcgatcggccgctcctgtgcagactttcagttagagatgaagccaacctattggcggttgccataacaacggtggccgaaccagaccagcccgggccgcacctccgcctcgctgagctttggaagcgaccttgggctccggggacccctgatctcagggtcgggggataagctgtgtcagccgcacggtgtcgggccactgattgaactgatttcactgagcgttgactcggaggaaaatatctaaaaattcccggctcgccgtaggggtcctgtggttttctaggcgcttcacactcaaatacaagcgaaatggttgcaataatacgattgattgagcccttatgaggcaatttgttaggccttttgttgtatttaatttttggaacaatttgatgagctaggaggtacgtattatcattattcctactttacaggtaagcaaactgaggctctgagaaataagtcatttgctccaggttgagctgggaatcacacggaagctcttaactcctgtgttctgttgcctcatgctatttcatccaaccccaagtctgggtcttaacatttttctcttaattctgtatggaaactttctttgcttctttcagaaattataggaacttcttttttttgagacggagtctagctcttgtcacccaggctggagtgcaatggcacgatctcagctcactgcaacctccgccttctgggttcaagcgattctcctgcctcagcctctggagtaactagaattacaggcctgcgccaccacgcccggctaatttttgtatttttagtagacacggggtttctcccatgttggccaggctggtctcgaactcctgacctcaagttatcctcccgcctcggcctcccaaagtgctgggattacaggcgtgagtcactgcgcccaacctgctttggagtactttttatcttttaaagttaagtggcatctttgaaaatctctggttttaaatttgaatataatactgtactaaaaacgaaatgaggcctggcagggtggtgattcgcgcctgaatcccagcactttggaacgccgaggcgggcggatcacttgaaagtcagttgttcgggaccagcctgggcaacatggcaaaacctcgtctctactaaaaatacaaaaattagcggggcatcacggccgcgcgcctgtagtcccagctactggggaggctgaggcaggagaagcacttgaacctgggaggcagaggtttcagtaagccaagatcatgccactgcactccagcctgggtgacagagtgagactctgtctcaataaaaaaaaaatcaggtaagaatcttaatcccattttataatacaatagtgatgaaacattaaaatagttttaaataggagacttttgtcttagtttctggacaacagttttataagggcttaaaactgggttcatagcattccttgcttctctatacttgggtattatcatgtgacctacatagggtcataccagtgctgtctgtccaggggtttaagaggatatcttcttctttcacatatttgaaagctgtattgtgccagtcattattttggaattgagaggaataagaatgagggaaaactgactacaaagacattgttgagcattttctctacagttacttcttaaattctagaaaactgctgccttgacaattacatttagccatgtgatttcatagtttcaagaaaagattatttgcataatcatgatgctgtaactggaaacaaacaggctgagtaacagaacaagttatgcctgcttctcctggcaacattttcaaagggacattacactttaaggtattgactgaaaaagcctgcaggggctggaaagactgatctcctaagcttggcttttagccttactctcttagtcaagtacattttatttttctattttctctccttttttttttgagacagagacactgttgcccaggactgagtgcagtggtgtgacatctgttcactgtagtctccacctcccaggttcaagggattctcatgcctcagcctcc

SEQ ID NO: 588449 - DNA, 4001 bp, Homo sapiens
acacgggaaccccgtaactgagccacttcagatatgacatccattaagagggcctttgcttctaactgtgtaagggtcgttggctgtagtctgacttgcacaagaagtacacatagcccctgagaggcgctttagtcctctttggaatacactgttggagagactataaattacacagttgcagaaactgttactaatagcaagccaggtggtcaagaaggatgcgaagcggttgctgtggccagtggagctttccaacaagaagtagatgatatatggcaaccagaggatgtaaaatacactagtgattcgaaacaggaccatggcatagcgcttatcaggacaggcctgcacttccccagtctccccactctggctgctgaagcgggcttgcctttcgctgatatcctttgtgtgctgttggcagatgcggaagatgttgaaataggtgaagcagacaataagggctgctggggcatataacatcatcacgatgaacagggtgaagtaggagtcggtgtgccaggactccgcacaccactgaaacacatctccatgatatccaggtttgccccagtggaaaaaggaaggcaggaagaccagggtcgagtatagccaaatcaggaaaatacacaggcgtagtctccagggtgtaaccagagtattataggttaaaggtttagtaatggcaatgtatctatcaatgctgatacaggccagagaagccatggagacgctcttcagaactgatactacaaaaccaaatatctggcaagtcaaggactcctctactggaagggggtgatggaggagtgataaagaagggaccacgcagctcaccccaacaaaaaggtcagcatatgccatagtctggataaaataacttgtagtgtgatggttcaacaaaggtgcacagtgaaatacaaaaatcacaatgatgttgccagaaataatcaatacagttagaaagacaataatcaatacttccaaaaggcaaaaattgacagtttccaaatagccaaatgccaagaggcaaaaagggtggctgctctgattaccatccaaggtggagttcatcttgagctcaggagtgatctgtcacttcatgctgccgcttggctgctgccaacagttcaaagaagcagctgctgtcattgcggtcagctttgcatgtgtgtaataatgccagaggagccttactccccaagctcctgatgctgctgctctggtgcattgcctgcagtgcaattcccctttaaatccttcctggaataaggagagccagcagcagttgtctggccagtcccagacgcggccatagtgccaggttcaccatacacatagcaccaggggagcaaggtaaactctggggagaacgtcttcaggccaagtgagggtagggggaaagggtagaagagaagggaagaagattaggagcttcagcaggagttgtaatgagtctcctctgaacagctgatagaagaaaaggagagagcattttacatttcacatccaatgccctaatcaaagaacctggctagctcaggctggcatcatccctcccgctccacccctactggcaccactattcacggctaccctcaatagcaccccacacaactgatctgtactgtatagaggagcagcagcaacatcaagctttcaagatcagcataaaacaaaaccaatcacagtcagattaatttacccccatttcctttcatttgagacgggggagaaaaggaatttgcttataatatttaggaaaacctttcactacaattaccactaataaaattagccaagataatttactttcttcattgattccaatataatattttgcctctttgaaaacatttcaacagaatttactgtttagttcaatttcagaatgttacctgtaattctgcatgctgcaatccaaacaaaagccacaatacatccttagcagaaagccttgcaaagcaggaatgtgcttcaacccgcgtactgcagaactaagacacggagggaggagataaaggagtaggaggggaaacagggagaagagggggcttgggaaaaggaagaaagggggaggggaaagaaaaagcctgtacgtgcacacactctggcatctttagcaactaattggaattcatcgtcagagaggtgccccgatttccagactgcacagtgtgggaatggcttgctatgcctgcagtgcaccatttgaaggctgtttcctcgtctgtctggaatcccccttttagtagataagcagaattcagggtgctagcaaggagaaggggtagtaacagaacagggtgtcaggaattagactgaaacacactaccagaggggtaatttctattttctcacggcattttcccaaagaacaaagagcaatattaaagaaaggaagtatgttaacttcctttaagtgtatggcgtatggcaactgagaatcataattcagctgcacaagaagttctagctagaaggctattcaccattaattttgtctctcatgattcactgaatattggccaagaaactttaagatcactttttcaagagaaaaataaagtatctcccattctgaatactacacaaatagcacagataaattacactgttcccatatttgacactacgctataattttgagatgcatttcttgcttctaatttgctgagcagtaaacaagaatacaaacagaagatagaaaagtaaatgtaccttcttctactcaggcatggatattacaggaagtttcatggtacaaataagcctttgtatcttagaatatacaatcttgcttctgcctatttaaaacaatgcaaactgtatcatattatattgtggttttcctggtaatgtcataaatgatgacaattttcagctaacagagttgggtgctatgaaaatgtgtaattttagtatctttatttagaaggattaattgaaagtatccagcagaataaaagacaataaacaaatgccggcatttgaaagcattccaagaggtaggcaactgagtaaaaacatgtgatccaactttcatttttattcattttatacacatgctttctaattacagacaaatggccacccataatcagaatgcgatgaattacattttaaatctgaagcagcagcagttgtctggccagtcccagacgcggccatagccccaaaataaaaaacctatttaaccgtaatcctgatagtaatatttgacaggtcttattgggaaacagagcgaagtgtgtggcacagtaaaaagaccaatagcatcgaaggaacaataatcaggttcaaattcttgctctaatattacttatcctctcttaagcctctgtttcatcatctgtaaaatgagaacaacactccttacttcacagggttgttgagaaataaagtatataaaaaaggcttaccaacacctagcacagagggggtatataactttactcactttctgctcctacaactaaagtagccttccttaagagccagtgttttcctgcccatcatgttgaaatgcttaaggctgggctcctctgaatcctgaagggcctgctcttactgaggctatacagttctaggtcatacaacagctatctgaatacagtgctgtcacacattactcaaatacattgaggctatgcatatacaaagcactgaaggtagctgaaaagaaggaatgatgacatggcgtcaattattccctcaacataaataatttctctgcctaggtctccagccctgacttcactcctaagctcccttttccatctacaatttgcctgctagtcacacattttccaccagtagatggaagatgtcctgtagatgtcctgtagagatttcaaccacagcatgtctaaaatcaaaaacctttttcccaccaaataagcctctgtatttttccaacattttcccaggcactccggtatgaaacttaggaatcaatcaccttgaccactctctccctcaaagcacttagttctgag

SEQ ID NO: 588450 - DNA, 4001 bp, Homo sapiens
ggagacttttccgtgtcttgctctccagccccagcatgacagcaaagggccctcccgtctggcccgcagcttccactggcccagaacacgtctaggcatccatgctctgaagccagctccgaccaggaaccgcctgcccaaaccgggctgtggctacacggtggggtgcagactcccggggggacctcgtcacaggccctgctggagggcttggcgcgcttcccccaagtctgggcctgactccaccctggagctcaactggactccctgcttagggggatgcaaggctgggtctggggtctctctgagtggtccccctgagcactgcccctgccaggggctggctcctgcctggcgtgtccccaggggaccccaggcttctagctgtagcctggagaatgcccaactctatggtcagctgtgcaggcctcacccaaggctaaggtcttggacacccgtctctcacagctccacacacacactctctcacagctccacacactcacactcaaactcactccagccagggctgctatccatccccctcacagcacggccgccctggagcacatgcggccctgcacagccgatcagatcagcggaggaaacccttgaaaatcctttagggcaggcccctggcagcagctgccagcaaaatcaccctcacgcccctcccctgcgtggggcccaggagccaggctaggggctcagcgctccatccaggacggcacaatggggctgtgtctgggaccaaagcagagagcagaccggaggcagcaaggcctctgtccgccgtgccgccaccagtacctcatttcgggtgccccaggcagaggcttgctgcttggctggggccagagaatccttgggggccaggctaggcgccccccgggatcagctgctgggacccctatcagggaggtcaccaggttttagggatgtccagaggacaatagtgtccctcgctctggggagccaggcctgcctctgacggctgccacccattcgcaagcccctgcctggacctcacgctcgtgtggctctgcctgaggcctggtaccacccagccttgcttggggctccaggcacctgcccggctgggcccagggcagcccctggggggacattgggagtcaccaggcaggcatgccacctggggcagggccaccctgtcatccccaaaggcgtggggcacagagcccagtcactgggatcacccaggaatgtgcccggagagtagatgccttttcaggcaggtacacacccacctggctggctcccttccaacccagctggatcccactgggctcgtggagggctggtgaggggcagagccccatccagagcagccaggtctctttggccatgatgcccctgagtgccccgggcatggcagggccaggcttgggagggaagcaccccacggtgcccctgccaggtgccaggggagtgaggctggagaagctgcccaccccgcctccagccccccggccccccacccccttccccttggcttgggggaaagagggcttcaggggacgcccacgcgggcacacgccgggctgggctcggcctggagggaggggcgcgtcctcagccacgctgcgcgcccgcgagagctgcctttgttcccaactgcagcctcccccgcgtcccgacccggcccggtccggtcccagccccggccccggccccggccccggcccgtcctacctggagtagaggcgcctggcggccgggcccgggagctcgtcggccgcgggcggggccgggcccgccatgggtcggggacgcgggagcgggagccgggagcgccccccgcgccgtggccgtccgccccctgcccgccctgctgtcctccctgctgtccgccctgctgtccgcctgtccgtccgcgcctcgttcgcccgtcctcccccggggaggcgccgaggaagtgatgtgcgcggggcgccgccgcccctcccgccgccgtggccgtgatgtcaccgccgcccgcgcggggagggggcgcggaccgggcggccaccgccgcgtgcctccctctgcggggggcggggcggacgcggggggaggggcgccgtgaggcgggcagtccccggggaggggggaggggggagggggtgtgggccccagcccaccccaccccagggaatgcaggggagagggcctgggcctggccttgctgctggtcccctggggacttctgagggcccgcgggggtccctgggtcacagtgcagccacactggcctctgggctcctttcatccacaggccgcctggtgagccccgcagcctcacccacgtggggaggggctgctgaggcctccttgcctttcttggtgggcgccctacgcctcgggggtcctaccctcctcttctgtgcagccccaacgtggctttgcccccttctccaaacttctgccttgggccatggggcgcaggccgtggggatgctgtctgcctgctttagagaaacctggggcaccgatgacaaatacaggctctgcttggcctgtgggacggttggtaagccccccacctctgagaccctgggtggccacattcccctcccaagctcccccggaatggggatgcagcctgccccttccttcctcctgggcactgtgcaggcttagggaggatgcaggtggcacagtaggctgtgcccacccggggtcccgggaccccagcccctaccgcctcctcctcctcctctgaattcttggagccctgtgggcctatgtggtgtgacgtggcttcccctccacccaccctcagctcccgatggcttggggggttctccgcagccagcgaggcccacagccggcctccccgggttctgtcctgcccccgacagcatcctgggccttccggtggtgtcaggagactccaggcccttgaaaggcagctgcgaccccgggtatgactcggagaagtccaggagcaggaaatgggctgcattccttcggggcccctccgtgcaccccagcccctccctgggagagctgccctgaggtcaggaaagtgccgtcctggcaagaccctcagcagctgccgcccacaggacagtcagcgttttcaagcatgggaaggaaaataaacacgaggttaaaaaggggtctgttggccccgggctggtttgtttttcctgtgtaagggaggcaacgggaatgagaaccatctgtgccctgagcgcagcgcaagctgcctgctgggcccacgtgccctcccccaaagaccacagaagccaggcagagccttgctcccttccagccggggccgtggctgctggccggcagggacagtggtgttggctggggcaccaccctcctttgccacagccctgggcctggctgcgggcagagaacaggccttcgattgaagctccaaccttccgggccacctcctttgggcttcgggcacctgagccagcatcccattgtaagggcaggggctgctgggggccctgcctgtgccaggcctcagctcagccctctttccccaggcgctgctgccatcaggaggcccacagagggtccacaccaacactgtgagccccttgtgggtcccctgggttagtggtgggaggctggtgaagagaagtggggacaaaagacattgcacaaatggtggagggagggagagatttgcagcctcgtagctgtcattgctgggggagcttctcctggtctccttccttgatgcagagagctgggagcttgtgtccctgggccgggagagccccaacattatatcagaacttgtggggaaacctgcacccccgagggctctggctttgttaggccgagctgggctatgaggctgtgtgacctggcacaagttgctttccctctctgagcctcggttctgtcacctgagggctgcccgtcccgcaaggtgtggagggtcactgaggcgtggggtttctgcggtgcttgtccatgtgcctggcacacagtggggtttgtgcagtgcttgtccatgtgcctagtggctc

SEQ ID NO: 588451 - DNA, 4001 bp, Homo sapiens
acccggctacccctcccccaggacgtgtcactcaccctcggcacccgccgactgccccggacttctcccctctcatgggtgctaccccagtccaggcctctgtccgtcacctgccctgggccagcctccccagccttggcctggaacacttcccagacatcccgggaagcctcccgtgcctcctgtccctgtgcccaccacaccctgtgtcagccctgccatgagctccctgtgtccatgccctacacagccctcaccggtgtctgctgtgtgaatgaactcgaaggaatgaaccccgccctgggcctcagtccacacacccaaacaagggaggctggagggcgtggtctcctgtggccccccaaggggcccagctgaagcaggtccaccccgtgacccagcctcacagggcctggtccgggccccagggctgaagggtgtttgtgatggttccaagccccgtccacctcccgaccggcgctggcagcccctgcccggccccagcctgtccatctcacggctggtggcctcttccaggtctgcaaatgctgggctcacagctgaacgagttaacaagagacgcaatgttggtggagatggcacctcccgggtccccgatgctgcctggaattcccaatacctgacccccacagcccaggagacggacagctgtctgacagacaactggaattcccgacacctgacccccacagcccaggactagggctcccgtcctgcttccagttttctgctggactcggcccagggcacaggagagtggggcctagagacatgtgtgacctacccaaggtcatgctggagcaaaaaagagctgggattcagacccttgagctgagccgagggccctgtggacagccctgttttaggagagaccccacctggctctggcccctggagtcagtccccagctgtcacggaagcctgaggtacctcctgtccctgaggcagacctgaggagggagagttctagcacccccttctccccgcagggctctcctcctgcagcctggctcaggcctaaggcaacacccccactcccccggattccccagccaggagggaggggagaattggcccagtctgtggggagggccacatccacttgggccagggctctgggagctgcaggtccaggcagagggtggcactggggttgccagcctgagtgccagttggggccacacaggtacctccccaggaggatgtggcctcctggtctaaaaggaactggctcctgggctatgatgacctagggcacagccgcggggggcctctgcctctggcccaatctggactcccccaggtgacccggggcccaggtggactgagcaaggtccctcctgggaaaggcaggacccgtcaggggccatgtcccaggccccatggcagagcccctctcagggtcctatgtcgggcagccctccccttccctgaggctggggccagctgttgaggggctgatgcctccctcacatgggggcaggggcccacgactgcaggtgcaaaaccgtggctcagtgcctggtacggggaaaggctctggatagtttggggctcctggagcccctcagaagcaggaccctgggccccaaggccaccttcccctgcatttatgtcccagtagaacatatccagtgggactcggggttccgcctccctgctctaacctctcccttgccccaagccctggctccctccttcccggaggcctcagagtccctcctgcagtctgactctagtctctcttgctttggcacaagcccagtttctcctgcggaggaggggaatgcacccggcccaagaccaccccacccggcttcacagaggcccgtgtgctccctcagcctccacctgttaggaccccagggaccccagactcacgcggatcacaggctgtctccacagcagcagggagccacgctgggtgcttggccacacagagcgcaggcaggacacaaggtgcccagggccaccaccgccctgcccaaagtgccaagtgctgcctcaatgctgggatgcctgaggcttaaataggaccctgggcaagggctcggccctcctagcgcccgcccctgctcacttgagtgcgtgcacacacacaggctcacacacacgcacgtgggctcgcactcacacacaggcgcactccgtaaacactcccccagcaagtgcagcagtgaacctccccctccccgtgcctgtgggcgggcacactggagggctgtgtgggcagacagcctgccgaagagcccttttcccgctgacacctgggcccctgggcctccctccagagctgggccaggtggggaaagccacctctttattcagcctgactacggaggcaggcgcagaggacctgggcgggttgctgtcctcatctggactcctctgtccgggacggcccttcctgtcccacagccctcggtggctccccagtgccctggctcaagggcctcccggccagctcaactcaagcctctggttgctgcctctctgtctcattcctggttggacctacactgtctccagcctctgaggccaaccctgccctgtcccctaccctccaccccagaatgagttctctggacccccagaccacacccagccacaccgcctcagatcccaaagccccgaatgtgctggctgcaaggcccctgcactgtctgggcacagggtggggaggggcaggggctggttggtcaccaacagcaacggcgcagcatcggtgtcaccaacagcaacggcgcagcatcggtgtcaccaacagcaacggcgcagcatcggtgtcaccaacagcaacggcgcagcatcggtgtcaccaacagcaacggcgcagcatcggtgtcaccaacagcaacggcgcagcattggtgtcaccaacagcaacggcgcagcattggtgtcaccaacagcaacggcgcagcattggtgtcaccaacagcaacggcgcagtattggtgtcaccaacagcaacggcgcagtattggtatcagctgcactttgcagatgaggaccccaactgagagctgaaagcccttccctgaggaccccagcagagggggaagggggcccacccggccactgacgccccagggatgtatcccccacccaccctcgctgcagtccccatacaggctgccaccagggtgcagacggtccttactcggaggtacccaaggttctgacctcggtaaggccagtggggttcaggtcagcagaaagccaagaggccctgccacgtcctcacagaccctgggaaccccgtttgtctggggccaggatcttggctgtcccaggcgtcctgccccgcggtggttgcaggggccaggggagcagggcccgcagcaggtgggggctccctggggccctggccaaggcctccagagtgctgggccaggcagctggacacttggaactgtgtccccttgccctgctggcccagacccagggcagtttgttggggtgacgtgaagcctggaagccctcagaggctgtgctttctagaaagccatcagcccctgaggccggctgactggtctgtcccacacatgctgccagcctcccactccttccttggcggcccagatgtgatgggcagagccagctgtggacagggcagacccagctgtggacagggcagggccagctgtggacagggcaggtgtctgggtcccagtcctgctcctccctccaggcccagggaggctgggggatcaccgggacccccgggaaggcctgaccaggtgctccctgggtgcccttccctccacacctctcccatcagtggacggatggacctagcccagatggttgggcagtgctggggctgaatgaggggaaggtaggctgtgccctgctggtgggaaggatgggcttgggcagcctcggggggctgcgaatcccagcccagcacccacacccctctgcaggttggtgcccacggaagaacaatttcagactatttctagtggtttggaccc

SEQ ID NO: 588452 - DNA, 4001 bp, Homo sapiens
ctgggagtgtcctggggttgccagggggggtctctggtgtctccagcagcccggggttcccaggagtagggcttcaggctcagacacccctggtcatgtggtgacactggctgagtcccccaggagtccctcaaacatgaccggagatggcagaaccagcgcccacctcacccctcaggacacaagttgcctccacacacgtggatggcaaaggggccgcgagccacgcccgcccagggccgcagcccacctggtacttgatgagcatgttgaagaagtcgtcccccggctcctggggctcgccgtggcctcggaggtgccctgcattgctgtgggtgattcgcagccccggcaggctgcccacgctggcccgctggtcgtccagccggcggctctgggagctggcgatgaggtcgaagaattcctcggtctggggcgaggccgtcatcgagggctgggctgcggggggccagagggtgagacctgggacccagtgcggggtcaagcccgaggctcgggctgcggccacagtgagctctgacctctgagcccagcccagcccactgtgctgctggggccatggctcctgggggagtctccgctgaccggcctaggcagctctcagctgctccccctgctgtggctcccacgcccacctcaggggcttccagggggtgacaggaggagacaggaggagaacgccagtcccccacgccctgccccctccctgagactgcccctgcagcctgagtgtgtcccggagggcgggctgatgacacgcttcccgggatgctgctctgtgggggctgcggagggcgccctcagtgacagggtgctctgcagctggcctgctggtctgcccccgaaaactcctcactggaagcaggacgggagccctggtcctggcccctgcagacaagcccaagggagggcccggctgaggggggcactcaccgatcctgtcctccagggtgggggcggccgtggcctcggcagccccggcctggccatcgtccaggggacaacgctggtcgtccatgcggctgctctggaacttggtcaacaggtcaaagaagcactcctcgtccgaagacggggccctcgggatgctctggggagggagtggggtcaccgcagccaaagctagccccgcagacccccagacgagaccgggggctgcttgcccaggccacacacacttctgagaccctggccaagatcgggactctaacctgccccctgtcggctacccctcccccagaacgtgtcacccaccctcggcacccggctacccctcccccaggacgtgtcacccaccctcggcacccggctacccctcccccaggacgtgtcacccaccctcggcacccggctacccctcccccaggacgtgtcacccaccctcggcacccggctacccctcccccaggacgtgtcacccaccctcggcacccggctacccctcccccaggacgtgtcacccaccctcggcacccggctacccctcccccaggacgtgtcacccaccctcggcacccggctacccctcccccaggacgtgtcacccaccctcggcacccggctacccctcccccaggacgtgtcacccaccctcggcacccggctacccctcccccaggacgtgtcacccaccctcagcacccggctacccctaccccaggacgtgtcaccaccctcggcacccggctacccctctcccaggatgtgtcatccaccctcggcacccggctacccctcccccaggacgtgtcactcaccctcggcacccgccgactgccccggacttctcccctctcatgggtgctaccccagtccaggcctctgtccgtcacctgccctgggccagcctccccagccttggcctggaacacttcccagacatcccgggaagcctcccgtgcctcctgtccctgtgcccaccacaccctgtgtcagccctgccatgagctccctgtgtccatgccctacacagccctcaccggtgtctgctgtgtgaatgaactcgaaggaatgaaccccgccctgggcctcagtccacacacccaaacaagggaggctggagggcgtggtctcctgtggccccccaaggggcccagctgaagcaggtccaccccgtgacccagcctcacagggcctggtccgggccccagggctgaagggtgtttgtgatggttccaagccccgtccacctcccgaccggcgctggcagcccctgcccggccccagcctgtccatctcacggctggtggcctcttccaggtctgcaaatgctgggctcacagctgaacgagttaacaagagacgcaatgttggtggagatggcacctcccgggtccccgatgctgcctggaattcccaatacctgacccccacagcccaggagacggacagctgtctgacagacaactggaattcccgacacctgacccccacagcccaggactagggctcccgtcctgcttccagttttctgctggactcggcccagggcacaggagagtggggcctagagacatgtgtgacctacccaaggtcatgctggagcaaaaaagagctgggattcagacccttgagctgagccgagggccctgtggacagccctgttttaggagagaccccacctggctctggcccctggagtcagtccccagctgtcacggaagcctgaggtacctcctgtccctgaggcagacctgaggagggagagttctagcacccccttctccccgcagggctctcctcctgcagcctggctcaggcctaaggcaacacccccactcccccggattccccagccaggagggaggggagaattggcccagtctgtggggagggccacatccacttgggccagggctctgggagctgcaggtccaggcagagggtggcactggggttgccagcctgagtgccagttggggccacacaggtacctccccaggaggatgtggcctcctggtctaaaaggaactggctcctgggctatgatgacctagggcacagccgcggggggcctctgcctctggcccaatctggactcccccaggtgacccggggcccaggtggactgagcaaggtccctcctgggaaaggcaggacccgtcaggggccatgtcccaggccccatggcagagcccctctcagggtcctatgtcgggcagccctccccttccctgaggctggggccagctgttgaggggctgatgcctccctcacatgggggcaggggcccacgactgcaggtgcaaaaccgtggctcagtgcctggtacggggaaaggctctggatagtttggggctcctggagcccctcagaagcaggaccctgggccccaaggccaccttcccctgcatttatgtcccagtagaacatatccagtgggactcggggttccgcctccctgctctaacctctcccttgccccaagccctggctccctccttcccggaggcctcagagtccctcctgcagtctgactctagtctctcttgctttggcacaagcccagtttctcctgcggaggaggggaatgcacccggcccaagaccaccccacccggcttcacagaggcccgtgtgctccctcagcctccacctgttaggaccccagggaccccagactcacgcggatcacaggctgtctccacagcagcagggagccacgctgggtgcttggccacacagagcgcaggcaggacacaaggtgcccagggccaccaccgccctgcccaaagtgccaagtgctgcctcaatgctgggatgcctgaggcttaaataggaccctgggcaagggctcggccctcctagcgcccgcccctgctcacttgagtgcgtgcacacacacaggctcacacacacgcacgtgggctcgcactcacacacaggcgcactccgtaaacactcccccagcaagtgcagcagtgaacctccccctccccgtgcctgtgggcgggcacactggagggctgtgtgggcagacag

SEQ ID NO: 588453 - DNA, 4001 bp, Homo sapiens
caggggtggtctcagaactgtcccgagacagcaggtgacaggtgaagggctgaggggccccccagcagagcctaagctgcaagggggaaggcatggggacagctctcaggtcagcacagagaagagctttcccacattcacaggggctgggcggccaagcaggcggccaactgcagggaaggcccgtggggggcagggtgtgcctcaggtggggggcctggattcaatggcctgttgcatctcttcctgtccgtggagtccatgaaatagaaaactctcatagttggactgggccaggaaagataaggtcaaggccacccaacgcttccacggcagctcacagcaaccagatatttgtcccagtgatgcacggtgcctcctggcccttgccatggaattcagtacagtcagcacgtgtggagcctctatgtggcaggacacaggatagctacttgcacctcctgactgagcccagggcactgaccacctttcatccacctccccatgagcagggtacagcgtgagctactgttaccatgggcgcggttgctgccttccaccttctcctgctcagtacaaagtgggtccttggcaaaggttttgttgcagtgaacaaaatttgaaaatctcatatgcccctagaactggctgctgaggctggattgcatcctcttcctatctaacattggaaacacaaacctgatcaaatgcagtgatcagacagcagtcagacacttctgagtacaagccccagctcctccacctgggagctgcatggctttgggaagaaacttaaccctaagtccagcctccagtttttaatctgtgcaatgggaattataatactgacttcacagtgctaccaggattaaaagtttatgtatatgaagcacctggcaaggttggcccacaaaaagggttccatttagcaagggtgggccaggtgcagtggttcatgcctgtaatcccagcactttgggaggctgaggtgggaggatcccttcgtacaggagttcaggaccagcctgggcaacacagtgagaccctcgtctttgaaaaaaataaaaaattagccaggcatggtagtgcatgcctgtagtagtcccagctacttgggaggctgaggtggaagtatctcttgagtccaggaggttgaggctgcagtgaggtataatggtgccactgcactccagcctggatgagagtgagaccctgtcttaaaaattaaagggtcctcaggccagtcatggtgactaacacctgtaatcccaacactttgggaggctgaggcaagaggattgcttgagcccaggaatttgagaccagcctgagcaacagagtgagacccccatctctacaaaaaaaaaatcagaaaattagccggtagtgattgtttgcgcctgtagtcccagctactcgggaggctcaggtgggagaactgattgggcccaagaagtcgaggctgcagtaagccacgatcgatcgagccactgcactccagcctgtgcagcagagtgagactgtctcaaaaaaaaaaaaaaaaagataagtaaatataaagaagaagagtcatcaaagccccctgccaaacgtccaagggcctggtcagtgaccgccatgtccctgaccccacatgtcctgtgggagcgtggagaattagcctggaccttgcctcaggggcaatctcccctctccaaagccggaactgcaggtcccagcgtcgtcttaagaggagaactgggccccagagaactttctccgagactccccaaaactccaagcctgccccagccggccacaaggcccaaacgccccgcccggctctccggtccctgggaccgccctgctccctcctccacggcgcgcgaggctcttactctgccgcccgggcgagcgcgaccctaccctcggcgggtatcctgcgggtgacgaacaccttcatgagtcgcaccggtctcatccgcagtgcagccgccgacccggacctggcagtacagaagctggcccgggaatgtagctgggccggggcggggccaggctggagtgggcgggagagacgtcgcgcgcggcgtgcgcagggggtgtggcttcgcgagagggagcgccgggttgcggctgagcggtgactgtgcgtgctcggggagtgacagtaacagtgaccctacacagtgtccttgtgtgtgtgtgggggggtgcgcctcgtgccactggggaatcagggccccgggggagagggggcagtatcccgtccaaggcctcatgggagccctgctttttctacacgctcagggtcctgtttccacaggctcaggccttaagagactgaaagcccccactttttctgtctcttgggttggcccagggtagaaacccaggttccaggctgtgaggaagtccaggacacacagagaggtcacgtgtaggtgttcaggccaacagcacagccaggggcccggctcacagccaccgtcaatgaccagaggtatgagtgaggaagccttcgggtgactccaggccaactcccacctgactacagctaaaactgcaagaaagagcctttaggagaatcactggctgagcccagtcaaccccggaaccataagagatgataatgcactgactgctgttgctctaagccgttcaattttggagtaattctttatgcagcaataaataagtgatacgctatgtgtgcgaaagccagaagccataagagtacaactaattctccattgaaaaattaaccgtaccatcctgaatgcatctgatcttggaaactaagcctggttagggcttgtatgggagactgcctggaaataccaggtgcctggaaataccaggcttatgtttatcttaaaaaaaaaaaattaacaaaatcataagacaacaaaccgggaaaaataccatatatttgcaactcattttatagacaaggggttgatttacttattgcacaaatagttcctaagacaaagatgcccagcttatctgaataagcaaaggatatcaatggacagtttatagaaaagaaaatggcctttaaatgtatggctgggcgcggtggctcatgcctgtaatcccagcactttcggaggccgaggcaggcggatcacttgaggtcagaagtttgagaccagcctggccaacatggtgaaactctgtctgtactgaatatacaaacattaggtgggcatggtggcacatgcctgtaattccagctactcaggaggctgaggcaggagaattgctcatgagtccaggagatggaggttgcagtgagccgagatcccatcactacactccagcctgggtgacagagtgagactccatctaaaacaaaaaaaaacaaaacaaacaaaaaaaaaaaacaaaagatgaaaagtgctcaacttgactcacaaaagaactgcatattaaaattacagcaagataccaatgtaaaaaataatacattggggaaccaggtgctttcatacgttgctggtaggagtgtaaatcagcaacttcaataagaaagtttggcagtagctatcaaagtttagactgcacatcttttttgacccagaaattttgcttttaggaatttaccttacagacgcgttcacacatgtgcaaaatgccatctgccaaaggctcttcattgtggcattgttggaatagtaaaatatgggaaacaacctaaaggtccactcataggggactgttcattacgtatgcttcattcccacagtgaaatactctgcatcaatcaaaagagtgaggcagctctgtgcgtaccagtgtggaatgatctccaagatgtactgtccagtgagaaaacagggtgatgcaaagtgcatatgttaccatttataggagaaagtatatgcctattcttttttttttttttttttttttttttttgagacaggatctcagtctgttatctaggctggagggcaatggtgcaatcttggctcactgcaacctctacctcctgtgctccaatgatcctcccgcct

SEQ ID NO: 588454 - DNA, 4001 bp, Homo sapiens
cgggggtgtgttccgtgagtggtagctgcaggcattgcctttgctgcagaggccatgcccacagacagacagcaacatgggcgtgagttgaagcaattccccaggaatggcccctcctggatttcctgagtccaccttccgtgtccctccccagtcccagatggaatatgtgactgcagccactggctacagatgcatccccccagtcccatcccatggtgtcctgggctggggcacgggggtggcttgtgaagtggggagggaggatttctgagaaaactctggtgtgggccctgcagctgcagctgtttgaagtggttctccctcccccagctcttgcttccagcctgcacccagaggtgcttggcaaagacccgtaggtccgtgtgtgaccatgcaggtgttcacgcgtgtgctagggtatggttatgtgcatcacatgccctggcatgtctgttcgtgtacatgcgtgtgaatgactggaaccatgtgtgtaaatgtgcatgtttgcacgtgcctctgggaatgcatgccaagccgtgtgtggcacatgagcaggtgtcaatggatctgcatgtgtgcagatgagcatatgaaattgattgtgtgatgctgaggtgcatgagtgtgtgctaatgtaacatttggtgtgagtgtgagcatgtgtgtccacagatgtggtgtgtccatcaggtaggcacgtgtgagcggtgctaggctggatgtctgtcttgcctcttacataaagggctgcattgcagatccttgcagcctcattggaattcagcaggcgctcggcccaggggcggacagctccgacaggcaaaatcccaggagccacgtcctcccccgcagcgctggctgccgacagctcccatgccctgatgcctctcgcgtgtgcacccccactcccacccccacaaagcgtcctgccgtggcacctgagccatttctcttcccaggcggacccatcggtagggggaagggacgaaagaaagggcaggagaacctggaagcagaaacaaagatggccccaggccccgtcctgtttaaagctctgcagggcgggcatgtagctggacaggcgcttctactctcttacccggaatgcccacccccacactgacacactccagccccacgtctacacacaccagtcagggcctggagccccaggggccctctgaggaccagccaaggtggcaggtgactggtctcaggccaagataggggagccagcagaccctggtgtttggttcctagtgagacgaggcctcccggaagcagccagctgactctggggtggtgtcttacagggaggaagggggcacggaaaggatggaatgaaactgggggtgtggggttgcaggatggaggagaggggaggtgggtggcggaggtgggggagggcacctggctggagatgaggtcctcgcacaccgacagagccatctggatggcgttgggcttgtgcgtgacggaggtggcattgagctgaatcttccaggagccgtgccgcttgttggcctggttcacggcctcgcggaacatctgctcgtgcttccgcgtgctcagcaccgcgccaatgttgacgatcttggggtcgcacgcggcacgggcgacggagcaggagaacagcagggcgagcgtcagcaggcgcatggtgctcatgggctcgggccgcgggcctggctctgcgcggcgcgaacgcggggccctcggcgcatcccccgcggggcttccgggccgtcctgcgctcgcccggccccgcgggctgcggacgccacgtctcccccggagcggcggtcccgggacgtcggccgagggaaggggcgctgaagcgtgcgcgggggctcggggctcagccccacgcggccggcgctgtccgcggtgctgaagcggggccgggcacagctccgagcgcccggcttggaaagggcccggcggcggcggcggcggctccgcggacggcgctggttccggtccggacgctgcggcgactgcagcagctgcagaaacgcgagcggggccaacgtctcctgcccctcccgccgcccccgcttcccaacacggaggcgaagggggcgcctcccgcgccagagcgtgcgcctgcgttcgcgtgagcgtgtgtgtcggagcgcgcgtgagccggggagcgcgcgtgtgcgtgtgagcgcgtgcctggaggggtcctgggacaggggcctgtgctgtcggggacctgcagggagctcagtttggaaacgttagaggggtccgtgtcaccgcgtgcagcccgcacccttgcgtgccttttaataggaccgaacgcgtcgtgcccgcttgtatgtgtgtgtgcgcgcaagagtcgtcacccacagtcagcgatatttcggctcctgactcttgcagactggagctccagaggggtgggggaggccctaagccatggctctggggggcgctcccttcaaggttcccctccccacaaggttcagaaatgagggagaggccccatctgcgtggccatgtaacttgggacccccctcctcgggctaagaggaatagggagggtgaccgtggctgccgcatgtgctcagccaggccttccgcgagagcctggaaactggacccgcactgactggggctgaggtcggacaccaggaatcactggagcgccgcgaggtgtgttcggggccagccgtttcacaccctcagcttccgctcctctctccctctccagccccctcgcaatgcgctcccagcgcccccttttccagagccttacccatccctctggtccacaccaccctgtctttgtccccctccacccctggagtgtgcgtgcccctccctaacttgaaggatggctgaagctccgcccctgccagtgatgtcaccatttccaatagcaactgaggattctgcagacctaacagcaaacgcccccaatgggacaaaacagggtcgtcaccacacctctgctatgtgcagcagtgcagcaagggaagtcatgtgcccacaggggtcacactctctctcccgcttgccgttctctccatcagccgaacactggcaccagggaccccctggagctgagaggagggggaggggctgtggtgtttgacaagctcctcctcttggccccttctctctcaatacaggaaaatctttccttgggggatcacctgcccgtaccctgctgcagaccccgcctctccccgttcgggttgaggcacacgggtcatccgcctcggggccctcactccttctgttggctctcaggagggtgtgtgtgggtgctcagggggactgagctggccctatctccaggagtttgtggcccatctccaaacttccacctcggcagggcacagtggctcatgcctgtaatctcaatactttgggaggcaagggcaggtggatcacctaaggtcaggagttcgagaccagcctggccaacatggtgaaaccctgtctctactaaaaatacaaaaattagccgggcgtggcggcaggcatttgtaatcccagctacttgggagactgaggcaggagaatcgcttgaatctgggaggcggatgttgcagtgagccaagatcgcaccattgcactccagcccgggcgacagagcaacactccatcaaaaaaaagaaaaaaaaaagtatccgcctcaggcaggccagagcctggcagctgcgtgggggtagacctgagcccagacagcgcctcatcagcgtggaagaaaggggttggaggctgcagcagaggccctggctccacccacccacccccaccccgtggggtgctggagcgactcccgctgaccctggagagctgatcgctaaatgttcagacacctgccagcagctgttacagtcaggcttcgaaattggccacagtgggattatctctgctgccacggaatcatcaaaccccacaaaccagggctttttcttttctactcagggagctggtctgccagtgggtcactgccccaccggaccgtatgtgcgtcccca

SEQ ID NO: 588455 - DNA, 4001 bp, Homo sapiens
gaaggaaagtagggacaaagaaacaatccccaaataaatctccccgtccatctttacacttttatatatttctaatgctttccaatatccgagactaattgaccactcttctctacctatggcttctgtactaggtgcagattttctatttacccagaggaattcagagcgatgtgctttcttccttacacctttgcctaaggctcaggcacaccttctgaagaagtcagagagagcagatgctgcttttccgacacatgctgtcagagttgctcttgggagtgtgacacctagccaggagtcagggataccccacccccataccctgctcttgtagttcttcagaaccttcaccgctctccacggtcctgaacctcgacttctacttcccgtcgggcatctactagatttctcccagccggtcaaaatatgattttctctcatattctccccacttctttccttccagccgcgacctcactgcgcgttttatttccatccgcgctttaaatattttattctacttctactaagctccttctacctaccacctacgaacatggcccaatcgttaagcaatatcaaagttataaagtaacaactcccctcagactttaccaagccgttttctctcccctcatgcaatggccccggcccccagcagcgcccatctccactccacgcaccaggctcctctcacctgactctcccgtggaaactcgtggcgcacgatgctgatcactggaatgtgcaggactaagctgaccaagtcgagctccatcatttcgccctggctctgggggaaggcgagcagcgccgacaccccttgcaccaccacggtatggcacacactttgcaggaaggagaaagggtcactgctccatggcgaactaggggaggagaagggcaaaagtggcagatcgcccaggcctgcctcgatggccatcactacttccaaagacaggttgtagggtagcagcccttccacgcggttcaggttgtccacggcaaataggagggcgtcccgtggccacagggcctccgccctggcgccctccccgggcttacgggagcccggcggcccccggccatgcagggtgctccccaaccagcgtgcgcccggcgagggcgccggggaccgcctagtccctggctccggctcatccctctgggctcctgctcggctgtcgtccggagcgcggctggccgcgcggggggcggtggtccagggctgcaagtgcaccgcgcccaccctcaccgcgtgcccgatgcgcttgaggatctggcagggctgcgggtgcgaggaggagctgggcaccccggccagcaccagtgcgcagggcggcggcaacagcagacagaccctgctcagcagccaccacaaactcagtctcctcattactgagacccgcagggagaaagcgcgccccctcctgcgcccggctcgcccctctgcagccgctgcctgaggtctccgcctccaggtcccgcgcgcagcttcactccactcggtgaagcggtcccaggagctggagcggtctctaggccatgcaagttggagcgtagcgcgcctccggcagtctcagatcccgctcccaggtccctccgcctggcatcctctgcccgcccggtcactgcgctgagcaggcaggcgggcgggccggcgcctgtcacccgcagctggagcgcccgttccctgcccgccccatctgcagggcgcctcgggcactgcgtccggccccgcgaggcggccgggatgagaagcagccggagttcctcgggggcagcagtgacagaggagcgacgcgctctcgcctggattcttttccttttctgcccaggcgagacccacttatttcctggggtcgcgttggagagggctttcacgcccggggtgcggaaaagaagccaaatccaccttcctccactgttggccaccctcctgcaggctcccccagcgccgacttcattttctctcttctctcgctacttcctctctgcctttctttcgttatttttccaccgagtcgccaccgccgcttgcttcctcggaggagcaacgcgactggccagcaaagggtggctctgctccgagcgccaaagttctccccgcctcagccggcgcctccctgttgctgagccctggcgcctgcctgtcgcttggctgcgctaaacgcccactgttggtgagattcccgagtggcacatcccgcgcccctggaaagtcctctcccctcaaaggctgggcgtcatagtttgcaaaattccctaaaacctaagaaggaaaataggactatgagccggtgagaattctgaattcagagtcgcacctgagggatctgaaattcggtggttcactgaaataggttcaaagaggctgtgacttaacgagcttctggatgtgtcgcttttaaggtttttctagctaagggtattaaagtaagaattatttacacatttttatctcctcagcttctttctttctggcatgtgagcctttgcattttttttttaaagaatccctgtttttaggttctcagaattaaaacaaagtgaattcaaagcaattttttcagttcaagaaattaaagagtttcaaaatacttttagagtttaaaatgcagtcaacagcagttcccagtttagatcaagagtccccagatcacagtttgtactaagttatttcatttgtatggtaatacagtgaagtcaacgtgttgtgatctaatcttttcctccatgatttgaataatctgaaactagaaggtaaggaaagagttaagggcaggcctgtggtttgcacatatacagtagattaattttattttatcccacagtatcgtttagaaggagggtaggagagatccatggggtggagcaagcactggggatcagcctttctgagtctaatactacttcatgaccatgaccttggcaacttatttcacccgaccttgccctgctgtttggatctgctaaattgttatgcaaatacagctggcttttagctctggagggttgttttgattcatgagctaaagtttccatcatgttttaaatcctgggaagaagagactctagttaagtaaaaatcccaagaagcttgcaaagtgaatgctgttttccccagcccagatctttaaaggtatctcagaacaaatttaccagacattcggcatcgtttttgcaagactgggttgctagagaagaaaagtctcccatgagaaaaaaagtgaaaatcatagtagtgggctgaatgaggagggaaagaaaccctcctgaagcctgagagaacatcccatgaatggagaaaagctgcctctagtgtgctggaaattcccccttgatccacaggattccactgattgagatctgaataataaaagtgtagaagtctgaggtccttgcattgcaggaagattgggtatctactaattgtgtagtaaggaggtatatttgtctgtactcgagtgtgtgttttgaagaatataatgtataactttctaggttatgaccatgcttagtccttgtacttttagtccttggcattacacttatgttcagatcaggttctcaagaaaaacatgatgatggagaatagtttgatctgatcattaatagcatcctagaatcactctatatgcattaggtttttcacaagttcatgactgccttgagggaataactgaactgctcttacacagaagaccttcccaagtttctgaggataatactgcaccaggtcgtgataaaactctacttaaacctggtgaatactgagtgaacaatgaagaatggctctcccttcttgggcttccttttgtttctttccgggctttcccattataattcactggtgtccttcctgttttccttttgctgcttggttttctttgtccatatcatggtggtctgagcatatctgacaaaattgttctctctcctttccccaaatcttctttttccttttccctttctccttcttgtccacctttttcatg

SEQ ID NO: 588456 - DNA, 4001 bp, Homo sapiens
acgagtcagcaaacagggcaagagttttatgcttcaaaacctgtgccctggccagcatctgtccctcctactcagcccctcttcagctttttctggtgatggagggtacagagggctctacctccctgctcctttcttttctttctttctttttttctttttttttttttttttttgagacagagtctcgcactgttgtccagtctggagtgcaatggtgcaatctcgactcactgtaacctctgcctcctgggttcaagcgattctcctgcctcagcctcctgagtagctgggattacaggcatgcgatactatgcctggctaattttgtatttttagtacagacagggtttcgccatgttggtcaggctggtctggaactcctgacctcaggtgatccacctgccttggcctcccaaagtgttgggattacaggcgtgagccaccgcgcccagcctcccttcttttcttattgccaattggatgtgataaccgaggcacagagagatgaagggactctgccagggacctccagctaggaaacagtgtagcaggggttgccccaggctccaagatcacaagctctgggatgatgggtagacccctcagatggcaatagtaaatctaagggtccccagggcctcagcttgcttccttccagcatcttcaatggctcttgaaaccaaagggccctctgagagctcattatccaaccccaatctgcagacagagaaactgaggctcaaagaggggaggggactgaccgaaggtcacacagcctgtttgcttttgctctttggaagtggaaagatttccagcacggggcctggcagacagcaggcgctagctctgtgcacgctaagtgggtgcactcgcaaatcgaggtgagcccacctgagcctcctgtgatccacaggagccccctctcctctctgtacccatccccatcatacccccaagaagggtccaaatggctgagtccaagtggcctcctgcgctgtctgcctcctccctcctgccccacaacacaccacccccaaatttcatttcttggaagaggagaagaggatgcaccagggtctgcaggaggctgttggagatgaagtggttaaaaatggggaggctattacacatgcactggggctggggccggggagggtgcaggagggttaggctggagtcgaggacaaaaatcagcaggtgcaggtcacctctggccggagaagagatctggtgggagtaaaaatcagaggagagaagtcagagaaacaaggtggggagaactcaggcagaagggtggaaaaacacgaaaccagacagggcagggaagacagcagaaaggagagaagaaatgataataatgaccataagcagacaggcgaggtcatacaagaaagaaggaaatattggagaaggagagagatcaaatgagaacaaggaatcgtaaatggaagaagacatcagaagagagaaggagagaagtgaggcagaggggagaaaaaatcagagaaggaaaaggagaattcaggagacaggaggtaagatgttagaggaggacaggggaaaagaaatccggccaaggtgaggttagcttcctgggaaggaacagccagggccccgaggctcccaccctcgtctgcgagccagagccccggaagcagcaagagatacttacaaagcaacaaaacagtttttccattctagacctgaattactccccttttcctagcgctgtatctgcaagaacttacaatagagagttactccgggagccccggggccccccgggcactcacccgcgcctcgggcacccgcccctggggcgcccccgcctgggacgccccccgcgacgcagtggccgcgcggacgggcagcgacagcgcgcacagcgccagggacagcgcgcaaagcagcgcgggcgcggggcggtgcggagccatggtggcgacagcggcaggggacccagtcggcagccgcggcctcgggtcgccgaccttaagtagccgcccgcccatcccgcccaagccggggaccgccccccagggagggcgcggggcggggatctgtctcggatcttggagacatctgggttcccacccggatcgacccgacagggcgcggcagcccctgcaccccagctccggggcggagacccagcaccaggcctgacatacggcgggcgctagctgtgtgcacactaaatgggcgcaggcacgagcggcggcgagcccagctgagcctcctgcgacgcacgcgagccccctcgcctctccgcacctaacacctccagcaaaaaaataacatgaactaacaatttttgaaagcttttcaccgaggcatcagcacatccttttcagagagggtacaacggccaacccattttacagaggggggaacagcgcagagtggtgaagcaacttgcacacagcttgtaaatggtgctgccgggatttgaactcaggccgtagtgggcctgggcagaacccccaccaggcagcatgcgccgcagcagggcaggggacccggctcccgtgggcaggtgaagccggcaggactcagaggggcggggcagaacgctcagctcctgggatagcccctcctacttttctttccttctttttaaaaagtgtttgttttttaaaagtcttattttgatcaaaacgtaaagtcacatgtttgtacacagttgttccctctccatcacatttacctctccccaggggcaaccactgctatctacctcttttagctgatggttcagggtttaccgtcatgtctctaagcaagcccttgttacttcctgaagttgttttgtttggtttccattttaggtactattcattgactcccctgggggaagacagagtttgcctttcctcctcactcccaggctcccttcccatccccatccctccaccctcccactagagtcattgggttaagggaagtgctatccaaactgaaggaggcctacttcccacctactccaacccctctcctccctcctagcactgcacagaatccaactgctccacctctaagttctctttgtatcccagacctccccttcaccctgcagcctgatgcagtgacaggaaagaggactggagagttggagagctggctttcattcccacctccactgtgcatgttttcaatgtctcattcttctcatctactaaatgagtacagtagttgagaattaaatcggtctgtgggtatgaaaatagcctggccagcagctaggtaaatgtgagttctccacccctccccagaaactatggtcccccttcccagctcttccggaagtccagcctctatctaatgaggctgaagtttgccctctcccacccacaacttgctcccacctaaggggggatatggttcagataaaagactaaaggaacacagagaagacaattcaggctggagagattataagaaggcttcgtggagaaagggacttgtgacccaggccttgaaggacagggaggacggagattaagaagaaaagacattccagggggaggggacgcataggcaaagggcaggcaaacataaccatatccagtgaattaccaggggtccagtatgaaacacagggagcaagagcagaggaggctgcagagggcagcaggggtcaccgaggcctgtgtgccacactgaagagtctgaactttgtctcggtgtctgtggggggccccagagggatacctgagttctccgggctccaagtccaggcctgggcctgcccagcctgcagtgggccagctctggcctaaattcagagagctctcccttccccctagccatttggaggatgatattataaaaaaccccacagctcccataggctcttaatggaagcataaaccagtttcacctctctagataaaaaatttatccaaactcaaaacacacaacgcaacaacagttccactttctacagaattacttaccaacaaacacaaaaatatatgtgcaaggatgttcactgaagc

SEQ ID NO: 588457 - DNA, 4001 bp, Homo sapiens
cctgtttctcctggtaaatgattattcattctgaggtctggctcacctagacaaaattagtcactcctcttgcaggctgaagtcactcttaatatggcacaaaagtgtcaaacagtatagatggcaagcatcttgaggacagagagctctgtcctcttccaaggctctttggcccctcgcagggcaaggcacagaacacaggcccagagaagtgctgaaaggagggaggcggggaggaaggaaatgccatgcggggcaaaccctgcagccacccctcctgggagcagcctgtttccaggctcatgttagtccctaataaaaggactgtggaaaattctggagtaaactttcctcccctgattcacacagaaaccttctttgctgctgtgtaactcaccgagtgccaacccaagctcccctggctgtttacaatttccctggcatttataaatagcatggccccagaaagaaaaatggagtttcaaaggagctgaaagccgaccgttcccacccccatccttcctcctctgtttccaagcctctcccccttaacagccccaagaaacaccaaccagcacccccaagtgtgtatgtacagggaatgcttgtccctttagtaaacggaacacccaagaaggaggctagagtccctcccagcaaggagtccgcaaacggcagaccggaattgggtctcagccctaccctgcctcactgtgtgacaattagcccatcataaactctctgggtccttgacttttctcaactgtgaaatggaggaaatggagatggggtaagattctagcaagctatggtcgctgtaaacggcagagcggtgagaggtcctggtgccctggtcagaaatgtggtcctgggagaacaggacacacaggattaagtgtttgaaaagtccccagatgccaaacaaaagcgaaaggcacctccccagaggccccgccttccacaaagtccaattaccctcaggacagcccagaatgagttctgggtgttttaaagctcccttccatgctctgaggagggtgtgaagacaggataaagcgacagatgtctgggcagacaaggagctaggaagaaagccaatgtctcctgctcacccacacccccagcccccagccttccaaggactggggcttccccctgggcactgcccagaccagccagcctgcactggaccagagggaagttgctgttatttaggttctggggggctggaccccagaagacatgggggctcagggagaaggggttccaatcactgtcttcaactccagaagaagcttccgtgtgagtcagggaagggaacactgcagggccggggagaagccagcacctacaggtagcaggcgcctgaagatttcagacagtgtaaggaagaactttctaacagtccccagaaagaggaagcagctggagaggagagcaggcacaggtatcgtccaggaggcaagggtcctctgagtggactccccagcagagtcaccgcccagaccgtagctggtggtcccctgcatgcccgggtcagacaacccaagtgcaggggtgaccccgggccagttcccccatcccgggggcggggtcgaggttattagctcaggtgctagcagcacagtggaatcacggggtggaggcctggcccctctcctctcctgctccggcgtctccccatcccccaactcccatccacactctttggtcccttggaagacgggaaaagtgagcgaggaagcccttttccagcgatgcccccgcggccgggccgagctccaggcgcgggcgagataggaccgggaaggaagggagaggaaggactcaaatcagcccgggacccccagatgcccggggccggggccgcgcgcctcccctacctgctgctgcggcactggagacagcggctgctgggtccagctgcgctcagctggttccgggcggcggggcgggggcgttgtggtgcgcgcggccggggtgggcagggcgcgggcgggagccgccctcggggcggggcggccgggcaggcgggtgggggaggagcgccaggccctcccgtcggctgctgggcgggtggctccaagctcgccttcgtccagggggacccctcgcttcacctcgcaggaaggcaccaaaccaagccctctgctttcccctggaggaaactgaggcccggagcacggaggggagatctgaagaggcctagggtcggggaggagacccagggcagctcctgagctgggctggggccaaagagctcagatgggacgggcaagcgagcaatgctcaactagcaccagcggaggcagatttcagccctggagagaacggacttcaggaggcaaagccctcgaagagtgacataggctgcatgcaaagcaggggagattccctcccacggaagggaataaggaggaagagcgattcccagctcattccgaatgaagtaacgaaaatgccaagtgcatccctggtccttaaagtggaccattaagcaggcgcctcggagtcagaaggcctggtttggaaccccagacatcgactagtcctgtaactttgggcaagcgagctcacatgtctaagtctccgtttcctcgtttgtcaaatgggcatcctgaattgccgcttcatggggcggttgagaagactcagtgagaaaaagactctcagcacaatgacagggaccgtggcttctgcataaacggaagggatgttcttattagtgtcatggcagatactgttttaggagattgaggaaatccacattgggtagaaagatgagtgcaaggtcaattttaagcaaatgtaatactttgttgatttcaacaacatctcatatgcatttgagacgatagccgtttataatgcagcaaggcataagacggcctcccagcagtcctggtgcacacatgagttcccaggacttttggagttgccgcgtgactccggtttggaaggattcacacactccacaggagactgcaccacatgacagagatgtccattcccagcctgggtgctggcagcagccccatgttcagccagggtaaagctccctcttaacacaaggtaaaatgtactagagtcagtaattgccgggtgctggggatcagagcagaaaaggctgttgtttaagtagcacagaagccaagagcacagtgctcactccctggtttttccattgaatagcagccagggaagccacaggacccagggaatctcaccctggctcttcctcctgccattctctctttgttcaacaccagtaaatacaagaaccatttcttgaatgcctcatgccatgctctgggcttcccacgtattaccgactttaattctcacctccctacctggcctcctaagggaggcattaccatgtgtatttttcagatgagcaggccaagcccacagaaagggttaagtactctctggaggtcacactactgatactgtgcagtctactcttctatgcctgagtccttggccctcgcttctttgctcaatgtcttatgtcacactctgccacctttcctggcttgggaaattctgcccagttccactttctctgagaatacaagcaaggtatccaccccgcagggaggctcacaccatctctgctactctctgctttctccagaggctgcctggggcccaatgcaaggctgctggggagaaaagcaaaaacacaggcttatttggctctggaatctttgattacaagccccggcatacacatgccttggaattatctaacatatcatttccagccccagcaactgctctcagacaaagggaggtggaactctgaatctgtgtccccatagaactggagaataccacatcacgatggaggaaacattggagaatgtctgctccaactcctccctttagagatggagaaactgaggccaggagagcaaaagggttcacattctaagctagatctaaggttccatattctaagctgggtcagatgcctacccataaccctgtaattg

SEQ ID NO: 588458 - DNA, 4001 bp, Homo sapiens
gatggtgtgtgcctgtggtcccacctactcgggaggctgaggtgggaggatcgcttgagcccaggaagttgaggctgcagtgagcagagatcacgccactgcactccagcctgggtgacaaaaaatacaacaataaaacaacaaagagacagaaagcagatgcgtggtcagctatggggtgtgcatagagatggacgtaagcaagcatgagggatccttttggggatgatgaaaatcttctcaactggattgtgatgatggttgcataactctgtaaatgtactaaacattattgaattgagtgaattatgtgtatgtaaattatatgtaaatttactccaataaatcatgtaaattatatttcaataaagctgtttttaaaaaaaaaagaaaaaaaaagcccacacgcttcctgtgtactattctgccaaagcattctgcaagagaagggcgctccctgtgggtcagtgaagttcaatcagaggccgagctgctctgaggcccagctgggagccagtttgagccgagcagttccctaacacctctgtggaccaggtgtgcagcaggatcacccaaggagctcaggaaacaatagattcccaggccccacccctagcctctgagtctgtaggtctagggtggggcccgggaacctctgattctgaggctcagccaggactgggcccacatcttcctttcacatttggggaaactgaggctaggcaggagaggggcctggtcagacctagttgatcaaacagtgggagagccagggctagaattagagccctttcctcttctcgtctctccattccctccgcctccctcccactcctccccctgtcctcagcctcccggtgactcagggctgagtcacccagaggccccacagaggaaacttcttaggaaaaacaatcgccaaacaaagctttccctgatctggggaagagaataggcccagggggccaagagagggaggggagggagaacacagggtggagtcggaggctccaagacttggagtctcagccactcccttgtgtggggccctagatagggacgtccccggaatgaacgtccccatctgcaaataacacctcctatgctcatagaagcccattgtgatgataagtactttataagcattgtcttgttgaatcctccccaaaacccatggctggcattgtctccttttatagacggaggaacaaaagctcagagaggttcagcccaaggttacaccattaggaattcagggctgtctgactctgaagtccgaagtctgactctcacttctacacacctttaaaaaatacctactgtacacagtggcatgaagatcagctctcatcagacaggtaaggagaatgatggccacagtggctgttcaatcacaaattgtctcctttctttctctgacttcccggcccagagggcacacaaacaggaacaccaatagtcattcaagcagttgtgggccctgggagcacaaaggagggagcacccatggcccaacagagccacggaggaggggcattggggcagagccttggaggataaatggagtttcccttttgggaaggtgggaacaacagacgcaaaggcttgggggtgtggcctgcacaaggaagcgtaaacagtttggagaagcatggctggggttgagacagtggatacctcggggagaaggggtctgactgctacggagtcctggcctgaccggacacactgaggatttttaagcagggagagaatagaattggaactggtttcatctctgcagggggcctggctggtgttgaactaggagtcaggagcgggactttccctcgggtctccctggcgtccctcctctgagctggcttcggggaccaccccagatcccgtgctactcacccatgggtcagaattgcccctgagggcttcttcctcggccatcgcgaggctggggggagctatgtgggcctctcctgacacaggccaacctaatcatctcagcctataaataggactcaggattagtctggaaatagctgtgccaagccaactccgcaggcatcacaggcacacacagttccggaaatggttcttctcctcaacacaattaaaacccaacacttcctcaggaaactattgttcacactccactttgcttccttaagcacaaggccgtcaattttggggggaagaacctgcctgcctactgctgattagtgggggtatgctttgtggagaggaggcccttttcctgcttctccctctctgaggacctgaaggagtcactaccattctctgggccccagtttccccaaaggtaaattagggaggtgggacatgatgccatttttaacttaccaggatttcaaaaattagaattgtaataaacatgtgagcagggagaaatgaacaggttcagggcctgccactgaggagctgagtggccttggatgagccactgttcctctctgggccccagattcctcagctgtaaaataaaggtgctgggggatgatgtccaagattaataatttttttttaatttcatttttttgtttagtatttttgagaacccagccacctggccatgctgtaccagccttgtgctgagtgctggggataaaggaacaaataaaacccagtccaggcttctgtgtgcccagccctgtgccgggtcccagtgggtaacagcatgtccaatcccctcagtgtcccactagaggcttcctttggggctgctggggacatcttgtttctagttgagaattcagatttatgtccaaagacaagaactccctgaggggcagattacaacatggactgggccattacaatcaacaaggacacaaagctaacacagccatcgttatacaccagacatgtgctaaggacttgatttccccattgtttaatcatcaccaactccattatcacccccatttcacagatgtggaaactgaggctgagaagagtaagggacttgtccaagggcacagagcaagtcagggctacggtgatgtttcaggcccagacctgtttgcctctggagcccagggtttaacacaccccagtgctgctgtgaaagggctctggacagctcaggctggccggccaattcggggataaccgaacagaggtatggaacagaaaggggcgttgaggatgttgctgtgtgtgtgcggtggggggagtgacaaggcttcagcaatggtactcattctctccaaccagctcccagtgctgctgtcctctgatccaccctccgctctgcctgccatggactaattgttctgaaatcccatggatcaagtcactcctcagctgaggacctgtccatggctccctggtacccagaggatagaaacccagcattcaaaacctctctaaccagctccccacctcaaccctcacactcctgctcactagcccccaggcgcagtgggctcttccagcggccaagcctgtgcctacggtgccttcttgcctggaatgcccaactcccccttctcagccttctttgactctcaagtaaggaaaagcactctttgtctccctgagccccttggcacttatcacagagcactctgggcgttaacttccactgtctccgtcttggattagagtggatctcagagggcccggtggtgtctgcttcacctccctctccactgcagcagcttagcaaggactggccgggtaaactaaaaaatgcaaagagctgagagaatcctgggaaagtgcacatttcccaggactgcccaatgacaagccccgtaccaaggcacagcatcaggataccctgatgtggaagaaccaaaaattgcaccctcatggcttatcaggatggtccttgtgtctgtccctttcaagggttctgataatgaaatctgggcaagtcaccctcctgctttaaaacttccaatggttcccagaggtctagcataaaatccaaactcaagggcccacataacctaggtgctgcctggcccccaggccctcctctt

SEQ ID NO: 588459 - DNA, 4001 bp, Homo sapiens
taaaatgaaactgatactcacattcaccgaggattaaagtaggtaatgcatgtaagatgcttaatctaagaagctggcacagagtgagtgctttaaaatgtttgctaggcctgtgccaaccgtacctgggcatctgtgttatgtcctgtgccctgcgtaccagcctcccacgtgcccagctcctcgggtgcgtcagacactgtgcacattagtgaaattcaaacaaccccctacaaggagggtaggattattccctctcatacagaggagtaatggaagggcaataatttgcatgaggtcacagggccagctggaatgaacacagctctggatcttcggagagacagaaagcaggccaggtgaggtggctcatgcctataatcccagcactttggaaggctgaggcgggaggaatccattgagttcaggagttcaagatcagcctgggcatcaccacaagtccccatctctacaaaaaatacaaaaattagccaggcatgatggtgtgtgcctgtggtcccacctactcgggaggctgaggtgggaggatcgcttgagcccaggaagttgaggctgcagtgagcagagatcacgccactgcactccagcctgggtgacaaaaaatacaacaataaaacaacaaagagacagaaagcagatgcgtggtcagctatggggtgtgcatagagatggacgtaagcaagcatgagggatccttttggggatgatgaaaatcttctcaactggattgtgatgatggttgcataactctgtaaatgtactaaacattattgaattgagtgaattatgtgtatgtaaattatatgtaaatttactccaataaatcatgtaaattatatttcaataaagctgtttttaaaaaaaaaagaaaaaaaaagcccacacgcttcctgtgtactattctgccaaagcattctgcaagagaagggcgctccctgtgggtcagtgaagttcaatcagaggccgagctgctctgaggcccagctgggagccagtttgagccgagcagttccctaacacctctgtggaccaggtgtgcagcaggatcacccaaggagctcaggaaacaatagattcccaggccccacccctagcctctgagtctgtaggtctagggtggggcccgggaacctctgattctgaggctcagccaggactgggcccacatcttcctttcacatttggggaaactgaggctaggcaggagaggggcctggtcagacctagttgatcaaacagtgggagagccagggctagaattagagccctttcctcttctcgtctctccattccctccgcctccctcccactcctccccctgtcctcagcctcccggtgactcagggctgagtcacccagaggccccacagaggaaacttcttaggaaaaacaatcgccaaacaaagctttccctgatctggggaagagaataggcccagggggccaagagagggaggggagggagaacacagggtggagtcggaggctccaagacttggagtctcagccactcccttgtgtggggccctagatagggacgtccccggaatgaacgtccccatctgcaaataacacctcctatgctcatagaagcccattgtgatgataagtactttataagcattgtcttgttgaatcctccccaaaacccatggctggcattgtctccttttatagacggaggaacaaaagctcagagaggttcagcccaaggttacaccattaggaattcagggctgtctgactctgaagtccgaagtctgactctcacttctacacacctttaaaaaatacctactgtacacagtggcatgaagatcagctctcatcagacaggtaaggagaatgatggccacagtggctgttcaatcacaaattgtctcctttctttctctgacttcccggcccagagggcacacaaacaggaacaccaatagtcattcaagcagttgtgggccctgggagcacaaaggagggagcacccatggcccaacagagccacggaggaggggcattggggcagagccttggaggataaatggagtttcccttttgggaaggtgggaacaacagacgcaaaggcttgggggtgtggcctgcacaaggaagcgtaaacagtttggagaagcatggctggggttgagacagtggatacctcggggagaaggggtctgactgctacggagtcctggcctgaccggacacactgaggatttttaagcagggagagaatagaattggaactggtttcatctctgcagggggcctggctggtgttgaactaggagtcaggagcgggactttccctcgggtctccctggcgtccctcctctgagctggcttcggggaccaccccagatcccgtgctactcacccatgggtcagaattgcccctgagggcttcttcctcggccatcgcgaggctggggggagctatgtgggcctctcctgacacaggccaacctaatcatctcagcctataaataggactcaggattagtctggaaatagctgtgccaagccaactccgcaggcatcacaggcacacacagttccggaaatggttcttctcctcaacacaattaaaacccaacacttcctcaggaaactattgttcacactccactttgcttccttaagcacaaggccgtcaattttggggggaagaacctgcctgcctactgctgattagtgggggtatgctttgtggagaggaggcccttttcctgcttctccctctctgaggacctgaaggagtcactaccattctctgggccccagtttccccaaaggtaaattagggaggtgggacatgatgccatttttaacttaccaggatttcaaaaattagaattgtaataaacatgtgagcagggagaaatgaacaggttcagggcctgccactgaggagctgagtggccttggatgagccactgttcctctctgggccccagattcctcagctgtaaaataaaggtgctgggggatgatgtccaagattaataatttttttttaatttcatttttttgtttagtatttttgagaacccagccacctggccatgctgtaccagccttgtgctgagtgctggggataaaggaacaaataaaacccagtccaggcttctgtgtgcccagccctgtgccgggtcccagtgggtaacagcatgtccaatcccctcagtgtcccactagaggcttcctttggggctgctggggacatcttgtttctagttgagaattcagatttatgtccaaagacaagaactccctgaggggcagattacaacatggactgggccattacaatcaacaaggacacaaagctaacacagccatcgttatacaccagacatgtgctaaggacttgatttccccattgtttaatcatcaccaactccattatcacccccatttcacagatgtggaaactgaggctgagaagagtaagggacttgtccaagggcacagagcaagtcagggctacggtgatgtttcaggcccagacctgtttgcctctggagcccagggtttaacacaccccagtgctgctgtgaaagggctctggacagctcaggctggccggccaattcggggataaccgaacagaggtatggaacagaaaggggcgttgaggatgttgctgtgtgtgtgcggtggggggagtgacaaggcttcagcaatggtactcattctctccaaccagctcccagtgctgctgtcctctgatccaccctccgctctgcctgccatggactaattgttctgaaatcccatggatcaagtcactcctcagctgaggacctgtccatggctccctggtacccagaggatagaaacccagcattcaaaacctctctaaccagctccccacctcaaccctcacactcctgctcactagcccccaggcgcagtgggctcttccagcggccaagcctgtgcctacggtgccttcttgcctggaatgcccaactccccct

SEQ ID NO: 588460 - DNA, 4001 bp, Homo sapiens
tccctcctttctttacattctctctgctaaggtattcgatgtctactatactgacatacatactttccttgagttgctgtgcggatgaacatccttggaaacagttaaattcctttacagcagaagatacaccttttaaatcacctttcttctgcctccctccttttgtatttctcaatttcatagggttgcatctgtctatctgatttgtttacacttgaacaaatgtgttcatatcttcttcaagaagatcttagaggaagcttagtcatacaagctgactaacaatctaacaacagaaagatgtttgaaacttgaattaagtatgctacaaagtgatgagggttatctgcaccctacctatagctaatgactcatattttcaatggttttccaaaataagagtttacgaacacataaacatgttctctatgtgcggatacacatctttacagtgcttatcactacctgacaggaccttatcatttgtgcttgacttgccaaagaatgtaagcttcatgagggcaggggttctgttttgtacactgctttatttccagaacatggggcagcaccaagcagaatggtattcaaatatctattgaatgtatgaatatacactgacagttcacatgtaagcgtacacctctatcaaggatatatggaaagtttttacacctctaagcaactaaaaggaacgctatggcttactacttgaccttgcgcttgaagtttaagataggtagttgtttcgaatctttattttcattcaacatcccaaagatgtttagctagtaaagaaaaactaaagtacaaaccccgagatccagtatttacccgtttgcccaaggagaggcgaggaccattcataataaagtcactgaaacaattaagacaatggatgggaccagtttttcttttctgaagctaaagaggcgcgagaggaggacacacacagtagacaaagccagccaagaacctcggaaagtcggccccaaacaatagcagcaacgacagaggcaggccccgggttggatctacagggggtggagtctcagaaagcaccatcgagtaacccgctccatgtgcgggcccgacggaggggcgaaggaggggttcctgggactcaactccgggaagccccctgggtgtgtacctgtgtttgcggcggcgggtgacctggggaaacagggtgcagacagctgcagagcttttctttttttttttttaagctgtggtaaccctggctgcttaataaatccccagcgctcggtgcgaagagggaaatccccggacagagtgtgggatcggattcccctgggacggatgatgcggccgcgagagggggacaggggaagaccccagggatggcgggggatgacttactttgaggagacagctgttgagcggtgcgggcaccgaggtgcggtggataaccaggtcctggcccgggttgtgcacgtcgcagatgagctccagcacagcgatgctgcgggccgtggacacagacacgcggtggtcctcggaccaagccagcggttccaggccgctcaccgcatactgcagcttcacggccggctcccgccgagtcaccatgaggcggaatgcagcgctgggccccggggccgcgtccgctgctggctccttcccgcccgcctcgccgcccccctctccctcctcctccccagacggcgcaggcccgtcgtccgcgggccccacccgggcctggtcggccgtgttcatcttctctcaggtgcagaggtcggacgccctggcgctccacgcagtcgcgcgaccacctcccggaccgccgccgccacccccagcgccctccgcggcggttttctcccctcaggccccgagcgccgccgagccaagaaggaccccgccgttgccaggcaacgcggccctaccaggtggccaaggaactgcctgtccagaaaaaggacagcgagcggggagccccgaggacccccttttccctgcccagggattgagctccagagcctgttagggagctacccagacaggctttagttcctaaagtgctgaggaaacgcacggggcggtaaaggggaggctcgtcggtgagatggcgccggatctcgcttctcagaggcattcagagagcttccccagcgtgaactctcggccgaatgtaattttgccaggccgcgagggacgcagagaggggctgccaccaggcgggggcacgcgcggtagtcttgtccctacccgcccggtgccgccgtccccggctcccctcgggacgagtccgtacagctggagccgttccggacccggaaggggcggtggcgcagggtcctcgcgcgtcccacgtggggtcccgggcccagcagtctgcgcaccgggctcgctgctgcaccacgcgtcacccacgcagaccatggcagccgccgacggttcgctcttcgacaaccccaggacgttctccagacgtcccccagcccaggcgagtcgggtgagttctgacccggcttcagctccgtccccacccgcggcccggctgtgggcgcgccgcgagctgcagccgtgccttggagtcgggtttcgagtcattcacggagttaagcgggagaaagacaccgggcagcttcgggacaagttgcgccgaaacacgtgtctctaaccggaacaccacccgcagggatgcgcctggaagcggggagtggagcggtgtggaggggcggggagctggctcctgcgcctagaaaagtaaaggaaggaattagaggctgtttcccgtggaaggtaggacctgaagttccggcgcaagtcccaggccaaagcttaacttctctaagccagtttcctcgactgagtgcggactaagctctgatttttttttttatcttgcccacattcctgtctgggaagagtcatgccctacaaaccataaattctcatcagatggctttcatttaaccctatatatcgtgacttactttccaaactggctctggcctaacattatgtgacaaagaagaaagttaaaatattacccctaaacatgtttctttgccacattttgaaatggctttgcaaagctgttctttggggggggcgggcggggtggacatttgcatctgcaaagaatctctattaacatagctagatctttttcttccaggccctcccaatcctaaagagattaagagtctaccacctttcaaagatctgaataggaaacacttgtctgttgtctctaagggcagccactaaagacttgaaaagaaccttggtctccacaatcttttatcttaacctgagcattttctttgtatccatcccaggtgtttagacaaactcaaccgtcaactagaaaatgtttaaatttacctatagcctggaagcccccgctttgagttgtcccacctttctggacaaaaccagtgtatttctgaaatgtatttgatgtctcatgcctctctagaatgtataaaaccaagccgcggccgggcgcggtggctcacgcctgtaatcccagcactttgggaggccgaggcaggcggatcacgaggtcaggagatcgagaccatcctggctaacaagatgaaacccccgtctctactaaaaatacaaaaaattagctgggcgtggtggtgggcgcctgtagtcccagctactcgggaggctgaggcaggagaatggcgtgaacccaggaggcggagcttgcagtgagccgagatcatgccattgcactccagcctgggcaacagaacgagactccgtctcaaaaaaaaaaaaaaaagctgcaccccgaccaccttgggcacatgttctcaggacctctcgagggctggatcatgggccatggtcactcatacttggctcagaataagtctcttcagatatttttgagtttaactcttttggtcgccatgaggaaggttcgtttgtttcaggaatgaggactggcaactaggagtttttttgaagagctttcaaaaatgggacagattttcatccccatgcaatgg

SEQ ID NO: 588461 - DNA, 4001 bp, Homo sapiens
acagctctcactaacctccaatttccccccgccttattcagacaaacttctacttttagaaaaccaagaacagcaaagtcgagacatgctaaaaaggtttgaagagaaagaagtatgaaaatcaagagggggaaactgttctatacagtgaattcttcttcaaaggttcagcttgttcaactcccttgttctttgttctccatcttcaaagtctaacttccttgttctttgtgcctccttgcccttagttacccgctctgtttaactgcccttcccgccgaaactagtcttcccaccgaaatcgctcgtcccgtcactgtaacccacacccctgttctatttaaaatagccaattgagattagcttagattgtgtggtccaactccaaccagcagggacaggacacaaaaacagggactgactgccttagggataaaaacccattccaggctgggcacggtggctcacgcctataatcccagcactttgggaggccaagacgggtggatcacctgagctcaggagttcaagaccagcctataggacacagtaaattccacttcaaagattttagccttttaccttcctttaaattcaagagggggaaaattaataaatacaatgagttatgagttccatttcaaagaaccaatatgtcagtatgttcagcttccctgttctttgttctccattttaaagtttaacccctcgttctttacgcctccttgcccctagtttcagtaaacaaccccttcctagcttctatcacctgctctgtccttagtcatcctgagtcacctgctctgtaaccatccttcccaccaaaactactcaccccgccactcaggcctgtgcccctgccctctttgaaataaccaatcggaattagcttagactgtgcggtccaaccctagccaatatgggaaagacacagcagtagagactagctgtgtaagagataggaaccccttccccttccttgtcggtgtgctctcgccattgctccatccgcaagatgcacccttctatagaaggaaatttgccttgctgagaaaactgtttgccagagtgctgattcttctttgcggcacccaaaatttatttccaacaagcctgaccaacatggtgaaaccccctctctactaaaaaatacaaatttagccgggcgtggtggcatgcgcctgtaatcccagctactctggaggctgaggcaggagaatcgcttgaaccctggaggcggaggttgcagtgagccaaaatcgcaccaccgcacaccagcctgggaaacaagagcgaaactccgcctgaaaaaccaacaaaaaaacaaaaacaaaaacaaaaatccttcccttctttgttctgttggctctcttgcagcggccagaagagcgagcagcacccttctgcgtaagtaaatttgctaaatttcccttgctgagaaatcctttgagtgctcgttttctttgcgactccgagctcttattccaacaccgagattcccagccccttacccgggagacgccttcctcgccgcccagagtcggcagcatcttagccacatcacgcaccactcccgggtactccacgcacaccatgcgtcgctcccgcctcagctccacggggacggcggcccccagccccaaatcggccgcctccgccgccatccctgtgcgtctggcagggcccgccagggtccgtcccacaaagtactcccaaaggcctcgcctcaattgttccgcgaaggaatcgttccgggctccctcaccgctcgcgtcatcctaactccccgggctcagcaagacgcgagggcctccagggagcaaatggcccatgggagggcccatgtcttcgggaaaacgaccgccgtgtcctcgactttttatttaaaattaagcgagttagtccaccgggcggggcaagcaccagtctctcctactagccagcgagggacccggaggataataagacacaaacctccctcgacttcagccaatgagaatccgagggccgagcgagtttttttttgagccaatgagaagtccggaggaagctaggtcccaccttctcctccagcttcgtacgttttaaccaataaagaactagagttaaccacgtcccagccctcttctgggtattccacccaatgacacctcgggggcgggccagaggcagacttccggcccgcctgcttggtggggaaaaggtcccggctgagaattgatttccgcattgggtcggcctggtattctgtcggtgttggcgcttcttctcccaagctcttgcagccccctcgggactaggtttccaacggcgcttgcggggggcctcgcggaggtggatgtggaaaaggcgagcgcgggggaactgtgctgtaaccatcgccccgcctccacagaaagccccgaagcgccggctcggggccgaacgcgggcatccggcgttcgtctgttaggcaggcagacattaagcgcctactgtgtgctgggccctactcaagacccaggcggggagaacggcgtctgtccggtaggcgcccagggctgctgcaaagccccggagcgaggagtgtggcccctcaaacagggaggagatgaggtccgaggccgaccgaggtcagagacccgcacccacgaaaagggtccacccgtcgggctggctgcttcccagtgccgtggagagcccctgaaggtttctttttttgagaaggaatctcgctgtgtcgcccaggctagaatgcagtggcgctttctcggctcactgcaacctccgcctcgggttcaagctattctcgtgcctcagcctcccgaatagctgggattacaggcgcctgccaccatgcccggttaatttttgtatttttagtagagacgaggtttcaccatgttggccaggctggtcttgaactcttgacctcaaatgatccgcctgcttcggcctccccaagtcctgggattacaggcgtgagccaccgcgcctggccccttgaagggttttatgcggagcagtgatcccattcatgcatttgaaagacctctctggctgttgtgtggagaacagatcaaagggggagaaagtgagttcagataaaccagctccgagactgcataatccagtcaagagatgaagggactgggtttgagaatattgggagatgagaatcatggcccagcacagtggctcacgcctgtaatcccagcactttgggaggctgaggcgggaggatcagttgagcccagcagttggaggccagcctgggcaacaggggaagaccccatttctaccaaaaaatacaaaattagccggccatggtggtgcatgccacagtagtcccaactactcaaaaggctgaggcaggaggatcctttgagccctggagttggaggctgcagtgagctatgatcatgccacttgcattacagctagaaattagtaagagcaagtgaccccttgggtatgggtaccccgtttctgaagtgatttttttttttgaaagacacgatctccctctgtcacccaggctggagtgtagtggtgtgatcatggctcactgcagccccgaactcctgggctcaagtgatcctcctgcctcagcctcctgagtagttgggactacaggcgtgcaccaccatacccgactaattttgtatttgtgtgtgtgtggcgacggggtctcactatgttgcctaaagtcatttctttttgttgtttgtttgttttgagacagagcctcactctgtcaccaggctggaatgcagtagcacaatctcggctcactgcaacctccgactccctggtataagcgattctcctgcctcaaactcccgggtagctgggattataggcatgcgccaccacgcccagctaatttttgtatttttagtagagatggggtttcaccatgttggccaggatggtctcgatctcctgacatcatgatctgcccacctcggcctcccaaaatgctgagattacaggcgtgagccaccgtgcccagcctgtga

SEQ ID NO: 588462 - DNA, 4001 bp, Homo sapiens
tcctgggttcacgccattctcctgcctcagcctcccgagtagctggacctacaggtgcccgccaccacgcccgactaattttttgtatttgtaatagagacgggatttcaccgtgttagccaggatggtctcgatctcctaacctcgtgatccgcccgcctcggactcccaaactgctgggattacaggcgtgagccaccacacccggcattttcatttgttaaaaaataaagggtgaagaaaagcttagccttcctcaattcctttattatattgatgtaaataagtttaagagaaaaagataaaaaacaggatataaaatgcacaatgtatctccagtctcactgtttagataggctcagaaatttactggcctaccaaagtgtcgtgagatagtaaataacatttttttaaaaatcattttcaacatctttattgtagtgacttgattctcaagtgatgactctggatttagcttttcacaaataaaggtaaacattacccagctgcacatcaaagccctaatacttaaacctgagacgtttcctcagggctgcgatgcacaatttttatcaagcaaggaacaaaccaataaagccaagttgaacacactggcaaacgtcggcaggaatggtcaacctacacatcttaatcctaacactctgcaaaccttgggaccgctgcctcatttcaagaaaacaggaaacacaggtggagtgttgctggctctgccactgacgcagttcggtgagagaatgaactctgaagcaccctccccgtccacaggcagcaggacaccacgctgcgcaccggtttttcttgctaaatagggagtggggaactccgaatattcttgctggaaaggttaaaaacgcttttcttaaagcagccttgagctatttataagttgcacatcccatcaacaccacacgaagtactgaaatacgatgccggctgcctcctggaagctaccggacggagaaggggcgaaggcgccaggccggaccgcgccggggacccccgcccgggccccgacgtcacaggccgccccgcggtcgcccaggcctccggcatcacagaggcccccagccccgggaccaggcgccctcctcctccccaccgcgctctcgggtggctccgacctcaatcttgcagaggctgggctggaagatgaaggtccccgccaggtctggatgtgggagccccggggtagcgacctcagccgttcgcccccacacgccacccagacaacctccctcaacttcgtccaacttgccgtagagcctcagtgccagggttcgagggccctatcccaccccaagccagcgtttcccccggagccccgcacgaggctggcgagagctggaaggggtgtgacccctgcccctctcctcctaccttcggcggccaccaggaccctcaactctccctactgttcccgggcccctcctcctgaaaccggcccccgggaccccagtctcacagcgggccgagccgtggtccgctaaccccgctgtccccgcgtacccggcgcctgcaggccgcccccggggctatcgggccgctgagcgacgggcgccgggaggctcttgcgctccttctgcgactccctccggccgcccgcgccggctctgtggcccgaggccccggctgggctcctgccgccgcggggaccggccccggccgccgccgccgcctcgtcgcgcctcttgcgctgcagctgctgctggcgccggcgctcggcctcgcgcaggatgtcgaacgggtccgactcgtcgtccagcagctgatggaagcggttggccaccacgcagccgaaactctcctgcatcgcggcgccagcggcagccacgggactccccagagcgcccttcatgccgccgcgaccactgcgggcccgggagggcagcccacgcgagcgcgtctcagcgaagccggcggccaggacccatgccgcccgctccgccgccaccgccctccgggccctaccctgtccggcccctaccggcgcccgcccccgcggcgccgccgccgtccgccccgctgcgccagacagccagtcagcgcgcgcgggtgcgccccctttccgacacggcgcgcctggagacccaatcaccgaccggctgctgtcacgtcacgcgacctctgggccccgccccgttcgctcagcagggaggggcggggcccaggggcggagctactggctggtccaggcggcgccgacgaagcggtggggtctcggctgtgtgtgctttctcccgggactgcgaccgtatttgctatgggccactctgctttgaagcttatgtatacatttagccgtgcaacagctacatattgcgcacttaccgtgtgccaggcattatgttgtaggaaatactagctccgtgttgtcacagatctgagtctgtagatggagaaaaagtgccctgaaggacaggcgcagagctctctacgggctgcagcaaagggatctgacctaattgggaaatgacagttaagccgagggagaggggtgacaaggggttggaggaggaacagcaagtgcagcagtcttgaggtgggatgtgcacagcctattcaagctcaaagtggtctctattctaagagcagtgggaagcaagttttgagcatgagcagatttgggtttgaaaaggccaccctacctgcactgtgaactaatagtttggagggaaatacaaatggatgctgggaagccaaacatgattgttgcaaagctccagggaagagttgatagtgactgggattaggatggtggcggtggaggcgaagagagtagatggattcaaagacttggtgatgcgctagaggtggtgatgagggagaagaagatacggtgactcttattttcctggctccagcatctgaatgatagtattagttaccactggaagacactactttaacgggaatcattaattcagtctgggacacgttgaggtttggatatttgttttcttttgagatattcagttgaggcctggagcttagagaacgccggactggacttcctccaggaaatctttgcataggcagcggtggagacacgcttggctgcctatcctacagccgttctttccctcttacatttttccagagcctgtattttgttcaggcatcatattccccaggggaagagggccccttccagcctcaaacttgattaatcatacattattcattgcacctgattccaattccttgccagtaattggcttaggaataggctgtggggcaaatcgggcagaacagatctgagaagtattctgggaaagtttttcttgcacctaacaagggattgagaagggatctcccccccttctgttccctggtctttgttccatgagaagacatgatgcctcgggtggctgttccttagcgtggccatgaggatggcagagcaggatagagaaaggctagatccttgatgaggttgagctgccgactggacccacttgggaacctccctacttgaggcttatgatgtaaggtgacagatgtgattgcgcttagttgtgtttgcttgtttcatccgaaagcatccagttagagcatcttgccaggtgctctgtgaccagcttttactttccttaatagcaaaggaattcctaatcctaaatgctgtaaagtctgtgtgttactcacttattgaattttgtgttattcccaaggaggacagggatgatgcctgtcttattcactgcagtatgtattcccagtgcttggcgttctaagcagctatagagtaggttttcagtaaatatttgttgaatgattgaagaatttaagatatttggtcatctccttttgagtgagcaaagattaatgcctacgctttctacccaaaagaattaaaagcaagtgttcaaaccaaaacttgtacatgagtattcatagcagcactattcacaatagccaaaagacagaaacaaataatatacatgtcacccgatgaatggataaataaaatgtggtacaaa

SEQ ID NO: 588463 - DNA, 4001 bp, Homo sapiens
agagaaggagggaggaagagaagttgattaatgggtacaaatatacagttagatagaaggaataagttctagtgttcaatagtacataagtgaaactatagttaaaaataatttattgtgtattttaaaatagctagaaaagaactgaaatgtttccaacacaaaggaaagataaatgtttgagatgatggctatcccatttatcctgatctgatccttatacattgtataagtgtatcaaaatatcaaaattttatatccccaaaatatgtacaactatgaacataaataaaacaggccaggctcggtggctcacatctgtaatcccagcacttggagtggccaaggcggggggattgctggaggccaggagctcaagaccagcctgggcaacatgccgaccctaggcatggtgccacgcacctgtagtcccagctactcaggagggtgaagtgggaggatcgcctgagcccaggagttggaggctgcagtgagctgtgatcgcacaactgcactccagactgggcgacagagtgggagaccctgtctcaaaacaaaaaacaatggctcatatctataatcccagcactttggaagaccgaagcaggaggattgcttgagcccaggaattttgagaccagcctgggcaacatggttagctactgtctctaaaataataatactttaaaaaaatagaggccgggcacggtggctcacgcctgtaatcccagcactttgggaggccgaggcaggtggatcatgagctcaggagatcgagaccatcctggccaacatggtgaaaccccgtctctactaaagatacaaaaattggttgggcgtggtggcaagtgcctgtaatcccagctactcgggaggctgaggcaggagaatcgcttgaaccagggagttggagggtgcagtgagccgagatcgtgccactgcactccagcctggcaacagagggagactccatatgaaagaaaagaattcctcttggcctacagtgggaatgattaaatagagatactggctaaagttgataaaacagaagtggaaaaagtagggaaggggcttttactttccatacttttcttaaaagggtatttgtttttaatacccttctccgttgttttatgctaactccaacatgccttactaattaaaaaattaaaaattataaaattaaacaaccaccttcaaaggctcccttgagtccaaaaggtgttttgtacatatggttcccatgctcttccactaccacccgccatccctcccactacttcacagaccacccctccaccacataggcagagttaagctgctcctccagtcttgcactctccccatctgcagacttttgcactcccctacagagcgcttccggcactcttgcattatttactgtctgtctctgcccctaggctggcagcaactgggagtaggaactttggagccaatgcctggcacagagtaactgctcaaccaattctgattaatcaacctccggggtctacaaaagggggagtcccccggcgtcccccggttcaggctccctcgccccgccggccccggcctccttacactccgaggtgcgtgtgcgacacgatctttccgcaggcaatggttgccgggcctggctcgaagccgagcgcctgcagatacatccagagatgctccttctcgaaagcggtgaccgaggccgagctcatcctcgcggtaggcacggtggctgcaaagaaagaaagcgcaagcccaggggactcggagggccctcaagatccctccctacggtcagcctgaggtcgcggtggtccttccattgccaacgcctgctcctttcacgcccagagcgatttcgcctcaaagggcctcacaacctccgggaaattgagtttctaacggtatagtgcggccaccactgcctcagcgaagccaccacaaaccgagactcccgcccttaaggaagagcagtgtgcgccggcgccgccaggcgtccgagggaggagggacttccggcaaagactatatctcccgccatgcaatgcgtccttctctcctcccttccggccatgcccagccaagaaactgcaagacccaccgggcattgcgcggccagcgacttgctctgcgcttgcttaaccgctgtcgtgcccagatcctcgggccttcgggtttctgattcttggttagtggggtccatttgcttgtgtatcctagttgttacgtcacaaaaaagccataaatggagcactatgcctcggtgtagagttaaagcattggttccatcctccgctatgctcactgtgactctaatcaagtcacgtaatctctgagcctcatttctgtcgttagcgaaatctatgtcctcaaatgccggatgttccttttcctgctttaaatgaaatctggctctatactcccctgcagtcctgcagtcttttttttttttttttttttttttgagacggggtttcgctcttgttgctcaagttggggtgcagtgacgcgatttcggctcactgcaacctccgcctcccgggttcaagcgattctcctgcctcagcctcccgagtagctgggattaacaggtgtccgccaccacgcccggctaatttttttgtatttttaatggagacggggtttcaccatgttggctggctggtctcgaactcctgacctcaggttatctgccggtcttggcctcccaaagtgctgggattacaggcgtgagccactgcgcctggccgcctgcagtcctcttaattttttttttttttttttttttttttttgagacggagtctagctctgtctcccaggctggagtgcagtggcgcaatctcggctcactgcaagctccgcctcccaggttcacgccattctcctgcctcagcctcccgagtagctgggactacaggctcccaccaccacgccgggctaattttttgtatttttagtagagacggggtttcaccctgttagccaggatggtctcgatctcctgacctcgtgatccgccctcctcggcctcccgaagtgctgggattataggcgtgagccaccgcacccggcccgtcgtcttaattgacagctgttgcctaccacaaaccccactgacaacagggcctggaagtggattgggtaacctgcttttaagtctcattgctacctctggcaatgattgtctcctgcctcactaaaatcaccttaataaaagagagagaggcggggcacagtggctcacgcctataatcccagcactttgggaggccaaggtgggcggatcacctgaggtggggagttcgagaccagcctgaccaacatgtagaaaccccgtctctactaaaaatacaaaattagccgggcgtggtagcgcatgcctgtaatcccagctcagctactcgggaggctgaggcagaagaatcgcttgaacccgggaggcagacgttgcagtgagccaagatccttccactgcattccagcctgggcgacaaagtgagactctgtctcaaaaaaaaaaaaaaaaaagaggagagagagagagagaaagaaagaaaagccactaagttgcccaggctgggctcgaactcctgggctcaagcgacctgcccaccttgacctcccaaggaatgagccaccgtgcccagcctaaaagcaccttttgaagtttatgctatcacccatagcttttcattatggaggtcatctgtaagatctctgactccattctggtggtgcacgcctgtggtccagctgctcagaaggctgaggtgggaaaatcacgtgggccctgggaggctgaggctgcagtaaactgtgattgcacgactgcacttcagcctagtgacagagcaagacccttctcaaagcaaaagaacagccacaaaaaaaaaatctctgactcctgtcgacaaaaagagtcaaagtctgtaaaattgttgccggaaaaaacagagtcctgatccagacccaaagagaaggttcttggatctcgtgcaggaa

SEQ ID NO: 588464 - DNA, 4001 bp, Homo sapiens
gcgatgggggctacagcctgagcatcctggacacccgccaggtggaaggtctgcaggaccacatccagccaccactggcgggaggttaggccgtggctcaggccgtagttggggaagctgtggctctgagccctgtatgcctgcctgaagccttgttccagggctgagggctccacctccagcccatgggcccgggccttggtggcataggcctcccctaaggggtggcggagcctgagcagcgtgtccttcacatcccacgtcagcagtcgtatctgcagccggtgtgccatggaggaggccaagtccaccccagttctgcctcaggtcccacggtgggtcccaggggaagctgagctggataagaccacctctgcgcaacctaacaatcacctctttccaggccttgtgggtcagatttgctggctaacatgaagcacttgggaaatgtcttcacagcacaagatcctagaatgaaaaatagcaggtaaggtggaagctcaggccctgacatcagacagactgggttcaaattctggtgctgccaatggtgtgaccctaggaaagtcactctgaatccacaacaaatttctgagcacctttttgagctagctgctagcatatgggatagatttccagcccttagggcatttacaggcactgaagaacagggatacggatattaggcaaagaactatacaaacacttaaatataatgaagtcaatagataccgtaaggatctaaatccagggaccgcatctagtctgtgtagttagggaatgtcataagcaagtgaagtttctttttatttattttttttaatttttttgtgagacagggtctctctctgtctcccaggctggagtgcatggctcattgcagcctcgatctcccaggctcagtcaatcctcctgctttagcctccctagtagctggggctacaggcacgtgccaccatgcccggctaatttttgaactttttgtagagatgtggggtggtggggcggggtgggtctcactatgttgcccaggctgctctccaacccctggactcaagtgatcccccagccttggccacccaaagtactgggattacaggcatgagccatcactcccagccctgcaagtcaagtttcaatggagatcagaagaatgaatgtgcaagaagcagaggtaggtgagtgctcccgtcagtggaaatagcaagtgcaaaggccctgaggcagggcaagtagacagaggccagctgtctggcacacaggacacaattattatgattgctattatcattattagggatgtcaaagacagaaggggccttgcagagcatatgaacgatatcttggctgctgggcagagtagactgagccagaaaggggcaggtacttacccaaggtcacagtgagtcagtggcacagccaggaccagaacccaaacttccagactctctggccagttcttccactgtaccatgagatatatttggattttaaaaattggtgaacctgtacagcacaggagaaaagacaggacacagcaggctgtctgtctctagccctctctgaaccccaacttttccatctttactggaggtaataacactggcctaggaggagagctgatgagagaactgactcaaggcacaagaaacaagtgactcagcctgctatccagaggctggtgcagcttctttccccagacagagctgatcccagacaaggccgtccccttgaaacctgaggggccagagttcaaagtacggctaagttgatacttagggaagggcgtcactggtaaatctgggggagccttggaggaagtttgtccaggaaatgaattaaggagactcatccaaagatcctctcattttgcaggtgggtagacagagacccagtgaggggcagtaatttacccccaaatcacacagggagtcacattggcacagctaagactagagcagagggctctggctcctgacccacggcttttttttttttttttttttttttttgaggcggagtttcgttcttgttgcccaggctgaagtgcaatggcgcgatctcggctcactgcaacctccgcctcccaggttcaagcgattctcctgcctcagcctcccaagtagctgggattacaggcatgcgccaccatccccggctccttttttttttgtatttttagtagagacggggtttctccatgttggccaggctggtctcgaactcccgacctcagcctcccaaagtgttaggattacaggcgtgagccactatacccggccggctttttttctttttttttttttttgagacagagtctcactctgtcacccaggtgtacagtggtgcgatctcggctcactgcaacttccgcctcccggattcaagcgattctccttccttagcctccagagtagctgggactacaggcgcgcgccaccacacctggctaatttttgtatttttagtggagacggggtttcaactatgttagccaggctggtctcgaactcccgaactcgtgatcctcccccgccccaccccgccccccggcctcccaaagtgctgggattacggtaaaggcgtgagccaccgcgcccggcagggctttttcgatttctaaaaccgcgggtttggggctctgcgctgcaggcacgaactgctcaccttttctccccacctccagggctcgggaaaggcgaagtccaggagcccggacctgacgcagaatgtctatagctgccgtcggcagcgtgagctggggcggcggtcctaggggccttggccgcggccgaccccttgggtccccttctcagctgtagggcgtccacggctccgggccggttcctgggcccaggacccacctgactcacaaggaagcagattgaaaacgcagccgcaaggcccgcgagctcgggcggaggtgcgcaagcgccgggcggtggggcggggatcgcgcgggccgcccctccctaccatcccgacccgcctctgtccccgccccgtccccgcccttatccccctcaccttcgccctctcccgccccatctcccgtcgccctcgccgtcccctctccctccttcgtctcactgtgcacctctctgcgcccctgtcacccgccttcactgcgcgcctccgttaccctgcaccatctacgccccttattccctccccgcaccctctgaggttccccagcccgcacccttccgctccgcagcccccgttaccagcaccttctccgccctgtctgcgcaccccctgcccgccacaccgccgctcctcaccgctgtctccgctccccatccccaaccccggctcctggcctcctttggatcgggaaacccccgagaagtacccaggttgagtgggaggaggggagttgggacccagcctggcttgcttagtgttgtgtgaacctgggcaaggcccagcccctctctggtctcagggtccccagttggtattggagggaattgctttcagttggaaacttgttaaatccaagataacttggtgagggtagagtccgctgcagtaacctgcttttttattctttctctttttttttttttgagacggagtctccctctgtcgctcaggctggagtgcagtggcgcgatagcccactgcaacccccgcctcccagtttcttgcgattctcctgcctcagactccccagtagctgggattacaggtgtgtgccaccacacccaactaatttttgtatttttagtagagacagggtttcgccgtgttggcctggctagtcttgaactcctgacctcaggtgatccgcccacctcagcctcccaaagtgctgggattacaggcatgagccaccgcacctggcctctttttgtttttaagaaccctgtggtaccatcctggctaacacggtgaaaccctgtctctgctaaaaatacaaaaaattagccgggcatggtggcaggtgcctgtagtcccagctactcgggaggctgaggcaggagaatggcatgaac

SEQ ID NO: 588465 - DNA, 4001 bp, Homo sapiens
gagagatgagagccctggtacactttggtttgtcatgccatagtcagagagccatactgtgaagaccatattatatgaaagcatacactgaaaagaatgaggggtacagggctctatcattttcctggctgggtaacttggggaaaatcacttaattctttctgatcctcagtttcttcccttgtaaaatagagaaaggtaatacctcatggggattctgtgaggataaaagagatcatgggagctttttataaaatgaaaaacacggcagatataagtcccatcaacccggacagtgttgatagtgatattagagtgttctaatgatgcacctgggcaatttcctaaaatacatttgggtggaaaagtcatggaagggaacacaatggacacttgtttttcttagcattccttccttgctgacatactttttcaaagcttttaaatacttttcaaagactggatcaagctttgctttcctaagtggagaaggagaaggacagtttcttgttcccctctctctcagtctgttgatgcatgataaatgacttctgtctgctaaaacagatgctgctgtacacatatagataacatgttctataacttagaatggctgtagcctgcctttcaatctagtttgtcccaaagtccctcctctggaatcctcccacaaatgctccttctgttagagtatagacaaacatctctgaataaacactgatgagtggtcatttatctggggaagagcaattctggtcccaccttgagcctcccccttatccctgtcctttcatttctgaacttcttgaactagtaatatattctcagtgtctccttttccccctacaccatttcattgctttgcatatgtaatctagctttttctttcactcattctctcataaatcatcaatgatttcctaatggccaaatccagtggtccattctcagttcttcttttttgacctctctgcagcttataattcctctgagtactcctatcctccatgaaatttgctccacttttggcctctctgatggtgtggagcctctctgatggtgtggtgttctcacctctctctcccttctcctcctccttgctcacaggcttctctttcactcccctaggtatgggaggtgttttccaagagtccctgatccttttgagttaatactcttacccaaagacagttgatccaactatatacttttagctactacctctttgcagatgtcttctaaataaatatgtctgagttctaagatcacatttccaagtgtttcttggttatcacttattagctggatgtcccactgcacctcaaacttagcataactaaaagcaaatatatgttcccccctaaaactaggctccctgtgctttatttctgttagaatagtagtaccatgcctggccatctagttcttagccttcagaagtctctttgactctgcctcttcactttgtctctcacattcagctagatacagttctgccagttctttcttcccagtgtcccacatgctcattccatcttttcctgtcctataccaccatcccagagaggggcctcaacttctcattggaagcattggaaaagctccctaagtggctatctgctttcatctgccctcaccctcccaagtccatcctgcacaaacatccagaatattcctgctacagctggctctgaaccagtcacttccatgtttagaatcctgtaaagcctcagtattgcctgcagaataaagactaaatttcccagtctggcatttaagtctaacttcccaatgttctttcccattactttcctggaactacccaatgtttccattaaatagtaccacttgccttccctgttttgccgtgaatctttctaacacccacagtacctatcttcataacttctggttgttcagtcttctgtcatatgtctgccgatccagatagtgagtgccttaatcacaaagcctttgatgatgatgatgatgacaacgatgacaatgatatgatgagactttagtcactctacaaactcataatgggtagctgacactttatatgcagtatctcatttcatttttccaactaatagtatccccatttcactgataacaaaaccatggtttaaagaggttatatccctagatcacataaactcatgagtggcagaattagggctcaaaactaaggctgtccgactgtaaagtttagggatttaaccattctgttctattccctttaattgcctagatgtggtctctcctttctgagctataaccatgcttgattttagcctcttttgtagtgaatgttacataacttttttgcacatctttatatatatatatatatatatatatatatacatcttaccatacatatatatacatatatatatatatatatacatcttaccatacatatatatacatatatatataaatactttaagttctagggtacatgtgcacaacgtgcaggtttgttacataggtatacatgtgatatgttggtttgcttcacccattaactcgtcatttacattgggtatttctcctaatgctatccctccccctgccccccacccccagacaggccccagtgtgtgatgttcccctccttgtgtccaagtgttctcattgttcaattcccacctatgagtgagaacatgcagtgtctggttttctgtccttgtgatagtgtgctcagaatgatggtttccagcttcatccacttccctgcaaaggacgtgaactcatccttttttatggctgcatagtattccatggcatatatgtgccacattttcttaatccaatctatcattgatggacatttcagttggttcgaagtctctgctatggtgaatagtactgcaataaacatatgtgtgcatgtttctttatagttgcatgatttataatcctttgggtatatacccagtaatgggatcactgggtcaaatggtatttttagttctagatccttgaggaatcaccacactgtcttccacaatcgaactaatttacattcccaccaacagtgtaaaagcattcctatttctccacatcctctctagcatctgttgtttcctgactttttaatgatcgccattctaactggtgtgagatggtatctcactgtggttttgatttgcatttctctgatgaccagtgatgatgagcattttttcatgtgtctgttggctgcataaatgtcttcttttgagaagtgtctgttcatatcctttgcccactttttgatggggttgtttgtttttttcttgaaaatttgtttaagttctttgtagattctggatattagccctttgtcagatgggtagactgcaaaaattttctcccattctgtaggttccctgttcactctgatggtagttgtgctgtgcagaagctctttagtttgattagattgcatttgtctattttggcttttgttgccattgcttttggtgttttagttatgaagtccttgcccatgcctatctcctgaatggtattgcctaggttttcttctaggttttctatggtttcagatctaacatttaagtctttaatccatcttgaattaatttttgtataagatgtaaggaagggatccagtttcagctttctacatatggctatccagtttttccaacaccatttattaaatagggaatcctttccccatttcttgtttttgtcaggtttgtcaaagatcagatggttgtagatgtgtggtgttatttctgaggcctctgttctgttccattggtctatatctctgttttggtaccagtaccatgctgttttggctactgtagccttgtggtatagtttgaagtcaggtagcgtgatatctccagctttgttctttttgcttaggattgtcttggcaatgcgggctcttttttggttccatatgaactttaaagtagtttttttccaattctgtgaagaaagtcattggtagcttgatggggatggcattgaatcta

SEQ ID NO: 588466 - DNA, 4001 bp, Homo sapiens
tcatttatccttgtatctccagagaaagcctggaagcagacattcagcaaatgtttttgaatgaaaaggtcagagacctactcctacatagtatttgtacataagtgtgctaccaacctattaatttcttcaaagtaattttatatattgtacaaataatgaaaaaagtagccatattttgctgtctttaacatgataacttgttttcattttattcctcacttctatccagtctttatattacacaaagttgtaagaatagcataccacaattttaatctttttattaagctagcgttatattagaactattttccatgacgtagtcttcataatgataattttaatgacaatgtgatacatagtctagttgatgtactctcatttacccaatcattcctcttggattgagcatttagattgttgctagttatctttgccttgtatatcaaattataataagcatattcattgcatatagcttttctttggtattttttccttagaacggtgttttttcaagttctttggaaaattaagggtttgatcaaaaaagtttctgctgctgtctaaggttgagaaaaattgatgagtctttgatgcagagcttcctagagcctgtgaagtgatacaaatccacactgggacctctaaagaatagagcatgccccttgaaccatggtgcctcttgttcttgggataagggttcttaataggaaaaattatatctttatttttaccaacctctaattaaaattgacagttccttcaattatgaatgtagataacaaaccacagtagttttggcagtatatgacttttttttcaacttttattttaagttcaggggttcatgtgcaggatatgcaggtttgttacataggtatacatgtgccatggtggtttgctgtgcagatcatcccatcacctaggtattaagcccagcatctattatctattcttcctgatgctctccctccccctcagcatatgacttggtccctataaagaaatcacatatttttttatcacattatagttgttgcagataccttaaaatatcacctactggctatgacttatttgacttgatactattattagacccaccactggatattgtaatctataaataatcatatatattactatataataattttttattttgatatttgtatcttaatgtaattattccctttctagtcttatatatttaattttatgcctttaaaaattttattcaaagaaggagtctctgggttcatcagaatgccaaagagatccatgtagcaaaaaaaatttaaaacaatgtcttaaggtatctcaaggcctaagtttccacaaaacattttgagaaatgttgctttaggatagatccaaggactgagattagtgagtcaaaagaataagcagtattatagctctcaccacttattgccagatctctttccaaacgttagaccaaatttgtgctgccatagaaatgtatgaatccacttgttttaccacagccatcgaatgaaattattggatgaactagtctcattagctttcatttatttcctttttttttttttttggccagatccattgaaaagagaaaattatcataccccgaattcttctcaacagccaccagctcttaaggtatttttcattacctggagaatggttctcttcttgatgagggtcaggtgtctgatggtgcttcaaatgagattggtcctttcccaaatccatcttgctgcaataccttcctgctattttggtctgacttccacaagcagcctagatgcttttttaaaatatcaaaaacatctaacacttaaaaaaaaaaaccacacacacaagtttgcctgtcacttgacttcccgcctaaaagttttatctggttggaccacaactgcaggctaattctactatctttatcacactgcacaggtgtgagtaggggaaatggctggtgctagcaacccctagcataggttgctatttatacagggaaactctctgaccacagcctggcatggcacagcctctagtcagcactcttttggttctatctgccaggaagtgtctggatccgatgttcctttttacagatggaggtagcctagtgtagaaagaacacaatctaggccccaaccagctcagtggcccagggcaagtcacctcccttttctatgactctctgcatttgcaaaatgggtaaataattcctgtcttgcctacttcatacggttcttgtgaaagtgaaaataatagatataaaagtttctagaaagtgtgatatatattaatcttacatggtttcctgtatgtagcttttttcaccttaatctgttgcaaaataatgtacagttttgctgtgtatgctgttagacttagttaagaaatagacataaagaaccaaattagaatttcacagcaattttgtaccctttttggctcaccaaatcattcgcaagtgactcaagataactagtgaaatccattgttactcatataggggaaggtgaaaaattacttcttaatgaaaatatcaccacattatatcccagaaattaagttgaaataatcaaaggaaccatcctatctccaagcagtaaccccatttgtgaagacaaggagccacagactactatggttcaactaaagaagaaaccctgagcacctcctgatacaggaagccagtctgggagatgcaggattaatatatgtgttctggattcagattgaattgaagtgagtttgaattccagtgttgacattccctaattcagtgacctgaggcaggttagatagccttggagtcaatttacctatctataacatggggacaatattggtatctacctcagaaagttactgggatgattaagtccagtaatccatatgaggcattttatgtgtgcctagcatattgaacttggtcagtaaatgttagctaccaataaaaatacagtaaccagattttggtaaagcaagtcatagtttaaatgcactaaagagagaatctgaagaggattctttataaagaaagacctttgtaatgtgaatagatacccactacttccatggagtcttaaggcattagaactggaagagcccaaaatcatctagtccctgcctattttgtatacaaagaaactgagaaccgaggaggagagttacctatacttagtattttattacttattgccagcagcatctcttacagattaggagatgggtcatcattttgtgtgcttgatctttcctgggtataaaaatgtgtgtatcatgtaaatatattagagaaacaagctgtcaaacacactaaagggtatcgagaatgatataacaaacacccaagtatctgccactaaaatttaacttggtttttaattactaaaccctaatatttagctttacctctctcagttccccagtccttctcttaagtaaatctctgtatctaaaagttcaggtaacttcagggagcccctgctcaaaggaatcctgcacggaacagcaggcattatttgcttgaaaattttggattttcagatatggggtttaaataactcaaactaactttaaaaattacaaaatagtgtttttttaaatattggtccctttagttgatatgttttaattcttattagttaggttgtttcttacattaggatagtttaataaaataacattatagaatccctctgggacaccttcagtggatgcagaggtacttcttgaataaaattgtccttactaagagcttgtaacacccagttcaacaattcagcaaattttacttaatgccccctcttgtgctgtagagacggatggtgcagttcctgagccctgtgccctgtaggctcatagaggagaaagtgtgtacatctgtattgcaaggaaataatagattctttatatcctgctacaacctacctaagtcaattccacccctgccccatgttccctgtatctagaagcagagtgtggagggactgtaa

SEQ ID NO: 588467 - DNA, 4001 bp, Homo sapiens
ttcaacctgccaatttatttttttattctgtaagccataaggagccaatgaaaaaaattaaggacagcagtaatgatcatctttacatgctagaacacactactcagccacgtgcaaggtggactgacgctggggtgagcaagggtcttgaaagagatagtcaaagtctgggtcaaaaatgctgaggaaattctgagcataagaatgcataggagaggataaaaacctaaaatctgtatctaataaacttagctagactttctgattgttttaagtatgggaagggatgaaggaagctacctcgcaggttactagctgggccactggttagtaattactgtccatcaattcatgagacaggaggaggaactggtgctttagttttgtgtagcaagcaggaagaggacaagtctacttaacgcgaatcaaaatgagagcaagcaattatacagaatttctctccctcgacaaaataagcttctcatattacagagatcttaactttgaaatgcttttcaaaatagggagtcacttgggctgggaggggacttcaactaagtcctcattttacagaggaggcactgaggggcaaggctgtttcaataccctgtccagagtgcgcactgttcaggcaaaaccaggactaaaaaccagctctgccggatccgttctacctactgctccttctgcttcagctgccctcccaacctactaatagggatttacatccccaaatacgttcatgtaaacacttagcattcttcaactaaacacaaaatcagatatgtaagctaaaaatctaaagccaaaaacatgtatttaatttccataaaatttctacttttctttggaaaaactttcccattgtgtcagtttctattcactgtaacattctctatatttcaggtcctaagaccaaaaaaaaaaaatcctttttaaacttaggccttgaagaaacgacaaaccctctaggcttaatattgcaccatatgaaaccactgacacagacaaggcctgttctgccgaaaccaggccagttaagtcagggctcaattgcttctgtatcattgtcagaagccatctcgacctcaagcaaaagtaaaactggagaaagaggccagcctaacttgctcctcggctggtccccagcaacgcccctggaaactctgctccccatcgctaggaccgcccctccgacgccgggagaacacggaaggagcagcaaggcgctgcccggcatctgccgccaacttccccgtcgacggtctgattcaaatgctccctacctgttttccatgtagacttggagagaaactgcgccaggaaaactgttatcaactgttacagggacggagaactccgaaataaccaaattactacttatattcactgtcccatgtctagcgccttttgaaacaataaccaaatcctgtaaagttttgtctgcgatgagcagtcactaggaaaaacctgtattcgtgatgaattcgcctccccccccagaaaaggaccgactttccaagagccgaagcccctgcccggagcggcgggctcgcgggccctgggtgcgaccccacccagcctccccgggattcaggcagccgggccccgcgcccgcgctcacccaggtgctccccgcggcctgcgcgcccgcgcgcttctccggcatggctcccgcctcgggctccgacgccgccttctcctccagctccggcggcggctccacgctcatgccgcggccatgcccgcgccagcccggggcgctccgggacgacggcgacgccgcggaggcggcggcggtgcccgcgccctcatgggctctgcggcccgcggcggcctgcgggtcaggcggcggcgccagcggcggcgccgagggctgaggaggcggcggaggctgaagctgcggatcaggctagcagaagaccgcagctccaggaaccgaccacttatcaaaccgcaccgaccccgactctcgcagttaccggcggcgtcaggggcgggctgcacggttaagagactgtgccccgccccgcctccccacaggccggcgccgggcaggaggccccgccccgcacctcagctcccgcctcgagaacgagtcccgcgcctgagtagcctccagcgacgccacgcccacttcagagacccctcctttacctcgcgactggccccttggcatcaggacttcgcggcgcgcgggaagtacgtcatttcgagagcccgtacgactgatttctttttccggagaatctggactgaggctagcaagcggggaggggcaaactcgtgggggtttggtagtgattgcagttcagttttggtcttggtttgcgccaacccgccaacctctcaagtttttctatggttctctaagaagaaaataatatactagcaatgtttcccaaacgtacttgaacacaacactttttattcttgacacatgattaatatcttgtagaatgtgtaggacgcagttggaaaagcctggcttatgtttatttattttgaaagatatgcacctaatactgaaatataaaaaagcctacaggcctggagcggtggcccacacctataatcccagcactttgggaggccgaggcggctggttcacctgaggtcaggagttagagaccagcctggccaacgcggtgaaaccctgtctctactaaaaaacaaaaacaaaaacaaaaaacaccaaaaaaattagccgggcttggtggcgcacgcctgtaatccaagctactcgggaggctgaggcaggagaatagcttgaacctgggagccggaggttgcagtgagccgagatagcgtcactgcactccatcctgggcgacagagtgaggctctgtctcacaaaaaaaaaaaaaaaatctttttacaaacatcaatagaaaaaagaataaaattatttctattaacaggattagtaattttaattgaattaaagtcatttcatttaagaattttttcaggttgggcgtggtggctcacgcctgtaatcccaggactttggcaggcagaggtgggcggatcgcctgaggtcaagagttccagaccagcctggccaacatggtgaaaccccgtctctactaaaaatacagaagttagccgggcatggtggcggatgcctgtaatcccagctacttgggaggctgagggaagagaatcgcttgaacccaggaggcggaggttgcagtgagccgagatggtgcactgcactccaccctgggtgacaagagtgagacttcgtctccaaaaaaaaaaaaaaaaaaagcctctttttcgcttcccacccactacccccaaacacacacacacacactttgcagaagtctttacttttatttatttatttatttatttgagacagagtcttgctctgtcacccaggctacagtcacccagcctagatcagtggcgtgatctaggttcactgcaacctctacctcccgcattcaagcgactctcctgcctgagcctgccgagtagctgggattacaggtgcgcgtcaccatgcccggctaatttttgtatttttagtagagacggggtttcaccatgttggctgggctggtcttgaactactgacttcaagtgatccgcccccctcggctcaccgagccggcctggtcttttttctttttttttttttttttttgagacgaaatttcgcttttgtcgcccagcctagatcagtggctcgatctcggctcactgcaacctgtgcctcctgggttcaagcaattctcctgcctcagactctcgagtagctgggattacaggtgcatgccacgacctggctatcttctgtatgtttagtagagacaagttcaccatgttggccaggctgttctcgaattcctgatctcaggtgatccacccgcctcgacctcccatagtgctgggattacaggcgtgagcgactacacccagcctgatttgtctacttttctgaatgattgttttaacaaatagttttcaaaacacagagggaatatatg

SEQ ID NO: 588468 - DNA, 4001 bp, Homo sapiens
tggcaggttcaacctggaggccactggagctgccggcccccaagtacatgaatgtgcagatgatacacagattgtgcacccagcttcccatcgttgatcactgaaattgagcttggggttagggagtcaggatcatggcagaggtcgaagaatgaagatcatattgagaagtaggaatgagaattcataggtgagggaccaagggccaaaagtcactcaccaagtcggtatccatctcccaggccctcagcctttgctgtctgcttggccacaaggagtaggtgtcctagaagctatagagagagcggagggacataggtggcttcattcatagggagcaagacctctagctgggtccaggggctcctcccagccaaaccctggccctgttcttcccacctgctggtcttcttcttcagcctggctaatccgaggaatgggcttcttaggaatgaccaggaagtgcacaggagcctgaggggccacatcacggaacacaagacactgggggaagtgacaggccagaggccacgttacttcaacaggttggatggtatctacaacattcctaaggggataggtcctaagagcaccccacctgctggtcctcatagagaatgtcagctgggaggctcttgtccaggatccgggagaagatggttggggctgctcccccaggagttgcctgctgggccttggccacttcattcccatcagtcacacctgcagctcctcggacctgaaggtggatcgaccatattcaaaggagggagctggcagaagctgggctctgatagttgttaatttcgtccttctaataacctattcatcgttcccacccaggaggaaagttcctgaatttcagagcaccagcagcaaagggtagggccagaaggtgctggacctggttagataacaggcggtattattatcaggattcagcagtgcaattgattcctgctcatgtgtccacgaaatatagcactgtttagggaaaggatctagaatgagagactggggattttggtctcagttcctaccttaccataccactgaattacctcagataaattccttctctcagcttctaatataaaataaagggatggtttccataatctcttgcgatggcttgaatctctttccactctcaccttgttagtacatttccacttatttccgttacttgttttctgatctttaagccttgtcgcctgttttatttaagttttaatgcaatcgccctgtttgacactagttgacccctcatctgggtgtcacatgtgactctgtgaattttaactcttgtcccttgaatgagtggaggtaagagttcagctaagtgacctctgctcccctagccccagggaacttcgggtaagggattcagagaaggctgatgtcattgcatcacgttgggggagaacgggacggaatgaattctctgacctccgagccgcttctggcaagtgcagaagagaggttaacactagtgctcattaggaggccagaagcctgaggagggcagagcactggctccaagaagagaaagctcatttcctgcagggggcatcgggccagctgggctgcaggcagtggaaagaaggcggcagccgctgcactgaccctgtcccgacctcggcgccccggcctgcgcagggcgggaatcagcaccagctcgttctccggagccaccagttcgacctcaccacacagccccggagcttgtgcctcggaggggcagaggccacaggcaggagctctgcgcggctctgcgcgccttcgggaccccctggccccggatggcttcggagcccgcaggaccccctactcgctcccgcgccacttctcacctgccccccgcgcacccccgtggccgccacggctctgcgcgccgcgcgcaacccagcagccagcaccacggctgccgccatcttccctgagccgcgggaacctctcacccgggtcagcactcggctccgcggccggccgtgggtggggactccgggcgcggggaagcggggtagtggcggccgggcgagccctgctaccccattggagcgcgcctctgagcacgattcaccccattgcctctgcagccactttggaggcgggctcttttcatctcattggctgcttctaccaacgcgaggacaattttccattccattggtttcgtcttctagtccgtgtgaacgttcttttcccattggatccccttactagtttctctgtgagagaaacttccactccattggaaggattaatggagcctggaggtgggattttctcctagttgaatctgatacacaactctggcttctaggttgcggctcccgagtgggtggttcttttcgttcttggttcgtcctcttcaggtctggttcctattggtgcgcggggagaagggggcggggctccgccacctgctgcagaaagggctgttttagaccctctcaccgctttggccaggaggagggcggggctctgagggcatccggcgcttattggctccaagaaccacccggggtggggctaaaggtgaacggggatgaggtgtgtttttttgtgtttgtttgtttgttttaactggcggggctgatgcgcagcattttctccacaagggcagtttcagtcccttgagcattttggagattttaatgtacttatctaagggaaattcttccttaattctatgttcttgttaacgcattcactccatagattaaaaagtctgtggtttttgcattttttttttttgagcaggaggagataagagtgtcctatatttgccgcacaagaattataataagcaaaggagtatgtattcattgttcttttctaatcggaaaaggtgtgtgatacagttagctcggtgcctggtgttttctttttttttctttttttcttttttctttttttttttttttgagacggagtctcgctctgtcgcccaggctggagtgcagtggcgcgatctcggctcactgcaagctccgcctcccgagttcacgccattctcctgcctcagcctcccgagtagctgggactacaggcacccgccaccacgcccggctaattttttgtatttttattagagacggggtttcaccgtgttagccaggatggtctcgatctcctgacctcgtgatcctcctgcctcggcctcccaaggtgctgggattacaggtatgaggcaccaataagtcaggtttgcactgctggaatatatatttttgacataagaaacgtggggtcacaaaatactaatattctcagacgctaggtaagttttagtctgatatcacataggacaagttaccactgtttctttggtttttctttttttcttttttttttttttaaacacatgacctgatacatataggtggtcagtaattgttgaatgaataacatttggtgtttcctgtctttttttcataatatgtaatatgtattgcatatgatactaacccatgtgtaatcaatttttcatatttttacagtctacgtaaatatagtttgtattggctgcttattatttccttcaatgagtttatcatagtaatcctaactctattgttgactattagttgaattagttttaggtgaatggttatcatggggcatataaccactgttggggaactttgcttctagagatataacaatctcttttgtatagctatattattgttagaaaatcctttctcctctaaagggcagacatttgattctgtgattttccccagggatcctagcagtccagattgcattccttcccttggaggaacagatggcccccctaattgtgaggaaatgtagaatggcctcttctctgggccccagaggctgcagttctctgtggtgcctctgggacactgggagaccctagagttgccctggagaagggcgagagataagtggatctgggatctaggaagaggaaggaagccagtctggaggataggtggatacaaagcactttgaaattagttatt

SEQ ID NO: 588469 - DNA, 4001 bp, Homo sapiens
tgtgttccagcttaagtgccagaacacacttcacagcccacctcctcacaacccccagcttggttgccccctgactccaagatagaagctgtccatctgatgttcctagaaatctttgtctagagccttggcttctgagctttgagctgcaaaaccctgtggtgcccagaactcctggaagcagaggggcctccaagcccctagaccacaaactcagcctgaagcctacgtagaactatgtcttcccactgttttgtccattttctaagaacctgtaatggtattgtgattaataaatgcaaatccctctgcaaggacttgctggctcatacagccaatggccaccgtctatttcttcagcacaagaacactctgcagtacaatttagcaaggaatctgtgcgtgtgtgtgtgtgtgtgtgtgtgtgtgtgtgtgtgtgtgtgttttatttgggggggttgtttgtttgtttgtttgttgctttataaagctatccttgacagaggggtgaatgatagagagatgtgataaagcaaaatatgactcagaggctctcggtgggcataggcggttccatgtatgtttctccccattttactgtaagtttgaaattttccattaaaaaacgctggggaggctgggtgcagtggctcatgcttgtaatttcagcactttgggaggcctaagtgggaggatcactgaggccaggagtttgagactagcctgggcaatacagagagactccatgtctataaaaaatttaaaaatcagccaggcatggtggcgtatgcttgtagtcccagctacttgggaggctgaagcaggagggtcacctgagcccaggagttcgaggctgcagcgagctgtgatcacgccactgcactccagcctgggtgacagagccagaccttgtctcaaaaaaaaaaagaagtgtggaaagcagtcctgctcctcgccgctgggaacctgcagctcactcagcaaccgctgtccctgggactctctacagtggagcgcccagggaccctttcaagggcgcccctaacactgagctgcaaggcagggggttaaaggggaagcagaggtgcagcgtgcagggaagaaggagttagggcggaactcagctgtgagaacacagcaggtggaggccacggggccagcacacgagaggcgctgccctttccccagggaagacaggcgaggggacaagaccagcaagggtgagtccgctccccactgcagggtccgtggtggaccccatttcgtctcaaggcctgcctctgggagccattccggtctccaagcctccgctgggagcgaattctaagaattggccaaaggaaaagccctgcaaaggctcgtagcgtcccaagtcctcgagaggaatgcctcatttcaacatctcagcaagtctgggaggccatcctcaccatttcataggtggggccggtaaggcgcgggaaggtgaggtcacttgctgaagtctcacaacggcgcgggagagcagggagagcaggttccttgagcgagggaatgttccaggggggtgggagggaagggacagctgcaaggactgcccaggtggccagggtacccgcagcgcggatatgccgagaaggcgcgcccgccaagccgcggcgcagcccacgacgtccaggtgcgttcggggccaactgagggggtcaggcaggtgagagcacctcgaagggggcgcccggcgggcgggggtgcgggggcgctacctgggtcgtggaagggcaccagcgcgtagttggcgatggcctggctgcggcggctcagactgcgttccagaatgcgcgaggcgccatcgatcacctgcatcagttcgtcccacatggagccggtgacgtcgaagacgaaggccagggtggcgtcccccgtggtggggggcattaccgtcccgggcgccccggccactgccactgccactgccgcagagaccgcggtcagcagccgcaggagcggcgccccgggcatcatgccgagcgcggctctggctgcgggtgctgcggtggaggcgcaggtcggagctagccggccgccccggtgcacacggcggctgcaggcagtgccttgctccgtcgggccgcggccagtgcgcgagggataggggcgcgcggcgggtccgcctgctgggcgcccgaggcgggtcctagagcccaccccgttcagggtcacggcccgcctcctcccctcccccaatcgtgactcaaactttcccagccccactgttcgcccgtccagatccgaggttaggggaggacgcggggcggaaggcagaaaggagctggggccccggccagggcagcgagggatggggacgcgcaggatgcagtggacacctgcgcctcccgccgatggcgcgccgggggcgggagagagggagggggaggcgcaacggccccagtctccctccagccccaactccccccacccctgcctggccaaagcggaccctggcttctgcagctccctccacccagtgctgcgacaaatccccccacccccgccccccaacacacacacaaactttgccattcgttttccttctgccaggtgggctctgtgcttcccggttattgcaagcactactgctattataatcaacaagaagtcttgttgttaaccatgttctaagcattttcagttatttgcttgaagactggctgcaaccctagaatgaaatactaaccctaagcccattttacagaggagcaaactgaggctcagagaggtgaaggcatttgctccaggtcactcaattatcaaacaatgaagacaagatcagaggccagatctagaaagactccaaaggcccagggctctgctgcctcccttgtgttaaaagacattgtcacacggtcacctggtgactccagaggatgagggctatcctcctgcccatccacctccccagccccatgggctgcatgtgtggatgctgcatcccacgtgaggtgctgcctgggactgggttcagcctcctgctccgggcagatccagatgggctcaggcacggctgcttatctcaggctgtgctctcgggacctgtttccaggcctctctccccgctggcctataagccccttgagggcacggctaggccttggtctacactggatgagcccctagttcccagcccatatccaagcacatggtggggaggcactaatgttgtctgaataaataaaccgcagcttttgtggaaatgccgggttttgagtcatgtgcgagaaggtagctaatcccctcaatccctcctccgagaacaccatgctcccagagacatggctgagggctctaggtctgtgagtgatggggggcgctttcttgagcccctgtccctgcagagtcgtcagccaggaagccacccctccgccacgctcttcctttcctcttcggtctcagctcagaccccacctctgaggctgcttctgaacccttgccctgcaacccacatttctctgagccctgtcctggctctgaccacaccgtacagcccatgtcatgtctggggccctgcctctcccactctggctgtgagttctatggcagagatcctgtgcccggcacatgctaggtgcccaaggaaggtgtgccacctgaatggggcagcaggcatcagagaagcttggcagctgggcattggccacagcgggaggtagcacacatccgcagggactctgttctagcccagagctggggtccgagggaaatggtctcccacggagctaccagtctcgtggaatatagtgccaccaggtgcccagacccagcaagggagtggaacttgcagccaagttcacaggaagttgagtcacctgcacttcttaatgctggctctttaaatctccctgggctaagtctgtgataacccccagagtctgggcagggctgggccagctgttggagaaagaggtcccagctgtgggaaggcaaaagccaacaggagccaggaaccaggcaggactcataaatgg

SEQ ID NO: 588470 - DNA, 4001 bp, Homo sapiens
agaacaataacttttagccactggattaagtcccaccacagcaatgaattgttttatacggcacattcccaaaaccctgaaaagataaatgtcatccacaaagcatacatttatgaaaagttacaatgcatcttattcactgggaaaactaattttatattaaaacttccaattgctttcctatttctttcgactcatgcttgaagcgatcttatgtgacatctctaaagtttacaaatacaacggcaattgcgaacacatccaacaaccagaacaatctaccggagggataaatccaaaaatctaatataggaccagacccaaactaccacaataccagtctattattaatcagcgaaacaaatggagcccttgaaaactaacagtcactagcggattattttaaattaggcttaagggagtacaacacaacaatcatgcctgtaacacgaaaactaaagtgtctacgtgccaaaacggtcgataggactacaaacagcctttttaagcttccctcttgtcgggactaggagttgacaagcggcctctactagaaggttggctagacagcaaagagccaacaagcgaggcacatttatgcctcccattctcccataccgttggtcgacttattgctctcctaacgacaactgaaacgacatccttccggcccagcacgcaatttctgaggtgtggtgggagaagagttggataagaaagtttaagcaaaaacagcagggcttatctgtaagaataacgttgccgcttgccgttcacccttcgggtcctgcagtcactagtccccaggcctcaaaaatccgctaagtatgtgctccactggccgagcgccaacgcgccctcccctccccgcctcccggcaccgagatcaaaaacagccgggtaacaggacgggaaaaagcgaaagtcgacagcagaagcaccgcacctctcctcacccggatccgacaggaaatggcggcccgcgtaatggcgactacgtgctactaggcggagccgagcgccgaccccctcccccacccaccacgcggtcccgaggtctcatcccccgcatcctccccccactgcccgagacaaagccatcgaggcagccctgaccgttccatccccgccgctccagctccgaccccgggccgggagacccaaggtgaggcggggctcacacaaagagagcggcggcgcgaccttctccccgcaccggcctcctttcctccacgaggtccctagttcccagtgccacatagctccagctcatcctagaggcacatgcctcacgaatccccaagtctctaggaccacaacgcggactgcggatacacgctcagggaaatggcggaggtgggggaggggacaccgggcaacgttcccactcggagaagcggccaaacaccaaagcggctcccaggacgcctccctcaagcggaaaaactgggctccgaccctcacctccacgagccgctcccccaacccggctcctcaccgcgcgagactgccgtccctccgctgccgcgccgcctcagccggtcggagctagacagaaaacgagcgcaggctcccctcccccgccttctcgcgtcctccccgccgtcgcgccctattggctgccagggcttcagcgatggtgcgagggcgaagcgattggcccgaggccacgtcaatcaaggcgacggaggaggcgacaaccccgcctcccgccagcgcctcccttcgggctgggaggccactaagggctcgagaaaacccgggcttgggaaaagtaaacgcagcctttcagggagccccaacccttacccgaatcagcaatacccaagctccaataactccaattacctataggccgcgaacaagtgggacacaggcaagacgtcgaggtcggtgcagcagagaaacagaggataatggcgtctgcagtgctgtcgcctggagcgccctcctcctttctcgttcgcgcactcactagctggggggaggggcggctagggggcgaacctctcgcgagatctaacaactgcctagttcacgcgcacagggagggggcggggaaggggcgttttccagccccgaaggagtcctttggggttggaggaggggcgcgagcgcgcggcaaatcgggcgggaagaggtaaaaaaggaactgggagcgcgccgcggcggttcctgtccttacagttgcgctgcccagggaccgatgttgcgcgaggaaaatgcgggacgcccaggtcggtgctcggcccagacttatgcccgtgttttcacagcccacactcgtgcccgaagccccttaccccgccccgggctgtggtctgtgggctgtgggacgagctgcggcgcggtaagtgcgggccgtctgcgtccgctgggccgggcccacgcttcggaaacccgttgtttgtaatggtccggggcgcccgtcagtcaaggccgggcccgggggcgcagctggcggttctcggcctgccttgcgccggggcgggagccggggaaacgcggggcgagcctgggagtactggagaacttctcgccgagagggcacaggcggtttcacagggctctcggttctgagactttcctcttgggtaatgggacctgagatggaagtattttgtagtgtcgtcgctgtagtttattccgataaaatttttaggcaatatgtattgcccttgtctcctaaaatgaatgcgtatcgctgaatacgttgcagacctccacgttccattcaaagcgcctgccttgtggcagtgatgaaaacagacaaaaacccttgccctcaaacgtgctcctgttctagcgggttcagcgcacacttgcattgtattcggttccttacttttaaggctcctgtgccaagctttcatgacttcctttgttaaggcacataaggtcactttcaatcggtgacagccctgggaaatctccagccctggtagtacccgctttccacatccttactcgtcaaccttccagcctccgcccacaatcccaaactcattttgaagcataaaggtgtcataatctgcacataaagcgaaatccaccattggccgaatacatgcatatattttagtgttgatgaatttgtgctgattcattcctgttataatgtttccttcttgggtaatttgcaaaacatatataccagcattcttttaaatggccatgattgcatccacccagcatcttttacttgactgattagaggaaaactcttgttagggcgcactgaggatttcatgacaaacaccagtatttacattctgggaggatacgttaacacatgctgttagaacataatgtccgggattgtggaatttataaaagttctctttaagtgataatataattttttaaatggtccccaccatgaagagtgtatagtcttgttgggtaggtaaaacttaactcgcatttcagttctaaaacacaaagttcagaattttattaaatattcaaaactgatgagtttatgtaggggcttaggatacttggattatagagatttaatccgccagttagtatttgcaacatttaattgagtttgtcatttaaaacctgagacatgtcactgacactaatatgcacaaatagcggtacggtaatgatgatgctgtgctttctttcaaattaggatttatgttgcagtcatcattttcttgataaggaatgatgagtgggaatcacaagtaagcagccctatataagaacctcttccggccgggcacggtggctcacgcctgtaatcccagcactttgggaggccgaggcgggcggaccacaaggtcaggagatcgagaccatcctggctaacattgtgaaaccccgtctctactaaaaagacaaaaaaaaaaattagccgggtgtggttgcaggagcctgtagtcccagctactcaggaggccgaggcaggagaatggcgtgaacccggaaggctgatcttgcagtgagccgagatcgcgccactgcactccagcctgggcgacagagcg

SEQ ID NO: 588471 - DNA, 4001 bp, Homo sapiens
gcacaccaatctgtggaaaaataaagcagctagtacatttggcttattggaaagcaagctgtaaaaaaaaaaaaaaaaaaaagacattgcttctagaacgtaccagttattatatatccttgcagagcagaactgaagcgttctgggtcggaccaacaactgacaccccagtgctgcagtagcctataagaaccaacacaaatcagttttgcttttgtttattcttattactgaatatttgtttccgatcacagtgaatactgatttgaacccaaaaaaccagctgtttctaaaacttgattcttcattttagggtttcacaattcaaatgactgcctaaaaaatacaaaattcaagggagcctggtttcattttttgctaagttagaacaataacttttagccactggattaagtcccaccacagcaatgaattgttttatacggcacattcccaaaaccctgaaaagataaatgtcatccacaaagcatacatttatgaaaagttacaatgcatcttattcactgggaaaactaattttatattaaaacttccaattgctttcctatttctttcgactcatgcttgaagcgatcttatgtgacatctctaaagtttacaaatacaacggcaattgcgaacacatccaacaaccagaacaatctaccggagggataaatccaaaaatctaatataggaccagacccaaactaccacaataccagtctattattaatcagcgaaacaaatggagcccttgaaaactaacagtcactagcggattattttaaattaggcttaagggagtacaacacaacaatcatgcctgtaacacgaaaactaaagtgtctacgtgccaaaacggtcgataggactacaaacagcctttttaagcttccctcttgtcgggactaggagttgacaagcggcctctactagaaggttggctagacagcaaagagccaacaagcgaggcacatttatgcctcccattctcccataccgttggtcgacttattgctctcctaacgacaactgaaacgacatccttccggcccagcacgcaatttctgaggtgtggtgggagaagagttggataagaaagtttaagcaaaaacagcagggcttatctgtaagaataacgttgccgcttgccgttcacccttcgggtcctgcagtcactagtccccaggcctcaaaaatccgctaagtatgtgctccactggccgagcgccaacgcgccctcccctccccgcctcccggcaccgagatcaaaaacagccgggtaacaggacgggaaaaagcgaaagtcgacagcagaagcaccgcacctctcctcacccggatccgacaggaaatggcggcccgcgtaatggcgactacgtgctactaggcggagccgagcgccgaccccctcccccacccaccacgcggtcccgaggtctcatcccccgcatcctccccccactgcccgagacaaagccatcgaggcagccctgaccgttccatccccgccgctccagctccgaccccgggccgggagacccaaggtgaggcggggctcacacaaagagagcggcggcgcgaccttctccccgcaccggcctcctttcctccacgaggtccctagttcccagtgccacatagctccagctcatcctagaggcacatgcctcacgaatccccaagtctctaggaccacaacgcggactgcggatacacgctcagggaaatggcggaggtgggggaggggacaccgggcaacgttcccactcggagaagcggccaaacaccaaagcggctcccaggacgcctccctcaagcggaaaaactgggctccgaccctcacctccacgagccgctcccccaacccggctcctcaccgcgcgagactgccgtccctccgctgccgcgccgcctcagccggtcggagctagacagaaaacgagcgcaggctcccctcccccgccttctcgcgtcctccccgccgtcgcgccctattggctgccagggcttcagcgatggtgcgagggcgaagcgattggcccgaggccacgtcaatcaaggcgacggaggaggcgacaaccccgcctcccgccagcgcctcccttcgggctgggaggccactaagggctcgagaaaacccgggcttgggaaaagtaaacgcagcctttcagggagccccaacccttacccgaatcagcaatacccaagctccaataactccaattacctataggccgcgaacaagtgggacacaggcaagacgtcgaggtcggtgcagcagagaaacagaggataatggcgtctgcagtgctgtcgcctggagcgccctcctcctttctcgttcgcgcactcactagctggggggaggggcggctagggggcgaacctctcgcgagatctaacaactgcctagttcacgcgcacagggagggggcggggaaggggcgttttccagccccgaaggagtcctttggggttggaggaggggcgcgagcgcgcggcaaatcgggcgggaagaggtaaaaaaggaactgggagcgcgccgcggcggttcctgtccttacagttgcgctgcccagggaccgatgttgcgcgaggaaaatgcgggacgcccaggtcggtgctcggcccagacttatgcccgtgttttcacagcccacactcgtgcccgaagccccttaccccgccccgggctgtggtctgtgggctgtgggacgagctgcggcgcggtaagtgcgggccgtctgcgtccgctgggccgggcccacgcttcggaaacccgttgtttgtaatggtccggggcgcccgtcagtcaaggccgggcccgggggcgcagctggcggttctcggcctgccttgcgccggggcgggagccggggaaacgcggggcgagcctgggagtactggagaacttctcgccgagagggcacaggcggtttcacagggctctcggttctgagactttcctcttgggtaatgggacctgagatggaagtattttgtagtgtcgtcgctgtagtttattccgataaaatttttaggcaatatgtattgcccttgtctcctaaaatgaatgcgtatcgctgaatacgttgcagacctccacgttccattcaaagcgcctgccttgtggcagtgatgaaaacagacaaaaacccttgccctcaaacgtgctcctgttctagcgggttcagcgcacacttgcattgtattcggttccttacttttaaggctcctgtgccaagctttcatgacttcctttgttaaggcacataaggtcactttcaatcggtgacagccctgggaaatctccagccctggtagtacccgctttccacatccttactcgtcaaccttccagcctccgcccacaatcccaaactcattttgaagcataaaggtgtcataatctgcacataaagcgaaatccaccattggccgaatacatgcatatattttagtgttgatgaatttgtgctgattcattcctgttataatgtttccttcttgggtaatttgcaaaacatatataccagcattcttttaaatggccatgattgcatccacccagcatcttttacttgactgattagaggaaaactcttgttagggcgcactgaggatttcatgacaaacaccagtatttacattctgggaggatacgttaacacatgctgttagaacataatgtccgggattgtggaatttataaaagttctctttaagtgataatataattttttaaatggtccccaccatgaagagtgtatagtcttgttgggtaggtaaaacttaactcgcatttcagttctaaaacacaaagttcagaattttattaaatattcaaaactgatgagtttatgtaggggcttaggatacttggattatagagatttaatccgccagttagtatttgcaacatttaattgagtttgtcatttaaaacctgagacatgtcactgacactaatatgcacaaatagcggtacggtaatg

SEQ ID NO: 588472 - DNA, 4001 bp, Homo sapiens
gggctaggcagggcatgggaatggagaagggggtggatttgaaggacactgcagagaaaatcgacactgcacggcagcctagggtcaactttcccaacccagaaacctcaggtgggagaaatcagtgtgaatttgcctccctctctctctcactccctcctcctgcagccctcacagagaatccactgggaaatagaaaggaaagaggacattctattccagtgagtcaccaggtccctgagtctctggcctgctctccagcccctccccactgcctctcctggcccccagtccttgtcttcccccaattcccacctcagctcacaggcacaggctgaaggcctcagagccaggcttccttcctcgctgtggatcccactagctgttcacagagcatattccaacgagcctccaggcttcggcacgtgggcatctctgttatccaccccattgcagagaagaggaaagtgagaccccagcattctcccaaggccatccaacaccctgcaccccagcaccacagcctccactttaaagaactccactcgctgcctcccagccctcccaccacacacaggcaccagctggggcaggatggctgaaaacgcaaggcttggagaagaaaccctgatccaattaccaaggaaactggattcaaggcagcctgtggatggggcttcctcgagtttcagagctcagtctgccctggacatgggctgaaaaaagtacaggggcagagccctggggagccaggctcgcagcggctccaaccttcctctccccgaggactgtcccgcggaaggccagagccctgctggtgcacacaggacctgctgtgggcagggttttgtgcaaaccctgaatcctccctcagagctcagacagagcccacccaattcttcccactccacaaccagcccctaagaaccagacagaagccgcctgctccagccacacgcttcccatcagagagggaggtcccagggcaatgaggacacaggccaggcagctccctccctcccactatgctgcaatcaagagcctcttcacaaaagcttcttagtggtttttattttcttggactaaggcaccgatgaattgactgtgcagcctcacactgccttctccaaaccaaaaggacattctcagggcctctcccagtgccctgcccgccagaggcctgcagcagcctgatgaggaggtcaagacgggcacttcacatccacttgtgtgctggctctgccaagacacgcttgtcatttctggggctcactgggagtcactgtcacaagacgggctgtccagccccgaaagagcacccttgctctccactccccaaacccttcagcactgcagacccagtgttcctccattctctgctgccatagtacactggggcatgccatgcaaatgcagctggagcaagccccagtctattgttcccctcgttcaccccagagatgcatccttccacatggaaacatggggtccacttgtcctgggaacagatgggagggcaggggcagctgctgtccacaggcaccggcgacagcagcctcagcgagcgtggcggggatggtggcggtgggggtggtggtggtggtggaggtggtgaggggtgtggcgggggtggtggtggtggtggaggcccacattcggcacatgagatacgtggccaggatgacggtgatggtgaaagattcccaggtggccccgccgccggaagggccaaggctgggcccggcggactcggtttccccctgcagctgtacggttcctctccacgtcacagtcctgccgtccgtggaaaaggcaggtggccagcagcagcagcagcagcaggaccgccacagcagcacctgtgatccatcccacgagggctgtgctccccaggaggcccagcatctgggagccggacagtccctctctgcccagcagctcctcactcctttctccccttcagcagcctccgctcagccctctcagtcactgaactttgttgtctctgctgcgggctggagagcagccagggaatgtgggcgaagcctgtttggacttgcaactgctggccaagggtgaggccaggccgctgttaactctgaggaggcctggcagggaggccaggtggagacagaggagctgtcaggctggatctggttgagggaggagccctgagtctagaggaaagaaaccctcctgctgcctggctcagtgaccttccctctccgcacttcagtctcctctcgtagagactgtgtagaacagagatgaacaacacgggctttggagccacgccactcacttgctctgagattgtgcacaagttacttaacctctctgtcctgtttcctcttctgtaaaatggctgataacggttccttcctcagtagggtgttccgaggactaaaggagttgagatgcgtaaagcagcaacaccagctcccgtcatgtttgcaactgatattactgcaatggactccatggctcaggagacactgacatctgagagtctgtgattccctgtcctgcagcctgcagagccctccggggctgagtcaggctctgtcagatgagccatcccgagctcaatgagcttgagaagctcagggaggcaccacaggcagattttgccatccagggaggtcctccatccggcctgttctgggaggcaggagggtctgggtgtcctcccaagcttgctgggaggcaagaaggaggccactgagctcagagagggcaggcacagcccagcctcctggttcccagttcaacagtctcaactggccataaatggcatgctccttgctctgtcacaccctccctgcccagcagtgatgagtgccattcctgcctagtggagcatttacagagcggcaggatctgagcagtactgactgtccctccaagcccacccgccaggcccaaatcccctctgttcctcctgggaggcaccgtcccatcctgctgacagacctcagcaacaggtgctcactctctctctgggcaaccctttctgctgtgggcatgctgggctgttctccaagctcttcctcacatgcagtggggctccccaaagccccagctctgtgtctggctctgcagggtccctccaggctgagtccccagcccctccctccaggctcatctccctaccgcctggaggaatgtctgcagacaccgcaaggctggttctctgagttctggcagcacctccaccctgtgatgttgggcaaaccccttgccctgatccagcctgtctcctctgcagaactcccggagcaagaggtgacctccagggacccttccccctctgacctcagtctgaggtgagttctcttagggaggcctcaaacccttaatgaaaaccctcaccagatgaaaaggctaaacattcccttcaaccaaactgggctcagggggcagcaggtctaatgaatcctggcacttctttggcccttgggggagctacttgaacttttaatgatgctggagtaagaactcctcctgcagactcctggggccctgggagcccggctgccttccctagggaagttaaggagggaagtctgttgtgaggaggaggaggaggaaggcaaacaggggattttcgtcctcagaacttctccaggaagactcccaccccacaccagccgctggcggcggggcaggaccttacaactatgaacttgaagaacttcagtcagctcaaacggccccttggaatcacccagactcagccttcactgacagatggagaaactgaagccagagaagggaaacacttgcctaagttctcccagcctcgtgcgctaatctatacagcaggtactcaacagagcaccatccctgcagtgagggagccgtccagagtgacagcctgagatcagcagggccttccacagagacagcgggaagatgaggtggagatgtgaataaacctggagggcgcaggggttgggagtgccccctcacacatacacatacacacgacatctgtttcc

SEQ ID NO: 588473 - DNA, 4001 bp, Homo sapiens
caagctgctgagcaagttcaagcaagttcactcctgacagcataataccccaagaggacacacacacacacacacacacacacacacacacacacacacacgcacacagcaaatataagacgcagaagtcaaaaatccatttgtcatcccaaacaatttctcacacggtaatttttttaatttccattgctaagtttttaaggttgccaggtttagcaaataaggatacagaatgcccacttaaatttgaaattaaggtaaattatgaattgtttaatgcatgtctcatgccatatgtgagttatactaaaaaagtattcctttttttctgaaatttaaatttaactgggtatcctgtattttatctggcagccctataagcatattagaatctttcctattttgcctagataatatctctaaagtcacttaatcatttttgtcattggattctttgtgtgtgtgtgtgtgtgtgtgtgtgtgtgtccaaatttgaaatataaggccctgcaaagactttagcatttcagatattcaaggagatgctgaaaccatggcctcatgctcttcaccttaacttcagtcatagggctgaagttctgcatgggcgttccagtagataaatcccatggggaggcagcattaattgacaccagccagacccagattccattccataccatcctgaaaacatggctccatagagttatgcgttgccttgattttgtaacaccttcatttcttaaaaacacttggatcctttttttaatacaatgagttaaaattatttagatttcaaaatttggaaacaccttttagtaaagtgaaagcaccctgggctttttgtaaatttagagatgaggatgcagaaatttctgcattatttattatttgtattagcaggaaactcccaaaagaagaaaactcatctaatggggttgagaggataagtgcttagcaagggctgggtagccttctgccctagtgttcccctaatgccctacagcttgtgttgcagaccattctaatttcactcacacttttctaatccccccaattaaaattacccaaaggaattacttctttgctctcaaagagaaaaaaatgcaatatcccttttgagacataaataataataagcaggggctgggtgcggtggctcacgcctgtcatcccagccgttggggaggccgagtcgggtgaatcacaaggtcaagagtttgagaccagcctagccaacagggtgaaaccctgtctctactaaaaatacaaaacgttggctgggtgcggtggctcacgcctgtaatctcagcactttgagaggctaaagtgggcaaatcatgaggtcaggagttcgagaccagcctggccaacatgggggaaccctgtctctactaaaatacaaaaaattagccagccgtagtagtgtgtgcctgtaatcccagctacttgggaggccgaggcaggagaattgcttgaacccaggaggcagaggttgcagtgagcagagatcgcactactgcactccagcccgggcaacagagtgagactctgtctcaaaaaaaaaaaaaaaacaccattagccaggtgtggtgacaggcgcctataatcccagctacttgggaggctgaggcaggagaattgcttaaacccgggaagcggaggttgcagtgagccaagatcgcgccattgcactccagcctgggtgacagagcaagtgtctgtctcaaaaataataataatagtaacaagcaggaacaacagcagcaaaaaaacatgagatggaacactcccttacctgcccactgtcccattgaccgcaagaaagactttggcaaaactttccagtagttcagtaaaacacatctggagaatctcacgcacttcgccaggcaggccaggcacaccagcagccctgtgaggatgaagaactgttccaggacgtcccccatggctgcactcaacagactgtttcagccctggccgtggctctctgtgtatgcctcctgggaccacgctgctctggagacctccagatcttcttccaggagtcactggacgtgttccatcaagtcaggggcatctagattaaagtaacttctttacataatcctctgactcacaggcctttgaataaggcttttgttactgtggaggagctggtgaaaaagtaaaaggtggacatgaagggaaaaaaacaaagcctggacaaatataaaatggcagcccacagttctctccctgaatttgggaaagttaaaaaggatgcagaatccaaggcaattattcatacatttagcactatgtattgactgcctaccaggtggagtcccctcttgaaggcattaggaagttaatagtgaccacagagggtctctctggtttggagcttagattctggtagcagggacagatgatgagcagataaataagataacatcagatggggcagtggctcacgcccataatcccaacattttgggaagccaaggcaggcgggtcacatgaagtcaagagttcaagaccagcctggccaacatggtgaaacctcatctctacttaaaatacaaaaattagccaggcctggtggtgggcacctgtaatcccagctacttgggaggctgaggcaggagaatcacttgaacttgggaggcggaggttgcagtgagccaagatcacgccattgcactccagcctgggtgacagagtgagattctgtctcaaaaaaaaaaaaaagataacatcagtgctatgaaaaagcactattgaatgatgtgtttgagtagctactcagggaatgcttcagagagggtgttcaggaaggaattccatgaagaggtggcatttttagttgaaatttgaatgaaaaggagccagctccgcaaagatgagtttccccctccaggctaatggaacggctagtacaatgcctgaagtgagaaaaatccacgtatttgaggaataagaactaggacaggacaggcatggtggctcacgcctgtaatcccagcactttgggaggccgaggcaggcggatcacaaggtcaggagattgagacctactaaaaatacaataattagctgggtgtggtggagcatgcctgtaatcttaactacttcggaggctgaggcaggagaatcgcttgaacctgggaggtggaagttgcagtgagctgagattgtgccactgcactccagtctgggcgacagagcaagactccatctcaaaaaaaaaaaaaacactaggacaacacagcagagggactggccacagagagtaagggaggaaaaggccagagcaggagggaggagccatgccctacgggtgagtgtggactttcagagcaaccagaagccattgcacagatttaggaaacagagttctatactctgaattatgcttttaaaaggccactggatgctgagggaagatgtccttctgggggtgggatggagggtgggtgtgacaactgaagcaagggcagccaggatactgaagtcatccctgcagaggccacaggatcagtccttggccttctctcatttctgcctgtgctcactctcagctcactctgtgctgcaatcaacagccttgcgctcaccctagaagcagaattgctggccagaacatagattcatacgtctttatgctagatattgtcagatttgccttcattttgcattcacgccaacaacacgtgagcatgttcgttttcccactgccttagcagtaaagcatgttgtcaagctttgggacttttgccacccagtaggtaagaagtagcatccaatgttgttttaagtttaaattatcttatcagccaggttggagagattttcttaagcctaagagctattttcactgttttctttgtgaattttctctctcctgcccgtttttctatgtggtttttggtctttcccttctctgtatttagagatggtttcaggactctgattagtcagaaattcgacctgctcactctgtccttcatggtcat

SEQ ID NO: 588474 - DNA, 4001 bp, Homo sapiens
acatatacacttatatatgtgcaaatagataaatacaagtataattatggaagcaaaaaaagagtatccaaaaaactggaaacagtctagtatccaacaatagggaacaggttaaataaacaaaggtatattcatatacaggttgagcaaaccaaatctgaaaatctgaaatccgaacacgtctggaaccaagcattttggataatggatactcaagctgttacagaatattatgcaaccattaaaaaggaggaggggccaggcgcagtggcttacgcctgtaatcccagcactttgggaggccgaggcagacggatcacgaggtcatgagattgagaccatcctggctaacatggtgaaaccccgtctgtactaaaaatacaaaaaaatcaacagggcgtggtggcacgcgcctgaagtcccagctactcgggaggctgaggcaggagaattgcgggaggcggaggctgcagtgagccgagatcatgccactgcactccagactggaagacagagcgagactccatctcaaaagaaaaaaaaaggaggcggaagatctgccatgtactaaaaatgtatgtccctgggcacagcggtgcatgcctgtaatcctaaatactccagaggctaagaagggaggaacatcagcctgggagttcaaggctacaggccagtctgggcaacatgggagaccccgtctttaaaaaaaacaaagaaagaatgtcccaagacataccaactaaaagtagcaagaccaagaatagagtctgctgctatttttaagaaagggtatgtgtgtgtgtgtgtgtgtgtgtgtgtgtatccggatgtatacaaattatgttcatacatgcacgaaatagaaacgtaagtaactggggaactagattttagggatggggagactcactttttaccctatactctttgaactgttttaagtctttggctatatgcctgcatgtttcaggcaaattacaaaatctgacaacacgtcactcaactcaagatacccagaccttacataaaccagaaagtagaatggtggttgccaatgtacgagcggaggtggggaagaggagttgtttcatggatagagtttcagcttgcagatgaaaaaagttctggagattgactgcacaacgatatgaatctacttaacactactgaagtgtacacttaaaaaacggttaagatggcagattttgtacgtattttaacacaattttttaaggtgaaaaaaaaatcccccaaagatacccatgttttaagatcggtttagtttctaatttggaaatcattttttaaacactccattattactctagaattgagcgtcaggaacaagtgaaaactctttaaactctggagctgctcctgcgacctttcacctagaactcacacgcattcggccaggcacgcactcctgctaaactcagggagggccggcactgggggcggcgtggtgactccccctcggccctttacccgtggaaaaggtttctacactgctgccatcctgtaatacaaaagtttgtgttccttttcacacgttaccgcagattctcggtgcacagtgcccagcgcggaccagagctcagagcgtgcccaggcagtatccttgacctcccacagccgggccggccagcccgggcgatccgcggcggccccaccgagacgcgcccttcgcccgacagggtctctccccgcgccgcccctacccccttacccggtgttgggtaacatgactttcgtagatcagaggaggtggcggcgacagcggcggcggcgagcagagagctaaagctggaccgtccctccgcatttatccccgcccctgccccgcccctgccccccccgatgcctgtgcgggaactgcgcgcggaaaagccgggatcgccgagtgcgcctgcgtatgcagtgggcctcctgcgcccagcgttcctcttcgtcgcctcccaagcctggtccctgattgcaggctctccgcgcaggcgctttgaggcacagctccgccccgccccctcactggtcgtacggtgacaatcaggctcctgtcggcgcctagcgtctgggcagcgtcagccgctacgtccaccttttccctgtctctaggggtttctcctcgcgccgctgtgttccagcgccggctccgagctgggagggtgactgagccctgagcttgggccctccgagaggtgcgttagctctgggtcttcttgcccctacgcccgagcctggcgttctctcggccccctcttaggaacgctagccctgggcagaaattgcctttgtggctgaagtcggccagcgtcgcgtttccactctcccgccgaatctggacccaagccagccttcccttgtgcatcggtagatagcttgtgttaaggcgccagcttcttggaacagagctctctgcaaaagtcgcgctgaagaattcatagtcaaaagctgaacttgcagaagtttctacttctggaatgagtgttgaaatgagatcaattctgacattcagtttcgcttttgggattatgccttggactaactcagctactctgatgagctaaagactgtagtatatttgaaggaagacacgaggaactgttttgtattttgtagggatagaacaggaccttgaggagattattatatgaagactagttaaagaaactagcctggagatggcttatgtactctctcctttgtttttgttttgttttttgagacggagtctcgctgtcgcccacgctgaagtgcagtggcgcggatctcggctcattgtaacctccgcctcccgggttcaagtgattctcctccctcagcctccggagtagctgggactacaggcatgcatcaccacgcctggctaatttttttgtgtttttagtagagacggggtttcgccatgttgggctggctggtctcgagctcctgacctcaaatgattggcccgcctcggccttccaaagtgctgggattacaggcgtgagcctccgcgcccggcctctctcccctttgttatgggccctaaatgactctatttcctcctgcatatcacctgcccgactcctgtaggcatttgaattgatgattcatgatacggtctttagaggctccagaggaatttgcaaattattatcatccactaagtgattgctgattacctgagatacagcagctcaaaaaggacaaggtctctgcctatgggaggtatgagtagccagtgtgttctttagactgttgttaagcattaggtgttttaagaagagtgttgatagagactgttagatgaaaataacttactctcctctcatccttaggagcacttgctgaagcgtgtatatatctgtcgaatagagtgaattcttagtaacggggtgacatttccttcatatcatctaaaatgttctctcctttttgaaagccacaatatcttcagtctgttagagcctcctttcttgaatttgtgtgcttctatttccatttgttacggaaagagagctcaacgaagaggcaaagcaaacaaaaaacctttgccaatttttcagtcataacgatattttgtgagcctaaatacctgtacttacactatttttatactttgcgatggctttcacagaaggcaaatatattcctaaattattagaggtagttttaccaagcaagtttaaatccattgtattcagtactttgactagagttcatttaaagtgtgatttggagttacccatgaccttctaccccattaccttgattaacctagtgttagattaatgctagaggtgaggaatgggtgaaggagaggacttgtgaacataattagatcttcattttggaaggtgaataattttggcttagaacacttctgactgcagcatgaagaatagtttgtgagtagataaaggcacagaagccatttaaaagcccatagtaatgtaatgtgtaagaaaagtagtaacctgaactaaggcagtaatagtagaaatgaaaagacatactca

SEQ ID NO: 588475 - DNA, 4001 bp, Homo sapiens
caaatatgccgtatccctgaatttcatacttacggctcgttgatgatcctcataacatttaggccagcaatagttccagcgtctttggttgcttggcgttgggcatcattaaaataggctggtacagtaacaactgcatgggtaacctaaaaggataaaagataattaagtgtattgtcacatagtttaacccttatttaaattacagtctggccaggcggtggcttctgcctataatcccagcactttgggaggctgaggcaggaggatcacctgagggcaggatttcaagaccagcctgggcaatgtggagaaaccctgtctctactgaaaattaaaaaaaaaaaaaaaaattagccaggtgtggtggtgtgcctgtagttccagttacttgggaggctgaggcaggagagctgcttgaacccgggaggcagaggttgcagtgagctgagatcgtgccactgcagtccagcctgggcaacagagcaagactccatctcaaaaaaaaaaaattacagtcaaaccatcactttagtttttaagccaacttattgatgaatacaacatataaaattttatgtccctggaattgtaagcattaaataatacatgaaaagtctattttgtttggcttatagtaagggactcaataattaaacctgacaagcatgaataccattctgattaaaatttttgaaacccttcacgaaggcttctatacataacagccaaccgagaatactaatgatcaaaaaatacttaacattgttctagaaatatttaccttctttcccaaataagcctcagcggtttctttcattttagtgagaaccatggcagaaatttcttcaggagcaaatgtctttgtttgcccacctccaatatcaacttgaatgtatggtttagttttcttttcaaccacctattttaaagaattattgttttcagacacagatacaatgacatctcaaagtttaaaagacccactaccatccccacaatttggtttattttggtcccttggggctgcaaattgactagaaatacttcagggagtataggtgtcttacaaagttcagttttaatcggtcttttattcctaaactatcgtagacagtacgacagcaactgtcttaagttttgtaacatactaatagtattaaagttattacatacatcatgtctataaccttcaactgttgtctcaacacttttccagagacttataactctaaatactcccaccacccacccgttctctaactggatgagaaaaacccggtcgaaccttgaacggcaagaacttgatgtcctgctgcacagacgggtcattccacgtgcggccgatgagccgcttggcgtcaaagaccgtgttctcggggttggaggtgagctggttcttggcggcatcgccaatcagacgttccccttcaggagtgaaggcgacataggacggcgtgatgcggttgccctgatcgttggcgatgatctccacgcggccgttcttgaacacgccgacgctggcagaaaaacccgacagagggacatcagcaccgcacttctcacgccaggccaggcggccacgccccgtccccctgcatccgcaaccccacttaccaggagtaggtggtccccaggtcgatgccgaccaccgtgcccacgtcctccttcttgtcctcctcctcggcccgcgccgcgctgagcagcagcagcatcgcggccaccagggagagcttcatcttgccagccagttgggcagcagcaggcagtccagccacaggccgtagcacaggagcacagcgcaatttccgacttgcaggcggcaggggcccggggtcacaaggcgccacgaaccaggcgaagggcaggtctagaaatacaggccgcggcgcttccctctcacactcgcgaaacaccccaataggtcaatctgtctgtgctgtcttggccggcgtcgacctcaccgtcgcctactcggcttatataccctcccccagccccgtcgtggaggccgccgattggtgaaggccctgctcgttggaggccgttcattggcccaggccaccaagctggccgccgccgattcgaagcggccccctccgcaataaacgtcactgctccgccccccccagctgattcattggctgctattcgtttctaacgttcaccaatggtagataacatccgccccatccgctggtcccattggttcagcagctgtctatctctcctgcgacttctgaccccgaggcatttccgctggtaaccgcacaagtcccgccttcactcccggccctagggggtcggagtaggtccagcaggagtgaccccccggggctgtgggatctgaaactttttcttctctactgcttgttctcccttcctccatccctcaccccgaagcgggaagcagctttctcttcccagcttccatccagtctctgagtagaccagtcgcagcttagatgctgggatcgcctcagaacacatttctttgcccttcacggccactaccggtattggggtatgcgagtctcagggccgttcgttgctcacaggtcgagctggtctggactctgttcgaccacgaatcatgactccttcctgccagttatgtcccctccgcacccttgcccagccattttaccaggcctctccacattgcgctgccccacggtaagtcgcaggacaagcccggccaaaggaattgcctccagctctgagtcccctccctactgtggcaacccactccagtgccagccctcccacactggatgtctaatttttctagcttgccaccctttactttcccctccgctgcccatcctttccctctggggcaaaggttatcatttacggggctttctccatcctttattgttgatacttttctaccttcattccaggaaaaggtctgatgtacacgcagacaacacatttgataggcgaaaatcgtcttgataatgccttattcttatataacatcctgttgcaaaaaataatagagaccactatttgctgaaagcctaccgtggattaagcattgttcagtgtgcttttcatgtgtcatttagtcttgacagttcaatactcggtaggcatttcccgttttccagatgaggacattgaaactgaaaaagattaaataactaaacaagtcacagagctggtgagtgatggagttaggattgataaccaggtggagttcactctattgccaatacttttttttttttcaagacggagtatcactctgtcacgcccaggctggagttcagtagtgcaatctcagctcactgcaacctccgcttccggggttcaagcgattctcctgcctcagcctcctgagtagctgggattacaggcacgcaccaccatgcctggctaatttttttttttttttttttgtggagatgaggtttcaccattttagccaggctggtttcgaactcccaacctcaagcgatctgcccacctcggcctcccaaagtgctgggattacaggtgtgagacactgtgcctgatctcttaactttaaaacaaaaaattcatctgtggccgggcgtggtggctcacgcctgtaatcccaacactttgggaggccgaggtgggcggatcacggggtcaggagatcaagaccatccggggtaacacgatgaaaccccatctctataaaaatccaaaaattagctgggcgtggtggtgcatgcctgtagtcccagctactcgggaggctgaggcaggagaatcgcttgaacccgggaggtggaggttgcagtgagccgagatcacgtcactacactccagcctgggcagcagagctagactccatctcaaaaaaaaaaaaaaaattcatttgtttgaggaatgtttttggaggacctactatggaaagggcaaagctctgatatgaaatatttgagattcatgggtatactgtgtccagataccactaaaacatcctaaacacactttattaagatgttgagcctgtgactcag

SEQ ID NO: 588476 - DNA, 4001 bp, Homo sapiens
aacacattctaatctcttcaaggctggtcctactatggcccacatctatgggagcttattagagatgcagacttaccagcctcacctcgcacctacgagtcagaacctgcattttaacaagatccctaggggatgagcattcacatcaaagtctgaacatcaccactcttgcactgttctaacaattattcaggaatatctatctgaatttttatttttgagaaaataagatttaagctttctgagaagaggatcattccttttttttttttttttttgagacagtggctcactctgtcacctaggctggagtgcagtggcacaatcatggctcactgcagccttgacctccctgggttcaggtgttcctcccagtttagcccgccaagtagctaggactacaggtgtgcaccaccacactcagctttttttttttttttttttggtggggagggggtggtttgtagagacagggttttgccatgttgccctggctggtcttcaactcctaggctaaagcgatcctcttgccctgggctcccaaagggctgggattacaggcatgagccactatgcctggccagctcattcagcttttactgtgttttttagggagtctctactttccccaaagattaagaatcactgcattattacgtcaagcataaacactcagtataacagcattgactattcaggaagaatcatgtaccagcgaccgggctatggcagctgctgaggagaagcagcctccatgcataaatcacaggattgctatggcccatcgaatccactggagagctgtccatgcacaacagcatccagcaaccacagggcagggacagagcaggttaaccttgcacaacaaccttgttgtgcagagggatgccatcccctttgcttccctcttattataatccaggcccttgactcttcgctgctccacaactccttcaggtcaccttaacctcaacttcccgttcagcaatttcgagaccaccctccctgatattaactacatattattcacattacttcatattattttgcctcaatatattttagaaacgcacactaaaaccatgttttgtttaaaatttcataattccttccagaattgcttcccttttaaactactgtattagtggttccaatattcttcccattacttaggcatgacatttttgagtcacccctgacactactcagaagatacacacaaccaattaatcatcaagtcatgtggatcctacctataagcctatttctgttcccccttttcattctcctctaaatccatttctgtttctccttttattctcaggtcttcataatctattaagtcaaatgtaacctgaaagtgggaccgtctcaaacgtttcctcaatttagttatatcctattaacatagactccacaggtatactcatgcaaatgtacaaaatgtgtatacaatgacattcaccgaataattgtttctccaggcaaataactgaaaacaatctaaatattcatggtgactgaagtaaattacggtacatcaataaaataagtatctcgcagccattgaaggtaataaattaagacatataaaaatacgtattgcctatacataaagtcacagctatatcaatttatactatgtatatcattttaaaaagattttactcatttcaaacactacctcattcaaaaaggcgaccataaattcctgaggctggaaacgaacgaacggcaagccccgaagaaacacgctcttttaaaaattaaatcttgtgctactgtttcggggttgtaacgcgtgcgtgaccctcgtctttgagggccggatcctgcagggaagagagggcgtacctgaggggcctcgcgtgcctggacagccccgcgggccagcaagcctaaaagcaactcatccggcgtccacgctgcaaccgggcgcacggaggtgatgcaacgcgctgaaaatgcgggatccagtgaaggagacaggctccgcaccggccaatcagtgcgcgctgcctgacacctgccaacaagccaggcgccgattggtcgcgccggacatgattgcgcccactggctcggatggtgcgacagtggtgcttgctggttttgcgcctccacgtggaaaacgaaccagcgctgagggcggcgctgtgcgtgctgcttgtatccgttgcagtagtgtagaccgaggtctcactcgggttgtgggcacctccgggtaggtgacggcccactgggaaggggcgccgaggtcggggctcatgttcttcatcttgtttgcttttgtcagtatttatctgactggacacttcgtacctaaattgataacgacaaacagcaacttccggagaggtggctttaataattatacttttgggccctgagccgccgaccccaaagccgcttctcctatcataaatggctacgtgaaacgataataacaaaagggaaggaagggtctgacaaccagatttaaaagttttattgtattttacttaaaatgtttccggtaatgaaaacattgcacaaacgatttttttttctttttttgagaagcggtctcattctgtcgcccaggctggagtgcagtggcacggtcatggctcactgcagcctcaacctccccggatcagatgatcctcgcacctcatccctggccaagtagctgggactacaggctagcgccaccacgcccggctaatttttgtattttctgtagcaacggggtcttgctatgttgcctaggctgctgtcaaactcgtgggctcaagcgatctgcttgccttagcctccttaactgttgggattacaggcatgagccactgcacccggcctgcatacttattatcattgctatgagtcggcttggtaccttactgatctgctggttaaaatctggagccttgcaaagggcagtaggcctcgggctttggccccagagcctctaaaggaaattctggatcttgccaaattgggagtagttccgtagctgcctattgtatccgttagagggatataaaaaatttatctggcctagaataggtagaatgcagtttcttattaagtttaggaacattttgatagtctgttcagcatatatttaactttacttaccgtcttggccctgtgtgaaggattaaagtggtttcatgtcctccatcatgggtaactcagtgttctgactatactcacataacgtacataatttaatagctgcaaatcttgttaattaactgaaagtatttggaatgtgtttgaagttttcacattcctcacgttgccaccttgttcagttcatttttgtcacctatccagagagcccagatagagccagacagagggctcctggacaaaggtgaggtaggccaagtctaattatttaaaaatttgattgagaaacatttatattaatagtactgttgtgttggaaataatgctcaaaatcctaaggaaattgaacattcaaacaaaggattttcagcaaagcaattttacttctgcgcagaggggtgcttctccttggccagtcaccatgagagcacaccagaacaaaggggcacgagaacctttatccctgacacaaaccctgcccctgtaccctttctccattggccggagttgggcctcacaatctaaaataaccacagttggctaaacattttaactttctttagataaggtgggcacgtaagagagaggggaaagggggaagggctgtctgtaatgagctagagagctagtcttctcttcggataaggaatacgagctggtactgataacgcctggtactgtggcctgtctaggcatgtaacaaaggcagaaaggaaagaggagaaaaagggaagaggggggcactgtgaattaaagaataaaggattgatcaggctatttgaagagaaacctcatcatgtcccacagttggaaggtatgggaagactaagtctagaaaaagttaagcaaatgaaaaaattccagcaaaaaagttaactgtagtc

SEQ ID NO: 588477 - DNA, 4001 bp, Homo sapiens
gggttccttcctgctccttaaagaagccaagccttagctgggcgcggtggctcacgcctgtaatccctgcactttgggaggctgagacgcatggatcacctgaggtcaggagtttgagaccagcctcgccaacatgatgaaaccccgtctctactaaaaatacaaaaaattagctgtgcatggtggtgggcgcctataatcccagctacttaggagcctgaggcaggagaattgcttgaacccgggaggaggaggttgcattgagccaagattgcaccactgcactccagcctgggcaacaggagtgaagctccgcctcaaacaaaacaaaacaaaaaaaaaacaaaagaagctaagcctcagaaccattgcacctgccattccctctgcctgtcctgccctttcctcagctatccacatggcaggttcctcaagtcttgcaggtctttgctgaaacgccactcccccagaggagacatccctgaccactctgcctggcactctttgttccccttactccagagcatctatcaccaactcacacactacatatattcatttactctgtctcccataccagaatgtaaatcctttgagggcagggattttatctgtcctgttcgctatatgacaatgacatagagtaaggattgagctcaataattactgagtacatgaatatcacaagctatacatcatagggattaggcctccctcatctgattcaagactcagagggggtacatgaactgcccaggctcacacagccagacagcaacagaaccaagacctagggctcttcactcctgttacatcacaccatggcaatgattttacattctccaactgattcaaatcatatggcagctagggatttgggggctccatgttttatttcaattgcagttcaagatttctttttatctttgtggctgagaaccctacaataattttggaaagcaaaacccatctacctggagtaaatctttaatatacacctgactacacaggccacaacatgggccgttcctgattcagaaaattctagaagggtcctataggcccttgaaggttatgatgttttagctgatcaagttctgtcctttgctgcctgtggtcgaatggtacagcagctgtcttttctgataaagggcacagttagactttggtttaaacaggaagccaaatgttaactcctcagtctccaggttagcacactgggctacctctgtggtttccacaattctcttctttctttccaaaccctcaggagccaccctccatattaacgctgtctccttccaggttaagctgatgaaaggaaggggaaaacgattcactttccaaaattgaatcggagaagtccagggcctcataggaggaggccgctgtgtgtccagatggccaaaggtctgtgagagcctgggccgtggtttgcgtcctctcgctagaggccgtgcgccctcccgcctggccccgacaaggcgccccgaaacctagccccgcgccgctcgctaggcctccacctgcgcggccccgcagccgcctgttcaggagcggcttcctccctgagcctgcggtcgccgcagcctccccgtcttagagcgggaacccggagctcggatgcggtcccaggatgggcgccccgcgagcaggctggagggcggggagagggcgcggcagccgcgggcctcggtttcttcatctgcaaagggaagggtggggggtccccaagaccccagtccaccggcagggacggcgacgcgtccggcctccgccgcgcccgcaacacttgtcccgggcgccccccgccctctcccggacctacttccccgagccgctcacgcccatcaccagcagcgcgcccggcgccgccataacccaagctcggctccttcccgtcgccttccgggccccgccggccccggcctacccggcgctcgaggggcggagccgctctcgccccggccggggcagtgagggccgtgcccctctgcgccctccccgttttcccgcgccccttttccatgctttcctcctccctttcccaacctcccggcctctctctcctgccccttcttttcctctcccctcccctccctctttcctcttcccggaagtgaagcgcgcgcccggcctggcactcgcgtctccctgggctggagggagccgcccaaagccccgccacctgtcgttctactgccccggcccctcttggttccagaggatcctcaccctggcaggccggatcctcatccacccatggaaagcattcattcattcatttataaaaatgttcttgtaaaaagaataaacagaaaataagactcataatttcccacaccaggcagcaataagcagcacttcctaaaacgactcccctttccccgcgccccgtcgtagatagatgggtatgagtattttgtaaaactgggatcaggccgtacacagcgttttgtaatctggccttttgtcacaataataaatggcggccatcttttggtgtcaaacttagggttgagtgttgaccgtagcagcatatgtcttggctgtatggctctgctgttaaatccagcactggttggggctttaagaggaaggagcaccactttaaagtgtccatttgctttaaaacaatgttaattatgtgtcgtttgaactatttgattaaaagcacttctttttttttttgagacggagtctcgctctgtcgcccaggtgggactgcggactgcagtggcgcaatctcggctcactgcaagctccgcttcccgggttcacgccattctcctgcctcagcctcccgagtagctgggactacaggcgcccgccaccgcgcccggctaattttttttgtatttttagtagagacggggtttcaccttgttagccaggatggtctcgatctcctgacctcatgatccacccgcctcggcctcccaaagtgattaaaagcacttctaaccgcatttggcatcacctcctttggtcttttgttaaccaaggtaggtattactctgtgtcctagaaaacaataaaagtgacataaaagcatttatctaatgaatagttcaattacccctgcactgcctttgtttttcatatacttagcccgagtaggtgagatttcaatctggatgggggctgtacaggtgaagaaattgaggcttggagagaggtcttacaattcagttatggtcaatacacatttcttgaacatctaccatgtgctggttaatatcatattaatattcatttaaaagattaccctctaggcattctcaagcttgataagaggaatagatgtgtatgcaaatactcttaactcgtgccctgcttcgctagctcagtatgaaaaaaaaaagctcatatttctttcaatgttcaaatcagaatgattagcagaaaatctgattcttctccttggatttctttccccagacatgtccaaggatcttaaacttgctgtgctgctcagggtggtggcaggaaacagcatgctcaaattggggcaggtgaacaggatttaacaaagggactattagcacaggtgtgggtagggtcagaaaaagcaactaggggcagagtccacatctgagtaaccgagaagtgttttcactcttaaatagaaaggggctgatgagagggagcctttatatgggaagggaagagaatggaaggagagagacagagagaatagaccatatagaaagaagtgtctgacaggactgtagccttaggaagagagagatagacattccttgttgacccagcagaaaaataatcaggagaataaataacctcccctcccctcctcttgccctgtgatctcctgctcgtggccaaaccccaccagccaaacccaattggaaggtggagagctagggagtccggcggtgcccatgcatgccaatttcctgggctcagagcagggaagagaagggtggagattgtatctggaggtaccaatgaaagatacccagcatgccagtgtcagtgaa

SEQ ID NO: 588478 - DNA, 4001 bp, Homo sapiens
gtccgcccccagagaggaaatgtgacccaaacgtccctttcggagatagagtttgcctttgtttttgctcagaatttcacaagacccattcctcaccccacagagggactcgggagagcggaacgtcgggcttcccgggtctgacaactgattggaatcggcttcccaggtccggcgccctcctgagctgcgcccccggcgcgccccggcggccagggcgccctgcctcgcccccggctgcccggcacctcctccgggcagcagccctccctcacgtggtaggctcctcgctaaacaccactgcaatcactacaataaaaagaaaaaaaggagtaggagaaacacaaagcatacttaaataggcgctttttctctctgcaaaaataaagtccaagattttagatttcttttttttttattttacaatttataaaacatcagccgcctgcccccgctcgcccccagctcagccccgagtggcccggcgcccgctcgttccctcctctcgcccctttgccgagtctttgtctggccccagccccgcggggccccgggtccctgtgccctcgggggtccctagaaggcgacaatggctcgagtccaggcgccgaggctggcgagcgcctgcttggcgcacagctgcccgttgagcggcggcggctgctccgaggagtccggctgtcggctcaccagccccgagaagccggagccaaagatggagatcaagtttgagatgttggacgcgtccggggacgagtccgggcagaagtcctcgaagcgggcgcgcttgcagggggcgaacggggcgcccccggggggctcggcccccagcccgcccgcatcctcctcgtcgtcttcctcctcctcctggccagggtaatacttgcgcttgcagccggcggcggacgccaggcccggtcccggagcgccctggccacagcaggggcagtgggcggaggcgcagcagtcctggtgcaagtagccgttctccaccgtggtcaccacgtgagtgtctaggtccagcacggtggtctggctgctgcagtgcaagccgaagtccgaaggggtagggtatgcgccccggtagaagccgggggaggaggcgggggccggggaggcgggcggagaagcggcggcggccggaggggcggcccctgggggcgcggagcaggcggccggggcgcgagggtcccgcgggcagagcgcagcgggcgcgggcggcggcagcggcagcggcagcggcgcaggacccggctgcagaggctccaagggctgcccgcggtggggcgcgccgtgcggcggctggagcgcggcgcacccgggcagctccgagagcgcccccgcgccgcccgcgggcgctccggccgccgccgccgccgcgcagcccctgggcgccgggtgctggtgctggtgcagctgctgctggaggtgcagctggtggagctggtggagctggtgcagctggtgccgggcggccggctcgcgcgcctccgcgtccccgccgccgccaagttggagcgggccgaagtcggccgcgctggccggcatgcccggcgccgcgtacgctaggtgctggtgctggtggtggggcggctgctgctgttgctgctgctgctggcgccggtagagctcggcgtagcgctcgctcaggtagagctggcgcgcgttgcggagcacgtaggacaccaggaggttcttgtgcagcttgatgccgccgcgctgggttcgggagctgtggatcttgcgcagggagatgctgatcaggctctgggcgtccagggcgcactccatgctcccgcggagacggcggcggagcagccgccgccgctgctgctgttaacgcttctgctgtttctgcctccagccggccgccggggcgcgccgggcaggggtaacggagtccgggtcagaggttcggctgcgctccgaaaggagccgccaccatgcgccgcgcgccacccgcgggctcgcgctccccagacggcgccaaagcaatgagtctcggccggccccggccccagctatttagccgggtgcccgggccccgccccacatgagaagagccaataggagctctgagagtctcctgagtgacaggcgcagcccgccccggggctactcggctggccaatcagaccaaggcggttcctttgtgctattcaaataccgaacggaccccgggcctccaacgccgctgctgcctcgaatgttctcctggggctgccgcgccgcgcgggactcggagccgccggggccgcagtctgcagcataggtcgcctggcagcggccacgttgaagcccgcggctgccctcgccttaggtcccgggagccgggggtcggctcacctgagtgctgcggcgacggctcctcccctttccgcacggctgggcctcacctgcggcaggtgcgcgccgctcatcgctcccccagcggcgcggcgcctccacctgcgcacctgtcgcccccccgagtgacccgcgggagtcaaggcctctctacaggaggctggtggagccgccggcttgacactggggaacatcaaaggagcgaggttttgggggtaccctctaccgcagagaatgtagggcctgactccttgactttttggtcgaggggcctctgggaatgcttgcggaagggaagtcctccccatttgtctgacaggaaaaaccaaaacatcgtgaattttgaccttctctgatggagagagttccgaggccaggcatgacccagggagtgtgtggacctcgcgaccagctgaggctcaaaagcgtcctgggagccgaaacgctgagtgccctaatcaccagctctgtaacctttcctttcgtgcctaactaataataatgacaatagggactattattatgggcctaatatggggcaggcccttcccagcaactccccaatgcctcactctaacgtttgtagaggaggggcctgaggctcggaggagtggagtgacttggggaaccacacagttcccagggggcggagctaggagctgggacaggaccctgcgctcgagacgggaggtgaataccaaaggcccggggactcaccgacttaacttctgttgacacagctttccttcttatcctgaacccttcaggtcccagctggggactgagacagtgggagaagagagggacaggattgctgattcctgggggcgctctatctggaccaagaggcctgaagggggctggttgctgctcccaggggtttcaaaggtgcctggggtgggggctgcccagacagctctggaggctcttggaaatggtctggaggtttgcctgaggagggtccatgagtggatccctgaaggatgaacgaggtctgcagagtctcccagagataggtggaccttgtggggctggactcaggggggaggcccatgaccagacgtcctgctgcttcaccgcctcctcaggggatcttctgagtctctgctttttggggcttccttctgagttctcagcacctacttcatcccttggtgggagtggagagacccagtagcccaccctgtggtctctgggtctttctttagtcttaagaatttccaagatttctgcaaaagtttcttagcatctactccatgccaggcgttgagagtgaagacagagttagcgggtgtttacttcatttttccgatgaggaaactcggacactgacagcgtgagacttgcccaagatcacatggccccagggctggtgctgtgtccttcccttggccccctcgaacaatctcaaacgctttgggcccctgtgaccaatagcacctctccaggcctcctcccagagaagccaggattgaaatttcaggggacttcagataaaggatgtcctacctacattttattggtgatacagacctacaggctgtggaacttgctcaggtgataacacgtagaagtaaaaatacactgcccttcacttccctggtgcctgtcttaaaggcacacaaagactttatttatggccgggcgcggtggct

SEQ ID NO: 588479 - DNA, 4001 bp, Homo sapiens
gctatctatttcccaattactgggcagttttaatccgtatcttgggaaaatctactgattcatcttccccgcacatttatcttcttaaatacacttttatcacagtatcagtccattgttgcagtgctacaaagaaatagctgagactgggtaaattataagaaaagaggtttaattgcctcacaattctgcaggctatacaggaagcatggcagcatctgcttctggggaggcttcagagaggaaggtaaagcgagagcaagaggaagggtaggggtaggtgccacacacttttaaacaactagatctcaggagggctcactatcaccatgacagcaccaaaggggatggtgttaaaccatgagaaatagccatgacccagtcaccccgcaccaggccctacctccaacactggggattgcaattccacatgagatttgggcagggacacagatccaaaccatattaatcaccaatctctcttgttgttagtctaatataagggacaccacctctggttcctctgtgtctcttctcttccctcactttaaaggtggaaggtcctcaaaatcctgcttaagtccttttctctgtctacactctctccacacatgagcacttccatttctgggattttgcttgccatgtatgaacccccagcaactgcattccttgtaagttgcaaactcatatatccaactggcaatagacattttctactagatgtttaccagtcaacttttgaggatatctgtttatttttatttcctcacctgtctcagtttacccgctgctgagagaaatcattagttgctccttcttctcatagtatttaggataactgatattaagtatgattaccatctttagttttattccatacaaaaaccaaatatgcaagagagtaggaagtagatttattgtattcagctttatatcttgagtacaacatacaacctggtttagagaaaggtcatttttacttacatcttacatataataatgataagcaaataaaatataccctttattctctaatcaggttgcacagtcaggctaggaatttcatattaaagaatgaacacatacaggaagttcctatagtaaaagtttaatgaacaacacaaaataatggattgagtaaatataaggaacatgttttattacactaaccacagtgtaaaggtgcacatgacgttatatgaacaaaaataatttaaatcttatgaatagttaaataaatatttaaatagataaatcagtttatcagcatggtcatagttatagcaggggtgagagtctttgaaatgacagaattcatgaaagcgtgacctggtgtatgagtcaataagaattgttttcatgttggaccagatgttattccttcctccttaatctttcttgcaagtttgttgataaagagagggatctcatgatttctgctctgacaacctcccaggcacaagggctgtatttcttctctgtcagatagagagtgattcttcggaagtatttcttcacagccaagatggagtccgcattcatcaggggagtttctcccaccctctcctcctgcatcacacaggcttccaagtcattcagctgctggtagagttcggtgcagaatttgtctaggaggtcctcatcccaagcagcagatgaatcttttgtggtaaagaggttgaagatctgctggatcagctcatggaggacagagatggctggagccttctggaactggttgccatcaaactcctcctggggaaatccaaagtcatgtctgtccatcagacaggaggaaggagagattctgctcatttgtgccaggagcatcaaggtcctcctgttatccaggctgtgggtctcagggagatcacagcccagagagcagcttgacttgcagctgagcaccaccaggaccatcagtaaagcaaagggcgaggccatcgtagatattgcagatacttctgggcttgctgagatgggtgactctgaaccttgggctctaggttctctgaaggccttgcttcctgcaaatgccttaaatagggaacatactgatttccactttcttaatgcttctgggccactttccatttctgtttttgctttccttcatgcactctttacatgagtttagagccgtgtttctcaaatgttttgtttttcattattgtcttccccatcttgttcccagagactttttagatatctttttcctaattgaacccaccgtgaaaatttaataacacagatacaatatgtatctatttatatactatatgtatatctctataatcaaaaagtacaaagtttaatctttgtattcaatgcaggtttaaaaataaccaaatgaaaaatttaagctaaaagttaaatttaaaatctattcaaatttttcttaactttataactaaatttgcttatggacttcaacgtaatttatttactgatataaattgtactgtaggcctggcgaggtggctcacgcctgtaatcccagcactttgggagtccgaggtgggtggatcacgaggtcaggagttcaagaccagcctggccaagacggtgaaaccccatctcaacgaaaaaaacaaaaaaaaaacaaaaaaaaaattagctaggcatggttgtgtgcacctgtaatcccagctactcaggaggccgaggcagggaattccttgaactcatgaggtggaggttgcagtgagccgagattgtgccactgcactccagcctgggtgtcagagtgagactctgtttcaaaaaacaaacaaacaaataaattgtagtgtatcaaattacataagcaaattaacaaattataaacattttctaatgtttatagataaacattttctaagtaatgaatacttaaaaattatttgaaagtgataaacacttaaaactttaaaatatttttatcatttatttttagtgttcttacgtttttttagatctgattactcctgaatttcaccaaacatttaaacagaaccaaatctttgaaaaaattaaggaggaatactcccaaactcattttatgaagccagcattaccttgatacctaagccagagatggacattacaagaaaaaaaaaaattacagccaatattcctgatgaacacagatgcaaaatcatccacaaagtagttgcaaatgaaattcaaaagcactataaaaggatcatttattatgatcaagcttgatttattcctgggatgcaagaatattttaatatgttggaatcaataaatgccatactccttatttacacaataaaagattaaaaatcataactatttttatgcatgcctaaaattattttgacaaaatttaaaatccatctctaatacaatttataacaaattaggtatataaagaatatacctcagaataaagagacacattccttattagctataagataagccattagctaacactatagtcagtggtgaaatgttggaatcttttttctgagatttattataagataaggatgcccactctcactacttctttcaacacagtactggaaatcctactcagaatattagacaagaaaaaaaaggggcatttaaatgagaaagaacaaggtcttattttcatggagattaatgctcagagttttacagattagatttaacatcatgaaagctggtacaatccaggaatcagaggaactgtccctgaggacacaggacttcagggacatcaattattaagaggctacatgaaagcagaaatgctcctggatgtttccattgtctacacataaagtttcaacagatcagccccagcaagtataggcacattcctcactactgtgggtgatgagcttttcactcaaagcagagatgtgaaacctgacaggtttcaaagaccacctaagtgctccataccttgacagtcactcccacaaagctgaaacaccatctgttcctgagggatcaggtcatcatctgtgactttgagacactggccagtcaggcttcag

SEQ ID NO: 588480 - DNA, 4001 bp, Homo sapiens
ataattttacattttatgctttaaatatataaattattaaatgtattaatatgattcaccaatgcatcacaattatgaaatttattcagtgacatatattttcaaaaaggaaacactatgcagataaaagataatccacatttttgggggtccaaacttattacttgccaccattgcaaaggcagttttctcacattttctgtatgtgttatcttgatttctcttttctgagtcactcttctgtctaccccagtatggcttctgctgattaattctatgaatccagctctcagtaagctctgcattgccatctattttcttgctgtagtgctcagttttaattcacattttccataagtttattgattccttttctaagcacatttattttctaaatacacttttatcaccattccctcttgtccttctaatgttaaggtattccacctctgtttcctttgtgtctcttctgttcccacactttaatggtggaagatcctcagaatccagtttaagtctttttttccctctccacttgctccccatatgacagccttcatttgcgtcctttccattgccagttatgaacttccagatatcgtattccttggaaactgcaaattcacatatctgacttgcaatgtacattttcaattacatgttgaagtcagtttacagagaatatctctgcttttatttccagatatgtctcaatctacattctgctaagaggaattcattgtttttttacttcctcacattatagcagttagcatcactgatattaattcagcattattattgtttttagatttctttcctgaaaaaatcaaagatacaagagaacagggactgtatattttatgttcacgtttatatcctgaaggcaacatataaccaggtacagaaaaaaatatatttttataacttgaataaaattatgataggtaacataattaaatcatctatttttaagtcaggttgtaaagtcagccttggcattttatcttaaagaataaacaaacacaagaaattttgtatagtaaaaatttaatgaaaaaggaaattaatatattggctaaatatgaagaacatatattgttacattaaccacaatgtaaagcgactcatgatattacataaattttaaaaataattaaataaatatttaaacaaaagatgaacagagacatcagaatggtcatctgtaaaggactagtgcctgcacaggtatacacgacacttctttacactgctgaaaacatttgaaaattttgattcaacgcgtcgtggttatagaagtgagtctttgaaatggaagaactcatgaaagtgtgagataatgtattagtcaatcaggatcattgccatgttgaaccagttttcaatccttcctccttaatcttttttgcaagtttgttgaaaacgagagggatctcatgatttctgctctgacaacctcccaggcacaagggctgtatttcctctctattagataaagagtgattctttggaagtatttcctcacagccaggatggagtcctcattcatcaggggagtctcttccaccccaacctcctgtatcacacatgcttccaggtcattcagttgctggtaaagttcagtggaaaatttttctaggaggctctgttcccaagcagcagatgagtcctctgtgctgaagagattgaaggtctgctggatcatctcatggaggacagagatggcttgagccttctggaactggttgccatcaaactcctcctgggggattcggaaatcatgtctgtccttcaggcaggagaaaggagagattcttcccatttgtcccaggagtatcaaggccctcctattacccaggctgtgggtctgaggcagatcacagcctagagaacagatggatttgtagctgagcaccagcacggccataagtaaagaaaaggacagggccattgggatgttgcaaatattgctaggctacttgagatggataaccttgaacttcggcctctaggttttctgaagactttgctctgtgcataggtcttaaatagtgaacatactaatttccattttctaaatgccctagttttactttctatctctgtttttgctttctttatgtactctctccatgtgtttaaaaagtttttcattttttttcatcattgcctatttttcacctgcactcaaagccttttatggtttttttttaattgaaatcttcatgaaattttagtaacacagatttggcatatctatttatgtatattacgtatacctctacttcacagataaaaactacaaagtttgctctttttattcaaagtaaagttaagaattacagaaaagttaaactaaaatctaagtttaaaagctattgacatttattttaatttgataagtatatttgtggaataacttttagtataatttgttcatgcaaattttgtatcaaagtacatatgcaaaataaaaatctatataatacacattaataatatgaatgtagttacctacctaatcattcaaaactcctaaaaatatgaatcaataattttttaaaatttttctcttagtgtatgaagctttgaattttgctttatatgagaaaataatttgtaaattcaccagctgcagtattcatccagatattgccaaaacttttttcttttcagcacttgacacaagtactgatgtattgaataactttagtagaaataaaacatataatgtaagctatttggattgaattctcaaagtctaccaaacatcctgaagaactgaggatcaaacataactaataactataagatagtcaatggcagcccaaagatatgcaggttaaagccacatactgtgataagactttaagatccagcaaaaaatggacaaaaagtcctccaatcacagtcatctatttgctataggtttgtaacattggtcttacaaatattttgtttatcttcatgaactcaataccagtgcttctcatatcatacacaaaaaaacccaatgagaaatatgtatattaagcaataaaattttgttggatagagttgttggaaagtcagaaactattgtaatatgttagattcatttacactacgagaactaatttttgtacccttaaaagaagtatcaatccaataaacatatatgacttagaaaatagtatgatttaaatcatttttggcattttacattgaagttcatattccctaaaggttttcagaagttcctatccaagtcaattcttatcaaataaaaaagaccatctttgttctaaattcataaatttataaatattgaatattattatgcaaagaaataactttcagcatgatcctgaactctggctctaacttttttttttttttttttgtgtaagaagtttttttttgtataagtaggccctatagatactgagtccttaaatggaatgaggtctgctttagcaaatcagctatttagtaagtggagtttttactaatttctcatttattctcatttttaaatggactatacaatggttctatatggcattcacaacagcaaatatatttatatttctcacttaacttttcctagaaggtaaaagtggtctgattttcatcttaatttatgggaacaaaaagaaaacaaatgtatgtctaaatgtgataaacatgtaagaggagaaatacctaatgtaaatgacaagttaatgggtgcagcaaaccaacatggcacatgtatacctatgtaacaaacttgcacgttgagcacatttaacctggaacttaaagtatagtacaaaaaaaaaaaagatgaccagaggggaacttagaaaatatcttgagagaggtgaaaatgaaaacacaacataccaagacgtatgtgatgcagtgaaaacagagctaaaggggaaattgaaagctgtaaaagcttatattaaaaaagaagaaagacctcaaaccaatgaactaactttacaagttaaggaactagaaaagaagaa

SEQ ID NO: 588481 - DNA, 4001 bp, Homo sapiens
atagatgggatcacagctacccaacaccatgcctggccaaatttttggtttttagtagagacagggtttcaccatattgtccaggctggtcttgaacccctgaactcaagtgatccacccaccttggcttccaaagtgctgagattacaaacatgagccactgcacccagtcccttttctgatatatatgcactaattaagaaaataataaccatatatttataaaataagaaaataagcatatatacatatgttttatatatatacactatatataaaatatatatatagtgtgtgtgtgtatgtgtgtgtgtgtgtatatatatacatatatatacgtatatatatatatgtacgtatatatatacacacacacacacatacacacacacacacacacacacatacattctagaggctggtctgcctgagatttaggcagagacacagttccagaccatattaatcaccattgtctctatttgtccatccctctgtttcctttgtggctcttctcttccttccctttaaaggtggaaggtccttagaatcacgtttaagtccttttctctgtctacactctctccacacatgagcactttcatttctgggattttgcttgccacatatgaactcccagcaattgcattccttataatttgcaaactcacatatccaactggcaatagacagtttctaccacatgttgtatcagtcaacttatagaggatatctgtttatttttatttcctcacatgtttcagtttacctcctgccgaaagaaatcattgttcattcctttttctccttatagtattcaggataactgatactaagtatgattactatttttagttttattccatacaaaaatcaaacatgcaagagagtaggaagtagatttattgtattcacctttataacttgagtacaacatacaacctggtttagagaaaggtcatttttacttacatctctcatataataatgatgagtaaataaattataccctttattctctcatcaggttgcacagtcaggctaggaattttgtattaaagaatgaacacatacaggaagttcctatagtaaaagtttaatgaacaacataaaataatgaattgagtagatataaggaacatgttttattacactaaccacagtgtaaagatgcacatgatgttatatgaacaaaaataatttaaatcttatgaatagctaaataaatatttaaatagataaatcagtttatcagcatggtcatagttatagcagaagtgagagtctttgaaatggcagaattcatgaaagcgtgacctggtatatgagtcaataagaattgtttcatgttggaccaggtgttattccttcctccttaatctttcttgcaagtttgttgataaagagagggatctcatgatttctgctctgacaacctcccaggcacaagggctgtatttcttctctgtcagatagagagtgattcttcggaagtatttcttcacagccaagatggagtccgcattcatcaggggagtttctcccaccctctcctcctgcatcacacaggcttccaagtcattcagctgctggtagagttcggtgcagaatttgtctaggaggtcctcatcccaagcagcagatgaatcttttgtggtaaagaggttgaagatctgctggatcagctcatggaggacagagatggctggagccttctggaactggttgccatcaaactcctcctggggaaatccaaagtcatgtctgtccatcagacaggaggaaggagagattctgctcatttgtgccaggagcatcaaggtcctcctgttatccaggctgtgggtctcagggagatcacagcccagagagcagcttgacttgcagctgagcaccaccagggccatcagtaaagcaaagggcgaggccatcatagatattgcagatgcttctgggcttgctgagatgggtgactctgaaccttgggctctaggttctctgaaggctttgcttcctgcagatgccttaaatagggaacatactgatttccactttcttaatgcttctggaccactttccatttctgtttttgctttccttcttgaactctttacatgagtttagagccgtgtttctcaaccattttgtttttcattattgtctcccccatcttgttcccagagactttttagattttttttcctaattgaacccaccgtgaaaatttaataacacagatataatatctatctatttgtgtactatatgtatatctctatactcaaaaagtacaaagtttaatcattttattcaatgcaagtttaaaaataaccaaatgaaaattttaagataaaagttaaatttaaacgctattcaaatttaacttaactttataactaaatttgcttgtgggcttcaatatagtttatttactgatataaattgtaatgtattaaattacataagaaatttaacaaattataaacattatctaatgtttctagataaacattatacagctaagtaatgaatgtttatgaattatttgaaactgataaagacttaataatttaaaatatttttatcatttatttttattatacttaacttttaattttgttgcatgtgagaaaatttttaacttcactagctgctagatactcacctagagagtgtgaagaattttttcttcaattcttgacctaaatatagatgtgttgaacaacttcagtagaattgttaaaatataaattatttatatttcatttcaaagcccacaacacagacagaaatgctaaggatcaaacataagcaatatctataagatggccagtgacaaaccatatgtatgcagaggacacctctcatgatatgactttgagatctaatacatcttggaaagtactccaatcacagctacccatttgccataggtttgtaatgctgaacttttataccttttgtgtatcttccatgaactcaatgtcagtgcttctcatgtgatacacaagaaaacccaatggagagaaaaaaaaaaaaactaaggaataagattttgttaaataggttgagctttgaagggccacaaaccatttaaatatgtaagatttgttcccactcccaagaactaacttctacatccttgggagtagtatcatatgcaatgagaatacacaattgaaaaaacatcctcgatttgattaaaaattttttgcatgaaagttcaaatttccaaggtgccttcagaggttctttgctgattcctagcaaactaaaggaaactatctttgtcctagatgcgcataataggatgtaaatataataacataaataagtagacaattgttttacatagcatgccagacaccagatatctttctttctcatttcattttcatagaaagcaaaagttgtcactttttgcatcctaactaatgggaacaaaaagataacacaagtggccgggcgtcgtggctcacatgtgtaatgccagcactttgagaggccgaggcagacggatcatctgaggttgggagtttgagaccagcctgaccaacatagtggaggttaaggggtgggaaagaacagaagcaaaatagtagaagggatgtaggtcaaggtaacacgtaagtatgggctggaagaaaagtaattactcctggtccacagtgtgttttcagatttaccgaaccccatcttgcaaatataccaactgcaagagtttatacacaagaaagagaaatttttgagagtacaatattctctctggaaaatgggtcagtgttcattgcaccaagctctccactattggataagtaaacttagaaggtcagtttttttcttcttatatttctagtaagaaacaagagaattgataatttcagaggacacttccctaacttttaatagagttatataataaagataatgttaataagagaaatgaaatatcaggccgggtgcggtggcttacgcctgtaatcccagcactttgggaggcc

SEQ ID NO: 588482 - DNA, 4001 bp, Homo sapiens
attttatgctttaaatatataaaatattaaatgtattaatatgatttatcagtgcatcacatttatgaaatttattcattgacatgtattttcaaaaaggaaacactatgcagataaaagataatccacatttttggcgggtccaacttattacttccctccattgcaaaggcagatctttcacaattttctgtatgtgttatcctgatttttcttttctcattgattcttctacctaccccagtatggcttctgctgattaattctatcaatccagctctcagtaatctctgcattgccatctattttcttcctgtagtgctcagttttaattcacattttctataagtctattgattctttttataagcatgtttgttttctaaatacacttttatcatcattccctcttctccttctaatattgaggtattccacctctgttttctttgtgtctcttctgttcccacactttaatggtggaaggtcctcagaatccagtttaagtcttttttccctctccacttcctccccacatgacagccttcatttttggcctttccattgccagttatgaacttccagatatcgtattccttggaaactgcaaactcatatatctgactggcaatgtacattttcaattacatgtttgaaagtcagtttatctctacttttttttccagacatgtctcaatctaccttgtgctaagaagaattcattgcttttttacttcgttaccatacagcagtttgtataactgatattaattcagcattattattgtttttagatttatttcctgacaaaaatcaaagatacaagagaacaggagctgtattttttatattcatgtttacatccttaaggcaacatataacctggtatagaaaatgtatttttctataacttgaataaaattatgataggtaacttgattaaatcatctattttgaaatcaggttgtacagtcaggcttgacgttttatcttaaaaaataaccaaacacaagaaattttgtatagtaaaaatttaatgaaaaaggaaattaatatattggctaaatatgaagaacatatttgttatattaaccacaatgtaaaggtacacatgatattacataaaaaataatttaaataataaaaatagttaaataaataaatatttaaataaatagatgaaaggagacatcagcatggtcatctgtaaaggactagtgcctgcacaggtatacatgatgcttctttacactcctgaaaacatttgaaaattttgattcaacttgtggtggttataggagaagtgagtctttgaaatggaagaactcatgaaagtgtgagatgatgtattagtcaatgagaatcatttccatgatgaaccagttttcaatccttcctccttaatcttttttgcaagtttgttgaaaaagagagggatctcatgatttctgctctgacaacctcccaggcacaagggctgtatttcttctccatcagataaagagtgattctttggaagtatttcttcacagccaggatggagtcctcattcatcaggggagtctcttccaccccaacctcctgtatcacacaggcttccaggtcattcatttgctggaaaagttcaatgtagaatttttctaggagggtctcatcccaagcagcagatgagttctttgtgctgaagagattgaaggtctgctgcatcatctcatggaggacagagatggcttgagctttctggaactggttgccatcaaattcctcctggggaaattcaaagtcatgtctgtccttcaggcaggagaaaggagagattctcctcatttgtgccatgagcatcaaagtcctcctgttattcaggctgtgggtttgagacagattacagcccagagagcagcttgacttgcagctgagcaccaccagggccatcattaaagcaaagggcaatgccattgggaatcccgaagatgctgctgggctggttgatgaggggtaacactgaaccttgggttgtaggttttctgaagaccttgctctgtgcataggtcttaaataaggaacatactagcttccattttctgaacgtcttcatgtttttttctacttctcttttggctttcctttatgtcctgtctacatgggtgtagagcagtttctcaaccacttttattttcagtattacctcatctttccctgccccatgggctttttagaaatttctttctaattcaaagtcccattaaattttaataacacagacataccatatatttgttgatatactgtacatatctatttataaggagtgtaaagtttaatctttttatttaacatagtgttaagaatgaccaaatgggctgggcccggtggctcacacttgtaattccagcactttgggagaccaaggcagatggatcacgaggtcagcagttcaagaccagacttgccaacatggtgaaaccccgtctctgctaaaaatacaaaaattagtcgggcatggtggcaggtgcctgtaatcctagctactcaggtggctggagcaggagaattgcttgaacccgggaggcagtggttgcagtgagccaagattgcaacattgcactccagcctgggtgacagagcgagtctccatctcaaaaaaaaaaagaaagaaagaaaaaaagaagaccaaatgaaatttttaagctaaaagttaatagttaaatttaaaacccatggacatttaactcaatttgtttgtgtctttaaaatgatttatttacctatataaattgtaatgtgtccaattccatcagcaaattaacaaattataaaaacacataataatacctaatattataaaatacttaaaaatcatttaaaactgctaaagactactaaaatttaattttttaacatttacttttagtctaacttaattttctgtcatgttagaaaatgtttaacttcactagctgctagatattcatccagatattgtatagatttttttctcttcagtgcttgacataattattgatgtattgagcacctttagtagaattaaataataaaatataaagtatttgcatttaattctgaaagcccacagcacagtcagaaatgctaaggattaaacataagcaacattcacaagatggctaatgacagcccatatgtatacagaggccacctcagatgttatgactttgatgtctagtaaaccttagaaattcctccaatcacagcacccatttgacataggtttgtaacgctgatcttatataccttgtgtgtatcttccatgaactcaatgtcagtacttttcatgtgatacacaagataacccaatggaaaaaaagtactaaggaataaggttttgtcagatagagttgagttttagagtgctaccaatcaccgaaatacccaagatttgtcaacacactcaaaaataacttttacacttttgggagcaatatcatactgaaggagtatatgtagttaagaaaaagccattaatttgattaaacaaatttttggccctaaaattcaaatttccaaaggacctgcagatgttccaattctagttgatttttatcaaactaaaggaaaccctttttgtcctaaatgtccataatgggatgtaaatgtgataacataaatgtgttgtacaattgtttcacatgcaggacaccagaaacctttatttctcattttcattttcatttttattgaaaacaaaggttgtcactttttgcatcctaaagaactgggacaaaagaaaccccaaaacaaatgtatatctaaatgtgataaaaatgtaaaaaggaagcaatatattaatgggaaaaaaacaaggacaaaaagcaacttacgtacattcagcccagccaagttggagattaaggaatggggaagaacagaagcaggaaagtagaacggatgtagatcaaaggcagcaaatgggcatgggctagaagaaaagtaatcattcctgaacaagggtgtgttttctgctt

SEQ ID NO: 588483 - DNA, 4001 bp, Homo sapiens
cttcacccactttttgatggggctctttgtttttgtaaatttaagctcttttttgtacattctggatattagacctgtgtcagttgggtaggctgcaaagattttctcccattctgtgggttgcctgttcactctgatgatggatagtttcttttgcgtgcatacgttctctaattagatgccatttgtcagttttagcttttgttgcagttgcttttgtcgatttcttcataaaatctttgcccatcctgtgtcctacattttttctagggtttttatggttttgggttttacatttaagtctttaatccatcttgagttaatttttgtataaggtgtaaggaagtggtccagtttcaattttctgcctatggctatccagtttttccagcaccatttatcatcattccttctaaatacattttatcatcattccctctcgtccttctaatgataaggtattccacctctgttttctttgtgtgtcttctgttcccccactttaatagtggaagttcctcagaatccagtttaagtctttttttccctctccgcttgctccccacatgacagccttcattttaggcctttccattgccagttatgaacttccagatatcgtattccttggaaactgcaaactcatatatctgacttgcaatgtacattttcaattacatgttgaaagtcagtttatagagagtatctctacttttacttgcagacatttcttaatctatgttctgctaagaggaattcattgtttttttttacttcctcacattacagcagttagtataactgatattaattcagcattattattgtttttagaaacatttcctgacaaaaatcaaagatacaagacaacaagaactgtattttttatgttcaagtttatatcctgaaggcaacatataacgtggtatagaaaaatatatttttctataacttgaataaaattatgataggtaacttacttaaatcatctatttttaagtcaggttatacagtcaggcttggtatttaatcttaaaaaataaacaaacacaagaaattttgtatagtaaaaatttaatgaaaaggaagttaatatattaactaaatatgaagaacatatattgttacattaagcaaaatgtaaaggtacacatgatattacataaaacatgatttaaaccttaaaaatagttaaataaataaatatttaaataaatagatgaatagagacatcagcatggtcatctgtaaaggactagtgcctgcacaggtaaacacgatgcttctttacactcctgaaaacatttgaaaattttgattcaacttgtggtggttatagaagtgagtctttgaaatggaagaactcatgaaagtgtgagatgatgtattaatcaatgaggatcatttccatgttgaatgagttttcaatccttccttcttaatcctttttgcaagtttgttgaaaaagagaaggatctcatgatttctgctctgacaacctcccaggcacaagggctgtatttcttccccatcagataaagagtgattctttgaaagtatttcctcacagccaggatggagtcctcattcatcagggcaatctcttccaccccaacctcctgtgtcacacaggcttctaggtcattcagttgctggaaaagttcaatgtagaatttgtctaggagggtctcatcccaagcagcagatgaatcctttgtgctgaagagattgaaggtctgctggatcatctcatggaaggcagagatggcttgagccttctggaactggttgccatcaaacacctcctgggggaatccgaaatcatatctgtccttcaggcaggagaaatgagagattcttcccatttgtgccaggagtatcaaggccctcctattacccaggctgtgagtctgaggcagatcacagcccagagaacagatggatttgtagctgagcaccagcacggccatcagtaaagaaaaggacagggccattgggatgttgcaaatattgctaggctactggagatgggtaaacttgaaccttggcctctaggttttctgaagactttgctctgtgcatagttcttaaatagtgaacatactaatttccattttctaaatgccctggttttactttctatctctgtttttgctttctttatgcactctctacatgtgtttacatatgtttttcattttgttcatcattgcctatttttcccctgcactcaaagacttttatggtattttttactaattggaatcttcatgaaattttaataacacagatttggcatatctatttatgtatactacgtatacctctacttcacagataaaaactataaagtttgctctttttattcaatgtaaagttaagaatgacagaaaagttaaactaaaatctaagtttaaaagctgttgacatataacttaatttgataagtatatttctggaataacttttagtgtaattcattaatgtaaattatattttatcaaattacatatgcaatataaaagctatataaatacacgttaatatgaatgtaattacatactgaatcattgaaaactactaaatatatgaatcaataattttttaaaatttttctcatagtgtatgaagctttgaattttgcttaatatgagaaaataatttgtaaactttactagctgcagtattcatccagatattgccaacacttttttcttttcagcacttgacataaatattgatgtgttgaataactgtactagaaataaatcatatgatacaagctatttgcattgaattctcaaagtctacaaaacatcctgaagaactgaggatcaaacataagcaataaccataagatagtcaatggcagcccaaaggtgtgcaggttaaagccacatattatgataagattttaagatcaagcaaaaatggacagaatgtcctcctatcacagtcttctatttgccataggtttgtaacactgatcttgcaaatattttgtgtatcttcaggaactcaatatcagtgcttctcatgtgatacagcagaaaatccaatgagagagatgtatattaagcaatgaaattttgttggacagagttgttagagaatcaccaactattgtaatgtgttaggttagtttatacttcgagaacccttaggagaagtatcacatagacatatgtgacttagaatatattatcatgtaaagaattaattttcagagtggtcctgaactctgactctaccttttcttttgcctaagaagttagtttgccttggccctatagatactgagtctttaaatggaatgaggtctgctttagcaaatcagctatttagtaagtggagtttttactagtttctcattttttcttctactggaaagtgttcaagaatgaagctattttgcttcctcatggccatatttgctgggattgtaatagacaatgacaaaagtttccattcagcttttactgagagtcaataatgcccatttagtttactgcttaaaccactgggattctagtttttttaaggttcatgtagatctggggatacaagttgcaagagcagcataatatcatcctttgctagcactatgttaactatttatggcttcatctctaatctgtcctctattttgtgataatagaaaataagtagcctggtgtcaaatacagagtcacatatctaatttcaaactctccaattcacacagtttataggaatcagacaatttactattcccaaaagtagggaataatagcctctatcccccaaataatcctacagctttccttccctggatcaaatccccagaatgtgtatgtgaacggtagatacttgtgacatcatttttccatcatttataaatttcagtttcaaatcacgtgataatctttagatgacactagtagaaaattagcctgtttatataaaggtagagattatgaaatggaccaattttagaaaataaccaaacacattttattatt

SEQ ID NO: 588484 - DNA, 4001 bp, Homo sapiens
ccattgcaaaggcagatctctcacaattttctgtatgtgttatcttgatttttcttttctgattcactcttctacctaccccagtatggcttctgctgattaattctatcaatccagctctcagtaagctctgcattgccatctattttcttgctgtagtgctcagttttaattcacattttccataagtttattgatttcttttctaagcacatttattttctaaatacacttttttaattttttaaatttaatttaattttattattattatactataagttttagggtacatgtgcacaatgtgaaggttagttacatatgtatacatgtgccatgctggtgtgctgcacccattaactcgtcatttagcattaggtatatcttttatcatcattccctctcgtccttctaatgttaaggttttccacctctgttttctttgtgactcttctgtacccccactttaatggtggaaggttctcagaatccagtttaagtctttttttccctctccacttgctccccacatgacagccttcattttcgggctttccattgccagttatgaacttccagatttcgtatgccttggaaactgcaaattcacatatctgacttgcaatgtacatcttcaattacatgttgaagtcagtttacagagaatatctctgcttttatttccagatatgtctcaatctacattctgctaagaggaattcattgtattttacttcctcacattatagcagttagcatcactgatattaattcagcattattattgtttttagatttctttcctgacaaaaatcaaagatacaagagaacagggactgtatattttatgttcacgtttatatcttgaaggcaacatataaccaggtacagaaaaatgtttttttaataacttgaataaaattatgatagataacttaattaaatcatatatttttaagtcaggttgtaaagtcagcctcgacattttatcttaaagaataaacaaacacaagaaattttgtatagtaaaaatttaatgaaaaaggaaattaatatattggctaaatatgaagaacatatattgttacattcaccacaatgtaaaggtacacatgatattacataaaaaaataatttaaatcttaaaaataattaaataaatatttaaataaatagatgaacagagacatcagcatggtcatctgtaaagtactagtgcctgcacaggtatacacgacgcttctttacactgctgaaaacatttgaaaattttgattcaactcgtggtggttatagaagtgagtctttgaaatggaggaactcatgaaagtgtgagataatgtattagtcaatcaggatcattgccatgttgaaccagttttcaatccttcctccttaatattttttgcaagtttgttgaaaaagagagagatctcatgatttctgctctgacaacctcccaggcacaagggctgtatttcttctctgttagataaagagtgattctttggaagtatttcctcacagccaggatggagtcctcattcatcaggggagtctcttccatcccaacctcctgtatcacacatgcttccaggttattcagttgctggtaaagttcagtggaaaatttttctaggaggctctgttcccaagcagcagatgagtcctctgtgctgaagagattgaaggtctgctggatcatctcatggaggacagagatggcttgagtcttctggaactggttgccatcaaactcctcctggggaagtccaaagtcatgtctgtccttcaggcaggagaaaggagagattcttcccatttgtgccaggagtatcaaggccctcctattacccaggctgtgggtctgaggcagatcacagcctagagaacagatggatttgtagctgagcaccagcacggccatcagtaaagaaaaggacagggccattgggatgttgcaaatgttgctaggctacttgagatgggtaaccttgaactttggcctctaggttttctgaagactttgctctgtgcataggccttaaatagtgaacatactaatttccattttctaaatgccctagttttactttctatgtctgtttttgctttctttttgcactctctacatgtgtttaagaatgtttttcattgtttttcatcattgcctatttttcccctgcactcaaagtcttttatggtatttttttgtaatcgaaatcttcatgaagttttaataacacagatttggcatatgtatttatgtatactatgtatacctctacttcacagataaaaactataaagtttgctttttttatttaacgtaaagaatgacagaaaagttaaactaaaatctaagtttaaaagctattgacatttaacttaacttgataagtatatttgtgaaataacttttagtgtaatttgttcatgtaaattttgtatcaaagtacctatgcaaaataaaaatctatataaatacacattaataatatgaatataattacatacctaatcattcaaaactcctaaaaataagaatcaataattttttaaaatttttctcttagtgtatgaagctttgaattttgctttatatgagaaaataatttgtaaacttcactagctgcagtattcatccacatattgccaacacttgtttcttttcagcacttgacataaatgtatatgtgttgaataactttagtagaaataaatcatataacataagctatttgcattgaattctcaaagtctaccaaacatcctgaagaactgaggatcaaacataagtaataaccataagatagtcaatggcagcccaaatatatgcaggttaaagccacatactgtgataagactttaagatccagcaaaaaatggacaaaaagtccttcaatcacagtcatctatttgccataggtttgtaacactgatcttacaaatattttgtttaccttcatgaactcaataccagtgcttctcatatcgtacacaagaaaatccaatgagaaagatgtatattaagcaatgaaattttgttggatagagttgttggagagtcacaaactattgtaatatgtcagatttgtttacataaactacaagaactaatttttgtactcttcgaagaagtatcattccaataaacatatgtgacttaggaaatattataagttaaatcatttttggcatttttcattgaagttcatattccctaaagattttcagaagttcctatccaagtcaattcttatcaaataaaaaagaccatctttgttctaaattcataaatttataaatattgaatattattatgcaaagaattaactttcagagtggtcctgaactctggctctacttttttttttttttttgcataagtaggccctatagatactgaacccttaaatggaatgaagtctgctttagcaaatcagctatttagtaagtggagtttttactagtttctcattttttcttctactggaaagggttcaagaatgaagccattttgcttcctcatgcacatatttgctgggattataatagataatgacaaaaatttccattcagcttttactgagagtcaataatgcccatttagtttactgctaaaaccactgggattccagtttttttaaagtgcatgtagatctggggattcaagttgcaagagcagcataatatcatcctttgcctagcactatattaactatttatgacttcatctctaatctgtcctctactttgtgataatagaaaataagtagcctggtgtcaaatacagagtcacatatctaaattcaaactctccaattcacacagtttataggaatcagacaatttactattcccaaaagtatggaataatagcctctctcccccaaataatcctacagctttccttccctggatcaaatcccaagaatgtgtatgtgaattgtaaagacttgtgacatcatttttccatcatttataaatttcagattcaa

SEQ ID NO: 588485 - DNA, 4001 bp, Homo sapiens
ataacccacatcctttcctaatcccattttatttctttctccacttcagttcactaacttatcttatttaaacttcctccaatatggcttctgtgtattaactttacccaatcagttctcactaagggtgccaatgccatctatttcccaattagtaggcagtttcaagccacaccttgggcaaatcgactgaatcctcttctcggcacatttatttccttttgtttgtttgttattttgagatggggtcactctccctctgtctcccaggctcgagtacagtattgtgatcatggctcactgcagccttgaactcctgggctgaagcatttatcttcctaaatacactttcattatctttctctgctgttgccttctaatgtacagccattcctttgtggctgtggatgtttcctttgcggcttttctctcccctccctttaaaagcgaaaggtcctcagaatcatgtttaaaactttttctctctctacactctctcccaacaccatgaccttcatttcttggctttctcttatcacatataaacccccagcaatcgcattccttgcaaattgcaaacttatatatctaactggcaatggacattttctaatagatgtatactagtcaatttaaagagaatgtctctgtcttatttttatttcctcacatgcctcaatctaccttctgcagagagaaatcatcggttgttccttcttctcttcataccatttaccataactgataattaagtatgattaccatttttagtttttttcatacaaaaatcaaatacacaagagagcagaattgtatttgttaggttcaccttgttatcttgagtacaacatacaacctggtttacagaaagtttatttttacttatatcttgaatataatattgatggataaatgaagtgtaccagttattctgtaatcaggttgcacaattaggcttggaatttcattttaaagaataaacaagtacaaaagtttccatagcaaaagttcaatgaacaacacaaaataaatttaccaaatacaaagaacatattttattacattaaccactgtgcaaaggtgcacatgacataatatgaacaaaaataagttgttttataaatagttaaataaataatattttaaaaatatttaaatagataatggatcagtcagcatggtcctctgtaagggactagtgccttaagagctgaatacaatgttgattaatactcctaaaaacatttgaaaagatttaaatcgtgtcatggtcatagcagaaacatgagtctttgaaatggcagatcataaaaaggtgagctggcatacgaatcaatgaaaatcatttccatgttgaaccagttttcattccttacttcttaaactttcttgcaagtttgttgacaaagaaaaagatctcatgatttctgctctgacaacctcccaggcacaagggctgtatttcttctctttcagatagagagtgattctttggaagtatttcctcacagccagaatggagtcctccttcatcaggggagtctctgtcacccccaccccctgtatcacacaggcttccaggtcattcagctgctggtagagttcagtgtagaatttgtctaggagggtctcatcccaagcagcagatgagtcctttgtgctgaagagattgaagatctgctggatcatctcatggaggacagggatggtttcagccttttggaactggttgccaaactcctcctggggaaatccaaagtcatgtctgtccttcaagcaggagaaaagagagattctcctcatctgtgccaggagcatcaaggtcctcctgctacccaggctgtgggtttgaggcagatcacagcccacagagcagcttgacttgcagctgagcaccaggagggccaccagtaaagcaaaggtcaaggccattgtagatgttgcagatgctgctagactggttgaaatgggtgagcctaaaccttaggctccaggttctctgaagaccttgctttgtgcctagccttaaatagggaacatactcgtttacattttccaaatgcccctgtgttactttctacttctctttttgctttctttatgcactctttacatgggttttcagctgtttttctcaccacatttttttcattattgtttccttcctcttttaccccagagcctttttagaaacttttttctgattgaatctcccattatattttaatcacatatacactgtgtatctatttacatatcctatgtatatctctattctatacattaaattaaaaagtataaagttaatgttttattattgcaaagaatgataaaacaattaaaaattaaattaaaaggctattgacattttacttaacttgataactatattcttagagcaacttttttgaaaatagatttttgtgggtacataagaggcgtctgtgtttatggaataagtgaaatatttttatataggcagacaattcataataatcacagcagggtgaatggagtatccaatgcttcaaacatttatcatttctctctgctacatacatcccatttatactattttagttattttataatatataataaattatcattaacagtagtcatcctattgtgctatcgaatactaaatcatattcattttttctaactatatttttgtgcccgttagccatctccattttcccccatatgatccagcaatcccactactgggtatttatccaaaggaaatgaaatcagtatgtcaacaaaatatttacactcccatgtttattgcagcactattcacaatagctaagatttggaagcaacttaggtgtctaacagatgaatggataaagaaaatatggcacttatacacaatggagtactacttagccataaaaaagaatgagatcctgtcatttgcaagaacatggatggagctggaggacattatgttcattggacaacattaaacccattgatctgcacatacctaaccacacttgaatctctaggacaaattccacttggtcatgatgaatgattgttttaatgtgttcttgaattcagtttgctaatttgttgttgaggatttctgcatcaatgttcatcagagatattggcctacagttttctttctttttaatgtgtctttctctggttttatatgtgattaaaatataatgggagattcaatcagaaaaaacactggcctcatagaatacatttggaaagattctgtccacctctatttttttaataatttgagttggattggtattagttttttaaatatttggcaaaattcatcagtgaagccatcagatcctgagttcttttctgggatactttttagtatggcttctgtctcattacttgttattggcctgttcacattttgtatttcttcatggttccatgaagaaatacaaaaaccatgaagaaatacaagaatggttctagaaacaattcttgtatttcttcatggtactatgaaaaaatacaaaacctgaacagaccagtatgttgtatgtttctaggaattatctattttgttcaggttttccaatttattagcatatagtttcatagtatcttctaatgatcctttaattttttgtggtattggttgtcatgtctccttttttatctcagattgtatttatttgggacttctttttttcttagtctgtggtgagagaaaacgtttgatattatttcactttttttctaaattttaagatttgttttgtgacctagcatttggtatatccttgagaattatccatgtgctgaggagaagaatgtgtattctacagctgttggatcaaatgttctgtaaatatctactaggtccatttggcctatggtgcagatgaaatttgatgtttgttaattttctgtctggatgatctgtccaatgctgaaagtggggtgttgaagtctccagttattattgtatgggggtctgtctatctctctctttggctctaataata

SEQ ID NO: 588486 - DNA, 4001 bp, Homo sapiens
gtattaatcaaaataatgaagaaaaacaatgattattataattaattaaagtgtcataatttcaaatcaaaatattaaacatattaaagtggtttggctgtccatcaaattcacaaaatctatccagagacaaatatattttttgaagtaaaaattattcagagaaaaaaaatccacattcttttcaaagtcccactctatttctgtcctccaattctgaaagcaaacttcaaaatcattttctatatgtattgtcactgatttctcttctccgattcactcttccagcttactccactatgattaattccacccaactatctctatcagcagcaatgccatctattttccagatgtagtgtacactttcaatccacattttgcaagaatgcattgattcttctaagcagtttcagtcttttaaatatgcttttaacaacattttttcttgtcccaatgcatggccattcaaactctttcctggctcttctctccctttaaagttgaagtttgcaggaataaattttaagtgtttttctcattctattcaacccatgtgacatattctgttcccaagctttcacttcatggtattgcttgtaaattacagacaaaaatatcaggttaccaatggacacttgcacttagatgtctacttgtctgctatagaggatatctactacttttttaaaaaaaattttgatatgccttgcttcagttttactgaatttcatttgtttttatttcttctcactatagcatttaatgtaacaggtattagaaagtatagttattattttccttacaaaaataaaagatacaagaaagcgaaaacggtatttgttatgttcacctggatatcctaagggcaatataaaacctcgcttagagaaagtcaatttttacttacaatttggatacaatgatgatgggtaaatgaattgtaccatccattctttaatgagattgcacatttgggcttggtatttctttattaaagaataaacaaataatataagaagttttaatagtaaaaattaataaaaagaaaataatatattgactaaatataaataacatattttgatataacacaatgtaaaagtacacataatattacatggacaaaaataatttaaatctaataaataaataaatatttcaatagatagataattagatctatcagcatggtcatctgtaaaggactagtgcctgcacaggtaaacatgatgtttccttacactcctgaaaagatctgaaaattttgattcaactcatgcggtggttataggagaaatgagtctttgaaatggcagaagtcatagaagtgtggactggtgtattagtcaatacagatcatttccatgttgaaacaggtttcattccttcctccttaatctttcttgaaaaatttttgataaagagaaggatctcatgatttctgctctgacaacctcccaggcacaagggctgtatttcttctctgtcagataaagagtgattctttggaagtatttcttcacagccaggatggagtccacattcatcaggggagtctcttccaccccaacctcctgtatcacgcaggcttccaggtcattcagctgctggttaagttcagtggaaaatttttctaggaggctctgttcccaagtagcagatgagtcctttgtgctgaagagattgaaggtctgctggatcatctcatggaggacagagatggcttgagccttctggaactggttgccatcaaactcctcctgggggaatccaaagtcatgtctgtccttcaggcaggagaaaggagagattcttcccatttgtgccaggagtatcaaggccctcctattacccaggctgtgggtctgaggcagatcacagcccagagaacagatggatttgtagctgagcaccagcacggccatcagtaaagaaaaggacagggccattgggatgttgccaatattgctaggctacttgagatgggtaaccttgaaccttggcctctaggttttctgaagactttgctctgtgcgtaggtcttaaatagtgaacatactaatttccattttctaaatgccctagttttactttctatctctgtttttgctttctttatgcactctctacatgtgtttacagatgtttttcattttttttcatcattgcctatttttcccctgcactcaaaacattttatggtatttttttctaattgaaatcttcatgaaattttagtaacacagatttggcttatctatttatgtataatatgtatatctctacttcacagataaaaactataaagtttgctctttttattcaaagtaaagaatgacagaaatgttaaactaaaatctaagtttaaaagctattgacatttaacttaatttgataagtatatttgtggaataacttttaatgtaatttgttcatgtaaattttgttttatgaaattacatatgcaaaataaaaatctatataaatacacattaataatatgaatataattacatagttaatcattcaaaactgctaaaaatatgaatcaataattttttaaaatttttctcatagtatatatatgaagctttgaattttgctttatatgacaaaataatttgtaaacttaactagctccagcattcatccagatattgccaacacatttttcttttcagcacttgacataaatattgatgtgttgaataactttagtagaaataaatcacataatataagctatttgcattgaattctcaaagtctacaaaacatcctgaagaactgaggatcaaacataagcaataaccataagatagtcaatgacagcccaaagatatgcaggttaaagccacatattgtgataagactttaagatccagcaaaaaaaaaatggacaaaaagtcctccaatcacagtcatctatttgccataggtttgtaacactgatcttgctaatattttgtttatcttcatgaactcaataccgtgcttctcatatcatacacaagaaaacccaatgagaaagatgtatattaagcaatgaaattttgttggatagagttgttggagaatcacaaactattgtaatatgtgagatttgtttatactatgagaactaatttttgtactcttagaagaagtatcattctaataaatatatgtgacttagaaaatattatcaattaaatcatttttggcatttttcattgaagttcacattccctaaaggttttcagaagttcctatccaagtcaattcttatgaaaaaagagaccatctttgttctaaattcataaatttataaatattgaatattatcatgtaaagaattaactttcagagtggtcctgaactctgggtctacttttttttttttttttttgcataagaagttagtttgcctctgccctatagatactgagtccttaaatggaatgaggtctgttttagcaaatcagctatttagtaagtggagtttttctagtttctcattttttcttctactggaaagtgttcaagaatgaggctatttttcttcatcatggccatatttgctgcaattataagacaatgacaaaaatttccattcagcttttactcagaatcaataatgcccattaagtttactgctaaaaccagtgggattctggggattcaagttgcaagagcagcataatattatcctttgcctggcactatattaactatttatgaccttatctctaatctgtcctctactttgttataatagaaaataactagcctggtgtcaaatacagagtcacatatctgaattcaaactctccaattcacacggtttataggaatcagaaaatttactattcccaaaattagggaataatagcctctgtcctccagataatcctacagctttccttccctggatcaaatcccgagaatgtgtatgtgaactgtaaatacttgtgacatcatttttccatcatatataaatttcagcttcaaatcacgtga

SEQ ID NO: 588487 - DNA, 4001 bp, Homo sapiens
atattaaatgtattaatatgatttaccagtgcatcacatttatgaaatttattcattgacatgtattttcaaaaaggaaacactatgcagataaaagataatccacatttttgggtgtaccaacttattacttccctccattgcaaaggcagatatctcacaattttctatatgtgttatcttgatttttcttttttgattcactcttctacttaccgcagtatggcttctgctgattaattctatcaatccagctctcagtaagctctgcattgccctctattttcttgctatagtgctcagttttaattcacattttccataagtctattgattctttttctaagcacatttattttctaaatcaacttttatcaccattccctctcatccttctaaagttaaggtattccacctctgttttctttgtgtctcttctgttcccacactttaatggtggaaggtcctcagaatccagtttaagtctttttttccctctccacttcctccccacatgacagccttcattttaggcctttccattgccagttatgaatgtccagatattgtattccttggaaactgcaaattcacatatctgacttgcaatgtacattttcaattacatgttgaagtcagtttacagagaatatctgtgcttttatttccagatatgtctcaatctacattctgctaagaggaattcattgtttttttacttcctcacattatagcagttagcatcactgatattaattcagcattattattgtttttagatttctttcctgacaaaaataaaagatacaagagaagagggactgtatattttatgttcacatttatatcctgaaggcaacatataaccaggtacagaaaaatatgtttttttataacttgaataaaattatgataggtaacttaattaaatcatctatttttaagtcaggttgtaaagtcagccttggcattttatcttaaggaataaacaaacacaagaaattttgtatagtaaaaatttaatgaaaaaggaaattaatatattggctaaatatgaagaacatatattgttacattcaccacaatgtaaaggtactcatgatatcacataaaaaataatttaaattttaaaaataaataaatatttaaataaatagatgaacagagacatcagcattgtcatctgtaaaggactagtgcctgcacaggtatacaccaagcttcttcacactgctgaaaacatttgaaaattttgattcaactcgtggtggttatagaagtgagtctttgaaatggaagaactcatgaaagtgtgagataatgtattagtcaatcaggatcatttccatgttgaaccaggtttcaatccttcctccttaatcttttttgcaagtttgttgaaaacgagagggatctcatgatttctgctctgacaacctcccaggcacaagggctgtatttcttctctgttagataaagagtgattctttggaagtatttcctcacagccaggatggagtcctcattcatcaggggagtctcttccaccccaacctcctgtatcacacatgcttccaggtcattcagttgctggtaaagttcagtggaaaatttttctaggaggctctgttcccaagcagcagatgagtcctctgtgctgaagagattgaaggtctgctggatcatctcatggaggacagagatggcttgagccttctggaactggtggccatcaaactcctcctcggggaatccgaaatcatgtctgtccttcaggcaggagaaatgagagattcttcccatttgtgccaggagtatcaaggccctcctattacccaggctgtgggtctgaggcagatcacagcccagagaacagatggatttgtagctgagcaccagcacggccatcagtaaagaaaaggacagggccattgggatgttgcaaatattgctaggctacttgagatggataaccttgaacttcggcctctaggttttctgaagactttgctctgtgcataggtcttaaatagtgaacatactaatttccattttctaaattccctagttgtactttctatctctgtttttgctttctttatgcactctctacatgtgtttaaaaagtttttcattttttttcatcattgcctatttttcacctgcactcaaaggcttttatggtatttttttctaattgaaatcttcatgaaattttaataacacagatttggcatatctatttatgtatattacgtatacctctacttcacagataaaaactacaaagtttgctctttttattcaaagtaaagaatgacagaaaagttaaactaaaatttaagtttaaaagctattgacatttaacttaatttgataagtatatttgtggaataacttttagtgtaatttgttcatgtaaattttgtatcaaagtacatatgcaaaataaaaatctatatagatacacattaataatatgaatataattacatatccaatcattcaaaactcctaaaaatatgaatgaataattttttaaaatttttctcttagtgtatgaagctttgaattttgctttatatgacaaaataatttgtaaacttcaccagctgcagtattcatccagatgttgccaacacttttttcttttcagcacttgacataaatattgatgtgttgaataactttactagaaataaatcatataatataagctatttgcattgaattctcaaagtctacaaaacatcttgaagaactgaggatcaaacataagtaagaaccataagatagtcaatggcagcccaaagatatgcaggttaaagccacatattgtgataagaccttaagatccagcaaaaaatggacaaaaagtcctccaatcacagtcatctatttgccataggtttgtaacactggtcttacaaatattttgtttatcttcatgaactcaataccagtgcttctcatatcatacacaaaaaaacccaatgagaaagatatatattaagcaatgaaattttgttggatagaattgttggagagtcacaaactattgtaatatgtcagatttgtttacactacgagaactaattttcgtacccttagaagaagtgtcattccaataaacatatgtgacttagaaaatattatgaattaaattatttttggcatttttcattgaagttcatattccctaaaggttttcagaagttcctatccaagtcaattcttatcaaataaaaaagaccatctttgttgtaaattcataaatttataattattgaatattatcatgtaaagaattaactttcagagtgatcctgaactctggctctacctttttgttgttttttttttttttgcataagaagtttttttttgcataagtaggccctatagatactgagtccttaaatggaatgaggtctgttttagcaaatcagctatttagtaagtggagtttttactagtttctcattttttcttctactggaaagtgttcaagaatgaagctattttgcttcctcatggccatatttgctgggattgtaatagacaatcacaaaaatttccattcagtgtttactgagagtcagtaatgcccatttagtttactgctaaaaccactgggattctagttttttttaagtgcatgtagatctggggattcaagttgcaagagcagcataatatcatcctttgcctagcactatattaactatttatgacttcatctctaatctgtcctctactttgttataatagaaaataactagcctggtgtcaaatgcagagtcacatatctaaattcaaactctccaattcacacagtttataggagtcagacaatttgctattcccaaaagtatggaataatagcctctcttccccaaataatcctacagctttccttccctggatcaaatcccgagaatgtgtatgtgaactgtgaagacttgtgacatcatttttccatcatttataaatttcagctt

SEQ ID NO: 588488 - DNA, 4001 bp, Homo sapiens
aatacataaaatattaaacatattaacatgacttgccaatagattgaatccacgaactctattttcaaaaaagaaaaactatgtagataaaaaatagtacacattctttttcaagtccaaccttatttcccccctccatttccatggcaaacatgtcacaattatttcctacatatggttatcactgatttctcttctctgattcactcttccacctactccagtatggtttgtactgattaattctgccaatccagctctcaccaagatctccaccgccatctatttttctgatgttctgggcagttttaatccacatttcccataagtctattgattcttcttctaagtacatttattttctaaatacatttttatcatcattccctcttgtccttctaatgtttaaggtattccacctctgtttcctttgtgtctctcctcttccctctctttaatggtggaaggtcctcagaatctagtttaagtcttattttcttctctacattggctcctcacatgacagcctccatttttaggcatttggttgccagttatgatcctccagacattgtattccttggatattgcaaactcatgtatctgactagcaatgcacattcgcaattacatgtttaaaagtcagtttagagaggctagctctgcttttatttttctttctggacgtgcctctatctgcgttctgctgagagcaattcactgttttttttcctagctcacattatagcatttaacataactcatattaatcataattattgttgttaaatttctggcaaaaatcaaagatacaagggaacaggaattgtatttattatgttcacttaagaaaaatcttcctttacttaaaatttgaataaaataatgataggtaactgaactgtaccatctgtttttaatcaagttatacaatcaggcttggagtttcattttaaagaataaacaaacaattaatagtaaaaatctaatgaacaaagcaaaataatcagttgacaaaacataaagaacatattttattatattagccacaaagtaaaggtggatgtaatattacctgaacaaacataatttaaaataatttaaatcttataaataaataaatatttaaatagattagatagaagacagacagatagataaatagatagaatagatagattggcatgatcatctgtaaagattttgtccctgtggagctaaagaagtgttgcttaacacgtgtgaaacgtttgaaaattttgattcaactcaagtcatggatatagcagaaattaatatttgaaacggcagaactcaagaagtgtgaaatggtgtactagtcaatgagaatcatttcgatgttgaaccagttttcattccttcctccttaatctttcttgcaagtttgctgataaagagaaggatctcatgatttctgctctgacaacctcccatgcacaagggctgtatttcttctctgtcagatagagggtgattctttgaaagtattttctcacagtcaggatagagtccacattcatcagaggagtgtcttccactccaacctcctgcatcatacaggcttccaggtcattcagctgctggtaaagttcagtgtagaatttgtctagaagtgtctcatcccaagtagcagatgagtcctttgtgctgaagagattgaaggtctgctggatcatctcatggaggacagagatggcttgagccttctggaactggttgccatcaaactcctcctgaggaaatccaaagtcatgtctgtccttcaggcaggagaaaggagagattcttcccatttgtgccattatcatcaaagtcctcctgttactcaggctgtgggtctgaggcagatcacagcccagagaacagattgacttgcagttgagcaccaccagggccatcagtaaaacaaagggcaaggccattggggaggttgcagatgcttctgggctgttgagattgagtgaccctgaaccttgggctcttctctgaagaccttgttttgtgcacagatcttaaaaaggtcacatacgagtttccattttctgaatgccttgtgttactttctacttctctttttgctttcttttatgctctttctacatagatgtacaggagtgtttctcagtttatttatttttacattattacctcatcttcctctgccacatatgctttttagaaattttttttctaactaaaaatcccattaaattttaataacacagatatactatgtgttggctgatgtatatacattacagtacccattatcgagagagaatattgtacttctttaatgctttaaaagcagcgtaatagaatgtaaaatagaatttattcagtcccggattaagaatgagcaaatgaaaattctaaggtaaaagttaataattaaatttacaatttatggatatttaacttcatagttcaatttgtttaagtaacaatgtgatttatttacttatataaattgtagtgtgtcagattaaataagtaaattaacaaattatgaaaatatataatattgcctagtataatgaaatatttaaaaattcaaaatagctaaagactattaaaattgaaattatttgtaacatttatttttagggtactttcaattttgcttcatagggaaatttaaaaaattcactagcttctagatattgatctagatattgtcaaaaacctttttctcttcagtgcttgacataattattgatgtgttgaacaactttagtagaattaaatagtaaaagataaagtatttttattgaaacctcaaaactcaaaacacagtcataaatgctcaggatcaaatataagcaacatacacaagacagcaaatgacagctcatatgtatacagaggccacctcacatgatatgactttgacatctaataaatcttggaaagtcctccaataacagccacccatttgccatatgcttgtagcactgatcttgtataccttttgtgtatcttccatgaactcaaggtcaatgcttctgatgttacaagaaaaccaaattaggccaggcgcggtggctcacatctgtaatcccagcactttgggaggctgaggtgggtggattacaaggtcaggagatcaagaccctcctggacaacatggtgaaagcccgtctctactaaaaatacaaaaattagctgggcgtggtggcacgtgcctgtaatcccagctactcgggaggctgaggcaggagaattgcttgaaccagggagtcggaggttgcagtgagccgagaccaccccactgcactccagcctggcaacagagcgagactccgcctcaaaaagcaagcaaacaaacaaacaacaacaacaagaactcaattaaaaaaatactaaggaataaagttttgtcagacagagttgaactttagagggccccaagaaataacttttacattcttggaagcaatattatacttaatgagtatatgcaatggagaaaaatgtcatcaatttgattttaaaaatattatttgtcatgaaaggtcagatttccaaagaacccacagaggttccaattctagttgattctcctcaaactgaagaaaaccatttttgtcctaaatgtccatagtgtaatgtaaatgtgatagcatgaatgggttgtacaattgtttacatagcatgcaggataccagagatctttctttctcattttcattttcattgaaagtaaaggttgtctctttttgaatccttaagaatggagacaaaaagaaaaatgtatatctaaatgtgattttaaaaatcctacagaatggagatagaaagaaaacaaatgtgtatctaaatgtgataaaagaatcctgattcttttctggtcacttgggctaggagattctaatcctaagttaatttgttagttttattttccccagcaccatctcactcacaaggcagttatcacagtcagtaacacccttttctctagagtgacaatatcctctaga

SEQ ID NO: 588489 - DNA, 4001 bp, Homo sapiens
actttctcatccttactagcagcctgccctgaatcctgtctgtctcagggtgtactgtctattctgcacctggatttcaaaatattcgttttcttttttttggcaataaattactccatgctgcatctccaccgccgtgtgtctcttgtttaaattcttaaaactagcaagacaagaatctaggtctcacatcagccatcagcaagaaggcaaacttctcaaaattgttttctctatatattgccattaccttctcttctcttatttactcttctacctactcctgtatggtttctactgattaagtctatcagtcaactggttgattctaccaatcaacttccactaagatcaccaatgcccaaattaccaggcagtttcaatctactctatattttgcatgaatgcatcaattcttctaagcagttttagtcctttaaatttattattatcaccattctctcttttccttctaatatttggccattccaaatctgtttccattgtagctctttcctccctttaaagttgaaagttgcaggaggaaattttcagtcattttgtcattctgtaaacacttctcacatgaccactgctgttcctggagtttcaggtcacggcattgcttgaaaattgcagactgaaatatcaaattgccagtgcacatttgcacttatgtgtctaccagtcaactgtagaagatatctgctgcttttgtttttgtttcctgatatgccttactccagctctgctgaaaaaaaatactgttttttggtcttcttcttatatcatttatctaacagatttaatgattattcttgtttttaggtttttttccctacacaaagaaagataaaagacagcatgaagtgtatttgtatcttcatctctataacctgaagtcaacttacaagctggcttatagaatgtaaatttgtactgtacttataacttgagtataataacaatgaatcaatgaattgaaccatacatttttaaatcatgttggagaatcggcttggtgtttctccttagagaataaacaaatccaagaagttttctatagtaaatatttaataaactaaacaaaataatacatcgactaaacatagaaaatatattttgttatgttatcaacaatataaaggtatacattttatgcttttatatgggcaaaaaattaaatattatagtcaaataaatatacatttaataaatagataaatagatccatcagcttagtcatctgtaagggactagttcctgtgcaactgaacacgatgttgcttaacacacttgaaaatacttgacgcgtttgattcaactcatggtatggttatagcagaaacaagagtctttaaaatggcagatcatgaaagtgcaagctggtgtagtcgtcaatgggagtcgtttctgtgttggatcaggtcttattccttcctccttaacctttcttgcaagtttcttgatgaagagaaggatctcatgatttctgctctgacaacctcccaggcacaagggctgtactttttctctgtcaggtagagagtgattctttggaagtattttctcacagccaggatggagtcctcattcatcaggggagtccctcccacccacacctcctgcatcacacaggcttccaggtcattcagctgctggtaaagttcagtatagagtttgtctagaagcctctcatcccaagcaacagatgagtcctttgtgctgaagaggttgaaggtctgctgaatcacctcatggaggacagagatggcttcagccttctggaactggttgccatcaaactcctcctggggaaatctgaagtcatgtctgtccttcagacaggagaaaagagagattctcctcatttgtgccaggagcatcatggtcctcctgtgacccaggctgtgggtctgaggcagatcacagtccagagagcagcttgacttgcagctgagcaccaccagggccatcagtaaagcaaaaggcaaagccattgtagatgttgcagatgctgttggacttgttgagatgggtgactctgaaccttcagctctaggttctctgaagaccttgctttatgtgtaggtcttaaatagggaacatactagtttccattttcagaatttactttctacgtctgattttgctttcatttatttactctctacatgggtatagagtagtttttcaaccagttttgtgtgtgtgtttgtgtgtgtatgtggtcattattgacactcccttctcttgcctgcctccagagtcttttaagaaatttttttcttaattgaaattaaatttttattaaattttaataacaaatatattgtatatctccttatgtactgtatgtatgtctactttgcacactaaaagaaaaagcataaagtttacttttattatttcttgatctgttaggaatggcaaagtaatttaactaaaagttaaatttttaaaaatttgacatttaacttaactctgagcagcaacttttaattcactctatttgtttatataaattatctcaaacaaatttgcaaattaagaatgtattagtaatatacataataatacaaacatgatgacatgcataagtttcttaaaggtaaaaaatgaaattgttttcttaagtttgatttttagtgtacttaacttttaattttgctttaaaaaataaactaatttttaatttcactagctgctacatattcatccagagtgtcagcattttattcttttcagcatttgacattaactgttgatgtgttgaaaatatttagtagaattaaataataacatatacatgatttgtatttaattctcaaagtctacctaatactcagaatccctgaagctcaaacataagcaacatctggaagaaaggcaatcacagcaaatgatggaaagaaagtcctccagtaagccatctattcgccatagatttataacactgattgtgcatgtattttgtctgtttctactgaattcaatgtcagtatgtcttgtgcgatacacaagaaaattcaataaggaaagtgaacactagagaataagattatgtaagaattgagctttggaggaccacaaactattgtaatatctgagagttgttcacacccccaagaactaatttctacaaccttgggggcaataccatctccaatagaaatacacaactttgaaaatatcatcaattttattttttttgtatttttgcattaaagttcaaattcctcaacatatatttatagtttctaaaccaagtcaattctattaaacaaagagaaaccatctttgtcctaaattcataactggataaatattatcatgttaagcattaacttacaactccaatcctgagcgctgggatttttttttttcatagcaagttaagttgcctcagacctatagattccctctcttaaaatggtaagtatggaatcatctttggcaaatcatctctttagtaactggactctgttctgttgactgcattatcctcagtaccaggcctagtgtacttattcaagaaatagtttttgctgaagcaatttatcatactttctctttatactagaaggcattcatgggtgaccaagctattttgtttccatcatggccatatttgttaggattataacagacaatggctaatatttccactctactcttactaagtgtcaataatgattatagaatgtattgccaaacccactggatatctaattcctttaaggtatatacggcactgggaattcaaatgcaagcacaacataattttcagcctttgcgtagcactatattaaactatattatgacctcatgtctaaattgccctctacattttataatataaattaaccagcctggtgtcataatatcgagccaaatgtccaaactcaaactctccctgattcacacagcttacagcaatcagacaacaaattacactacattttgtgggtagtacccctgtgatccccaagtcatcaatc

SEQ ID NO: 588490 - DNA, 4001 bp, Homo sapiens
gtaaatttgtttaagttctttgtacattctggatattagacctgtgtgagttgggtagactgcaaaaattttctcccattctatgggttgcctgttcactctgatgataggtagtttcttttgctgtgcagaagttctctaattaaatgccatttgtcaatttaacttttgttgcagttgcttttggcgatttcttcataaaatctttgcccatcctgtgtcctatgttttcttctagggtttttatggtttttggttttacatttaagtctttaatccatcttgagttaatttttgtataaggtgtaaggaagtggtccaggttcaattttctgcctatggctatccagttttcccagcaccatttatcatcattccctccaaatacacttttatcatcattccctctcgtccttctaatgataaggtattccacctctgttttctttgtgtgtcttctgttcccccactttaatagtggaagttcctcagaatccagtttaagtcttttttccctctctgcttgctccccacatgacagccttcatttttggcgtttccattgcttagttatgaacttccagatatcatattccttggaaactgcaaactcatatatctgacttgcaatgtacattttcaattacatgttgaaagtcagtttatagagagtacctctacttttatttgcagacatttcttaatctatgttctgctaagaggaattcatttttttttacttcctcacattacagcagttagtataaccgatattaattcagcattattattgtttttagatttctttcctgacaaaaatcaaagatacaagagaacaagaactgtattttttatgttcacgtttatatcatgaaggcaacagataacctggtatagaaaaatatatttttctataacttgaataaaattatgataggtaacttacttaaatcatctatttttaagtcaggttatacagtcaggcttggcatttaatcttaaaaaataaacaaacacaagaaattttgtatagtaaaaatttaatgaaaaaggaaattaatatattggctaaatatgaagaacatatttgttacattaaccacaatgtaaaggtacatatgatattacataaaaaataatttaaataataaaaatagttaaataaataaatatttaaataaatagatgaaaggagacatcagaatggtcatctgtaaaggactagtgcctgcacaggtaaacacgatgcttcttaacactcctgaaaacatttggaaattttgattcaacttgtggtggttatagaagtgagtctttgaaatggaagaactcatgaaagtgtgagatgatgcattagtcaatgagaatcatttccatgatgaaccagttttcaatccttcctccttaatccttttttcaagtttgttgaaaaagagaaggatctcatgatttctgctctgacaacctcccaggcacaagggctgtatttcttctccattagataaagagtgattctttggaagtatttcctcacagccaggatgaagtcctcattcatcaggggagtctcttccaccccaacctcctgtatcacacatgcttccaggtcattcagttgctggtaaagttcagtggaaaatttttctaggaggctctgttcccaagcagcagatgagtcctctgtgctgaagagattgaaggtctgctggatcatctcatggaggacagagatggcttgagtcttctggaactggtggccatcaaactcctcctctgggaatctgaattcatgtctgtccttcaagcaggagaaaggagagattcttcccatttgtgccaggagtatcaaggccctcctattacgcaggctgtgggtctgaggcagatcacagcccagagagcagatggatttgtagctgagtaccagcacgaccatcagtaaagaaaaggaccgggccattgggattttgcaaatatcactaggctacctgaggtgggtaacttgaaccgtggcctctaggttttctggagactttgctctgtgcataggtcttaaatagtgaacatactaatttccattttctaaatgccctagttttactttctatctctgtttttgctttctttatgtactctctccatgtgtttaaagacgtttttcattttttttttcatcattgcctgtttttcccctgcactcaaagccttttatggtatttttttctaattgaaatgttcatgaaattttaataacacagatttggcatatctatttaggtattctacatatacctctacttcacagataaaaagtatgaagtttgctctttttattcaaagtaagttaagaatgacagaaaagttaaactaaaatctaagtttaaaagctattaaaatctaagtttaattagataagtatatttgtggaataacttttaatgtaatttgttcatgtaaattttgttgtttcaaattacatatgcaaaataaaaatctgtataatacacattaatatgaatgtaattacatacctaatcattcaaaactgctagaaatatgaatcaattttaaaaaaattttctcatagtatatgaagctttgaattttgctttatatgagaaaataatttgtaaacttcactagctgcagtattcatccagatattgccaacacttttttcttttcagcacttgacataagtactgatgtgttgaataacttttgtagaaataaatcatataatataggctatttgcattgaattctcaaagtgtacaaaacatcctgaagaactgaggatcaaacataactaataaccataagatagtcaatggcagcacaaaggtaggcaggttaaagccacatattgtggtaagacttcaagatccagcaaaaaaattgacaaaaagtcctccaatcacagtcatctatttgccataggtttgtaacgttgatcttgcaaatattttgtttatcatcatgaactcaataccagtgcttctcatatcatacacaagaaaacccaacgagaaagatgtatattaagcaatgaaattttgttggatagagttcttggagagttacaaacttttgcaatatgtcagatttgtttacactacgagaactaatttttgtacccttagaagaagtatcattccaataaacatatgtgacttagaaaatattatcaattaaatcatttttggcatttttcattgaagttcatattccctaaaggttttcagaagttcctatccaagtcaattcttatcaaatataaaagaccatctttgttctaaattcataaatttataaatattgaatattattatgtaaggaattaactttcagagtggtcctgaactctggcaaagttagtttgcctcggccctatagatactgagtccttaaatggaatgaggtctgttttagcaaatcagctatttagtaggtggagtttttcctagtttctcattttttcttctaatggaaggtgttcaagaatgaagctgtttttcttcatcatggccatatttgggattgtaatagacaatgacaaaaatttccattcagcttttagtgaaaatcagtaatgcccatttagtttactgctaaaaccactggggttctagttttttaaggtgcatgtagatctggggattcaagttgcaagagcagcataatatcatcctttgcctggcactatattaactatttatgacttcatctctaatcctccctctactttgttataatagaaaataaatagcctggtgtcaaatacagagtcacatattgaaattcaaactctccaattcacacagtttgtaggaatcagacaatttactattcccaaaagtagggaataatagtctctgtcccccaaataatcctacagcttcagtaggattaaaaaaattgaagcacaatttttttaatccattctatcattgatgggcatttgggttggtttcctgtctttgctattgtaaatagtgttg

SEQ ID NO: 588491 - DNA, 4001 bp, Homo sapiens
agccaaagtagtattaattaaaacaataataaattataattgtaaataatatatcatgatttaaaataatatattaagtatattaatatgatttgctagtacatcagttacatgaaatctatccagaaaaatattaataaaggaaatactatgcacagaaaaagtaactcacattctttcccccatcacatcctatttttttgccctcttcagagtcactaacttctcttatttatacttccagccactacagtatggtttgttctgatttattttaccataataactctcataaggttgccagtgccatctattttcccgaggtagtggacagtttcaatgtatatcttctgtaaatctactgataactcttttaagaatattaattttcttaaactttttttcctagtattttctcctgttgtccttctaatgtgtggcctttccatctgtttctttgtggctcttctctttcctttcttaagtgtggaaggtcctcagaatcacgtttaagccattttctccctcgacactctctccccacatgagatcctccatttctgggctttcagttactgcatatgaacctctagcaattgcattccttattaattgcaaactcatatatccaactggtagtgcacattttcacttagatgtctaccagttagcatatagaggatatctctgcgtttatttttatttcctcacatgccttggtctaccttctggtgagataaattcattggttctttcttctcatgatagcattagacataactgatattaagtatgattactgtttttagttttctttcccaacaaaaaacaaagatatgagagagcgggaattgtatttgttatgttcacctggatatcttgagggcaacatacaacctaatttagacaaagttcatttttacttataatttgaatgtaataagcatggataaaggaattgtaccatccattctttaatcagtttgcacaatcagggttggagttcaattttaaagaataaataaagaatttttctatagtaaaaatttaataaacaaggcaaaataataaatataaagaacatgtttttgttacacaattcacaatgtaaaagttcacataatataatatgaacaaaactaatttaagccctatagatagttaactaaataaagatttaaataaatagatgaatagatccatcagcatggtcatctgtaagggactagtgcccatacagctgaacaggatgttgcttaacactcctgaaaacacttgacacatttgattcaattcatagcatggttttggcagaaacaagggtctttgaaagagcacaacttgtcgaagtgtgagctgctgtattagtctataagaatcatttccgtgttgtaccaggtctcattccttactcttcaatcttttttgcaagttgattgataaagagaaggatctcatgatttctgctctgacaacctcccaggcacaagagctgtatttcttctctgtcagatatagagtgattctttggaagtatttcctcacagccaggatggagtcctcgtacatcaggggagactctatcacccccacttcctgcatcacacaggactccaggtcattcagctgctggtcaagttcgatgtagaattcatctagaagggtctcatccaaagcagcagatgagtcctttgtgctgaagaggttgaaggtctgctggatcatctcatggaggacagagatggcttgagccttctggaactgtttatcatcaaactcctcctgggggaattcaaagtcatgtctgtccttcaggcaggagaaaggagagattcttcgcatttgtgccaggagtatcaaggccctcctgttacccaggctgtgagtctgaggcagatcacagcccagagagctgaatgacttgtagctgagcaccactagggccaccagtaaataaaaagtcaaggccattgtagatgttgtggatgctgctgagctggttcagatggatgacccttaacctgggtctctgaagactttggtttgtacaccgccttatatagggaacatatttgtttccattttctgaatgctactgcattttttttttctacttctgtttttgctttcctttatgtactctctacatgggcttaggaaagtgtttctcaaccagttttcttttcattactgcattccctttctcaacctccagagtcctgtttgataatttttttctaagtaaacccctcctgataatttaataacacagatatattatgcacatatttgaatgtactacattcctatccatgctttagaaaacaaagtggacagtttacttttttatgcaatgcagcattaagaataagtaaaaattttatgtcaaaagttaaatttaaaagctattggcatttaactttataaaagttatttgctgagtgacttctagtatatatacttatataaatattaatgaatcaagtgaaacatgcaaagttataatatatgaaaatatataataccaatataataaaaatacttatataaaatatgtaatatcaaaaaaataaaaatacttaaaaatctcccaaaactgctaaggggctatttaaaattaaattattcctgtaacatttaatttattatacttaacttttagctttgcttcatatagaaaatgatttttaccttcactaactgctagattttcatccagatatagtcaacatatttttcttttcagcacttcctataagtagtgatgtttgaaaaagttttatacaatttaatcataaaataaaaacatttgtataaaagagtataatacacttgaaagcactgaggatcaaacataagctacatacccaagacagccaatggcagcccattcatatgccgatggagaccacatcacatggtatgactctgagattgagcacatagtggaaagtccaccagtgacaaccatctatttcacattggtttgcaacactaatctcacatacattttgtgtatcttccatgaactcaatatcagtcttttcatgtaatacataagaaaaccaagtgaaagaaaataaacactacaggatagggttgtcttagagttctgcattgaggggccataaacgaatataatatctacaatttgttcacaccacaagaactaaggtttgtgcccttaggagcaatatcatccccaatgagaatacacaattgagaaaacatcaattatatttttcaaaacaatttttgcattaatgtttagatttcccaaagaacctggggacatcccaattctagttcattcttataaaataaaaaaagccatctgtttcctaaggtaaataataatatctaagtatgataaagtaaatgaggtgtgcaattgttgtacatagcatgcaggataccagatatctttctcatttcctttttcacagaaagcaaaagttgttgctttttgtatcccaataaatgagagcaaaaagaaaacaaatgtataactaaatgtgataaaaacataagaatggaagtaacatcccaaaggagaaaaacaactaacaaaatataacttggatattcagcccagattagatggacattaaggggtgaggaagagcagaagcaaaatggtgcaagagatgtagaacaaaggtagcaaatgggcaggagctcaaagaaaagtaatcattactggtccaaggggatgttttcagctttagtgaattcagccttactagacagttgagggtgatgaaccaaacataagacactgtgcaccagaaaggcaaatttgtaagagcacaatattctgtctgtagaatggacaagtataattatctcaagttctccactagtagacagataaactcagaagatcagtatattgcatgttatctgttgtgatggttaacattgagtgttatcctgattgaattgaaggatgcaaagtgttgttcctaggtgtgtctgtgagggtattgccaaaggagatt

SEQ ID NO: 588492 - DNA, 4001 bp, Homo sapiens
tagtttcctctcctgtaaaatggcaataatgtacttgtgcctacctgaggggtgcttgtggagaagattaaatccgattatctatgtgggatctcagcacagtgcctatttcattagaatttctcagtaaacagcaactgctaatggcagtaatagccactataacccaagttcccgagttttggtacaaagacaaaaacctaaccagtcagtccatgctgaccaggtgcccaaagagctcctagaaaagcttgatttttttcccggtgtaagccctgggaaaaattaatgccctctctatcccacctaaacttccctttctcctatgtttcctggctttttgcttggtttgaaactggacttaaactgctgcacctctttcatttggctttaggaactatgtggcgtccgcaatgcagagcaacagaaaactggacaggacattcctggaattctgtatgaacaaggcagtggggactggaagcaggcttagttttttgaaaaactagggagaaaactaaccagatggctagggtataaaaaggttcttcttcctctgatgcctgtgccatgccagcagacagggacccacagctcccctaagatacccacacatcttggctgtcccatgatgagcagaataaagagattgctgcttaatagtgtcatggaagtaaatgggacttctcacccttaagcttgcagggatggtggggggcacataattatttaaaaatctttcgaggagcaaagtatcccccaaataacgtgggaaggttagggagaacacaaaagctgacatattcctctggctattcctgatggccagctcaattctaactttatgatgagagaatctggagcacacagtaggaggaatgggaaccccaggtttagttccagaccctccagctttccttttctcttttaatcccacagcagttcatgccatatttattcccccataaggttcaggtccccttattgtctcttaccttatatattccacatggctttcttgaattttaaattccttaaaggcaggggccagaaagtatactactttgcaggtatattttaaaaagaacaactaataggtacttggcaattttataatatggatggttatataaatcaaatcgaaattaaaactgccatgttgacttttgcaccaaaaataatttattttccaaaataaaatttaaataaataaaaataactcataatttaataaaaatttcaaaatcttctagtgtcctttcatatgcagtacattagccatcagtcacttaaacagcatctgctggttgaagaatgcttgaagcaattgtccagtcccagaggcacaggctaggagatcttcagtttcggaggtaacctgtaagtctgttaatgaagtaaaagttccttaggatttccactctgactatggtccaggcacagtgactgtactccttggccttcaggtaatgcagaatcctcccataatatcttttcaggtgcagactgctcatgagttttcccctggtgaaatcttctttctccagtttttcttccaggactgtcttcagatggtttatctgatgatagacattagccaggaggttctcaacaatagtctcattccagccagtgctagatgaatcttgtctgaaaatagcaaagatgttctggagcatctcatagatggtcaatgcggcgtcctccttctggaactgctgcagctgcttaatctcctcagggatgtcaaagttcatcctgtccttgaggcagtattcaagcctcccattcaattgccacaggagcttctgacactgaaaattgctgcttctttgtaggaatccaagcaagttgtagctcatggaaagagctgtagtggagaagcacaacaggagagcaatttggaggagacacttgttggtcatgttgacaacacgaacagtgtcgcctactacctgttgtgccagagcaaaggcttcgaaaggttgcagttagaatgtcctttctccatgggtatggcctatttatatgagatggtcctctctctattcagaggaatttcccactttcacttctccctttcagttttcctatgtcatttacattttagtagtttctaaaactctttatttaagctcctatcttatgatatatataatagggaaaaagatttacaaactgtgaggttttctaatgttttttaaagtttcagtgaatgactaaagcaaattgtaaaacaagacttgggagaaagcaaaggaaagcaaacgacctgagaattcaagaacctcaaaacactaaaagatacagttggtccttcctatccataggttctgtatccgtggattctactgactgtagatggaaaatattttttaaaaatacaataaaaataataatacaacaacaaaaaataatgtaaattttaaagatacagtgttacagctatttagcatttatattgtatcaggtattataagtaatctagggatgatttaaaatatacagaaatacatgtgcagattatatgcaaatactgcaacgttttataagagggaattgagcatcctctgattttggtatctgtggaggcagcgggatggtggtcctagaaccaatcttctttggatactgaaagactgagagatagatttactgaaaagtcaatcagggaatagtagctgaaactgcaaggagttttgcccaatatgataatagattagtgtgagagggccttggaaacttctgaaaggcactggaatagtctagggtataagaaattttcaaaccaaccagtcacagcccttttgatcctacacagaggagaaactgccacaagtggaatcacacttcagcaggatataaacaacacagacaaggatagagaaggcccaaccagggtgggatggagaactcagaaggcaggctgctatgtttttgaccatttcacaaaagctaacagaagagggagctctgtgaagttagaaaaaccgccctgaaccacttcctggttcaggaaaaataagctcttacaagaccaaacaacagaaaagtattaagatggaatctcatacaaagttattaatagaaaaaagagaaggctttgggaagatggctgattagaagcagttgtggtctgtggcactctgctctttggccaggatggtctgactgccctgagcctgtcatgctgtgagaaagcccaaactagcttacaaggagagaccatgaaaattggcagtgtatttcaaaatttaaaatttcaagcaatgagattgttcctttaacttgcaataccgttactagttatttactatggctatccctgcagaaatatgcatgtgtatgtgcatgtgtattatagatacatacaaaacatatataaatgttgattatattactatcatagtaacaaagacaaatgtccatcagcagggagcttgtcaagtaatactatcacgtggacaagatggaatattattcagccatcaaaaaggacaatcagctgatatagacacatatcacagatacatttagtgaaaagagcaatacacataagaaaggatatgatattatcatttgttttgtaagttactagaaaggtatacatatgatgctgttatatgcatatgattttttcctttgggtagaattactatctattaatagtagttaccctggggaataatgctgatggggtgaggatgcagcaaggaagaaaaatctttatcttttcacttcatacctttagaactatctgcatatgagtttttccttgtaatgagaagaggtctgggaaatagggttattaggccactagggaattaggttgttacatttgtaatttcgtgcacttggagaaaatttaataaatattactaaattttaacatttattttgttttatttgcatttaaaatgttctattatgagcatatattatttttgtcattaggaaatttgaaagacaccagttaatattgaaaaatagaacataaaatt

SEQ ID NO: 588493 - DNA, 4001 bp, Homo sapiens
ggccaggctggtctcgaactcctgaccttgtgatccaccctcctcagcctcccaaagtgctaggattacaggcctgagccaccacgcccagctgtgggcaagtatttttataggacacatttccaggcctagaatttatagatgaaaggctacatgcatctgtaatagatatcacctaattgcctccatagtggttgtactataaatggcatgcatgctatttaatttgtatttctattatcatgagtgagattgaacctcttttaatgtagttttttttctctgcaaactgttcatgtcctttcaccatatttctattgtgtctcctgtaatgtaaatattcactgtgtaataatattttcaaatcttaaaatgcaaattattcccaatatttctcattgtctctagcaatttctggcaaataagcaaatcattgcaatggagttctatgttaaggaaagtatttttacattagtggcatattttattgtatctacccagccagcctgtatgaaaatacacccatttgaagaatcaaccatattaatgaatttattttgacatacaaacaatttaaaatggatagaatatataaagccacattacaaaataaaaacaattgtggtcaatatgcacaatcttaaaacacagataaatatatatatacacaaaatcaaagcaatgtgattgtactataaattgtattaccactctatgaagaatcatgtctggagaagtcctctagtccctccacctacctcgggcttctaaactctgtagtaagctcttgcttcatgtcgttcaagggtcttccttgtttgctcagtttttctgtgagactgaacacaaagaacagacatcggctgatttctacttggacaatggcccaggcacaggtgctgtagtcctggttttccaggtaatcatggatccttcggaagtacattttaacttgtaatctaaggttatcactacccaaagtaccacttagcttctctgcttccagtcccatgagtgcttctaggtattctagctgttgatgaagttgaatgaggaatttctccgtgtggttttcctcccaaccatccagagaaatatttgccctgaagaggctgaagatctgctgaagcatctcatggagaatggccagagtgtgtcctttttggtactgctgaggactcaaagacttctgaggaagcagaaagtttttcctgtgtggtagacactgctgaattgacaaggtttgcaacttattcaagagttttaaactttcttgattcacttgtctttgctggaagataatcagtttcaaatctagagagaagatagtggtagaggccagcagcaccaacacagttccaaagaagtgcttgataatcatggtgaaggtcaaatatgctacttatccctgcatagacttagggaaattccagctctagtgaatgtttgcctttcatgcatctcagattattttggagagtgttctcttttgttgctttcgttttctaatgtcatttctccaagtttacacattagattttcaggttcccttttcatggtgttcagagtacattttctccatttccctattgtgttggctattttgaggaagtaccaaaataacttattcattgtatgctttccttgaggcaattacagactagtcatccaacataatcttttattattctattcattatatacaaagtttcactgaacacaatgtgctttctaaatatttagtcaagcttattaaagttcttttattgagattacgtttttttcagtaatagtctttcatggagtaaaacttaccaaaggcttatcagcacctataaagaattcaggggcaaaacttaaaatacctacaaactactaaatttaaaacctcaattagaactgtaaattgtcacaaatgcttgagcaaataattaattttaaaacatatatcagcaatcttaaattattttatatcttatcctatcagtttaatatctaagattctagcctatagaagcaatgcaaaaaaattagcaaaagaagagtgttataatattattgcaaagcagaatattagaaacaacctataggttcaacgacaggtgaatgattacatatatgttggtacagccatataattaaatgatatatatccattatagatgacaaaattatatgtgaagagagattgggggcatttggttagcgtatattccctagaatagtgatagctctggtaaactaatgtgaacatctctacattaacaatgtcctttgaattacaaatacccagttccatattctaagttcctcttgaataagcccccaatatacctttccaatcttatcccactgttgctctaaatatagtgtgaaggaatctgaactccagataaagtaagtgatttagtattcccttaatacagctagcacttgtgtgtgtgtgtgtttattgatgatgctttctctgaaacatcaactgttgcctcctttacctcaagaacctttctgtgcaaggactaaagactacttgtcctttaaggcccagatctcccccaaggagccataatcttctggatccccacaacactttgtacctaccttatttaagacacctttcttgttctgtcttatacttgactatgtacttacatgattaaaagtctcttcagagtgtgaaataaacactgattactgatttctttgctgtctatacaactatagtagttgcttaataaatatgtgttgacttggaataaattaatatgttctacacaaagtaatacaagatgttgagtcttatctttaatcatttctctgcaggcagctgggtgaatccctaaatgtcaaaaacaggcactctgtaaacatgtatggtctcattatataccagctcagctgtatgtttggtcacttagtctagtattaataagttgaaataaactcagtcagcatgctccacagagggtcttttccctccctatctgagagagagagagagagagagagagagagagaaagagaaagagagagaaaagacatatgataatatataatatacgaaaggaataacacttgtttcataacattatgctcaatctatctggaaagtagaattttgactagtctcaaaaaatctttaaatatttaatgctgagcttcgggaaaacaatataaaaataaattaagaatatcagaagttactccatctaataacaacgagctctgatctataaggctttctcatcattttcattcaattgacaaaaatgatctaaatgttgtttaatttccaaatgatcagggattttccagatgcctttctgttactgatttcatatttgaatctgttgtggttaaagaatgtagtttaaatttattgagacttattttatggcttagaatatggtttatcttggtgacagttccttgtgaacttgaaataataatgttctacttttgttggttggactgttttataaatgtcaaataggttaagctgattgaaagtgtttgaaattttctgtatcctttctgatggtctatttgttctatcaactatcaagacagaagagctgaaatccctagtataattttagatttgcctatctcccatttcagttctatcagtttttgccttatatattttagaactttagtattaggtgcatcatatttaggattattatgtcgtcttgatgaattgacccctttattttaaaatgttcctctgtatcctttgcattattccttactcctaaatcaactttctctgataatcatttctgtttttttaattagtgttagcataatatgtcttttattgcatcttttaatttaacttattcatgttattatattaaagtgagtttcttgtacagagcgtatagttggaccttgtattttattctgtctgacaatctttgctttattagagtgtttaggtcattaaatttaatgtaattgtcagtatggctcagtttatatctaccactttattg

SEQ ID NO: 588494 - DNA, 4001 bp, Homo sapiens
tgatccttctgctgatagcctgcatataccatgatccacaatttgttcttgttcttttaaacatctcttctaacttcttggctgaaatttgcctcacttttatcataagactttctttggctataacatttgggccctgcgcttggaataatcttgaatctgaacagtttggcagcatgctgttagtggcatgagcaggaaatggcttccaagggcagaaccaggtacatttcagatatatttcacccttttttggtgcatttgcgtagccacaatctctgttaattcttgcttgaaggtagatgattctgaaatggggtagatagaggtgcgagaggaagagaaaatccatgtcagctaggtggtgaattaatatagatgaagggccgtgctagaaaagtaaataatctaggtagtctggctgcaaagtaacttttaaaaagataaaagatattaaagtattatgtattattggaatagctagttaaattaactcacagaatgtagtcttctaactaggaaaatctaatgtaaaattgttccatattatgactctggacattttatttcaggcacatgaaaaacagtaaaagacagattctgtaccatacttttccacagcattttccatgcctttagatgtaggaatcaaacaatatacatcaggaatgaagagtgtgctacattagaatcacagactctcaaaggttaaatgaaagcttaatggtcgtctaattcaaccatccatccaatttcactatggatcttcactcttaaagtaatgaaatactattccacaagcatcaattcaaacaaaccaagctgagaaggaaatgggccagaaatgtcaacctttttccccccgagcaggagggggaaaatgcaagagtattgactctagggagcatgtataagctcttttaatgtgctgaattttcataggataagcaaccttggcagcaaaacagttaagtcattgaaatgttaccattttgcaacattctctgctccctatcctctagccattgtcttggtgaagtccacaggtggtatatatagcaaagctctttcaaaatggccacagaaaagagcaagagagaatagaagaagacggagagggaatcttattcctttaaaaatgtcttaaagactttctaaggagactcttggtcaccctgaggatggttggcattacctctccttagagaggtgagtgtccctgatgttccgaggctaccagtccaactgaggacaggcttacaggacagcacaacaatccttaaaaagaagttggaggaggagaaggagaaagagatttcggagggaaaaggaattttaattccaaaaatataccttatttcctcctgaatagagctgtaaatttgtaaaagtaatacaaacatcttctgatttccactcggacaatctcccaggcacagtcactgtatttcttttctttcaggaaattgtctatcctgtggaaatatctcctcagttccaggctgctcagctgggggaccctggcttctgagggtttcatctcattctctttcatttctttcatgtcttcattttcattcttgtcttcctccaagcattggttcaggtactctgcttgctgatcaagtcctatttggatttgtttgaggtgtctctctttccaatatttgaaggtgtgttggctgaagatgttgaaggcctgtagggacatttcatagaaggccttcttgatgtccctcttcataggttgggtgtattgcagaaactcttggggcaactcaaaagctatgttttctcgtagacattctacaggaaatgaattgctcatactactcagatgtctcagattttgccaggtgactcttctcaggtgaacgttcagtaagttacagtccagggatagggtgccagcaatgaatatacccataaggatctcaagccacaaacacttttgaatcatatcaggtttggtgctcattttttttgcaagctaaaaaatccagaagatgtgtatatgacaatgatgttttgagttttccttcatgtgcctttatatacctgaatatcttcagcaggaggagttttctcattcgtcatttcacagttaaccaaggttgcggcccctttcctttgcctctgaggctttttttttttttttttttttacttcgggtgactatgccgactttggaagtgataacttttttttttccctgaaaaatgagcaaagaattaccatcgtgttaccttaaatgcctggatgatccatcccagcactaaggaatcatcataacaagactgatgcagggtatttcagaaagccaaaagctgtgagtccatgcactcactcactcactcactcacccaaatctattacataagagggagtgatccttcatgaaaatatattttttgtacctggtgctatagccaaacatcctgtctcattgagttaatcatagacattgaccaaatgactgtgattatttgattgctaggtcaccagagcacagtatagtttaggtttttccaattttgttaaattaagcttctatatttggatattttctctttttgatttttctggatctccaaaaagatgaagaatagagctggcacttactaagtaggagactaagttggcttggttttctgttgcattagaaaatgttgataatctctaaatatccttttcttcagttaaatccatcctggacttagccttccatatgcctctgatacctttcttaaaagtcctggagggggttttatatttgagaatatctttctgcctcattaacttctctcttgtagtatcattttcttttcttttcttttcttttttttttttggtgcagtttaggcagtatttttaaacttttgcttgattgcttgattattatatcttcttgcctggtggttctggattctgtaaaggcttttgtttgctcctgtgtttgttgtgcactgaggaggtatgtgagtaggaagtcacccatttagctaagtgaattcctagctggaccaatgttactgtggtaatgatggctatctattgtttatggtttttactttgtttgaccaaataaccttcctctgattatggttaaagcaaatggattcttttctccaggaaaataaaatggattgtcattttaaaaaggtagcttattatatcttctcaagaaaaaaaagatatacattaatttgcaattaagtcattgtaaaatggtaaatagccacagttccacaaacatggcagactttgattgaaaagttggcttaaaaagttcttgtctaaatcagttgactgcaccaaaggctaattgtgggtaagtgggatttcttaaaatcctggcttttaggaaaggtttcttacggaaaaaaatatatatatatatattattctatttgttccatctacataaattcttatttcatgggcagatttcttgggctgaccaaatttggaaaacattaagaaaacaagcccttttatatagcgttataaattgacacaaccttcctagagaggaaagtggtgatatggatcaaaagccttaaaaatgtacataatatttgactcagcgattgatcctctaggaactgattccccagaaataatgatgatgcccttaaagacttagctgtaaggaagtttgtcacagcaaaaaatggaaaacaattttaatgttcagcaataaatacttagttaagtaagccatcagtagaaaacatatatgtaagcactaaaaattatgtgtgggaatatatttggtcacttggatagatacactttgtagtttaaaaaacaagcttatatttgcatatagaggctgataccacttttgttaaatatagacatatgcatatatatatatatatatatatatatgaaaaaatgtcttgatatatatgcaaaaattttgagtcactatctctaactggaagaataatgggtggtttttatttttatatttttatttacctggattttttaag

SEQ ID NO: 588495 - DNA, 4001 bp, Homo sapiens
tttcatgtctcccaggcacctcaaaaaggacatctaatatttttctttctcaacatcatttgcacctaaagcttctagtatgagaacatcattttcttttacttatctttgtagtgtttcatataagcgaaattggtacatctttactgtttcttttcctgtaagaatgaaagctcttcaacacggaaagaaactgtgtttattcacctgtatttcttttttaaaataactttttaatttttgtgggtacatagtaagtgtatatatttattggttacatgagatattttgatacagtcatgcaatgagtacacctgcattgcttgacatcaattccaaaatatgccactttgatactcactttatacatattatgtaaatggaatgaatgaataggtaagtgtatattaccgtccattccttgatttggttcagaaaactagtgtttggattttggttttcgaataaataacttcaagaagttttgtttgaaaataatttaataaataacaaaatacaatatttaaccaaatggaaagctgaacatgttttgttatcttaatacaatgtaaaggcaaacatttgttatataagaatataaatagtataaatatgataaaatgtaagaataaataaatgagtaaaaataaataacatcttagggactgatgcccctgaacctaagtctttttaacatatactggcttaatataccgacaaagtatttgcagaactaattcagtcaattctgtgattaaagccgaaataagagtcttttgaattgaccagagtcacatgtgcaagtgttatatggcaaattaatcaatgagaatcatttcaagatgagcccaggtctctatctttacttctcagtctttcttgcatgtttgttgataagaacaaggatttcatgatttccattctgacaacttcccaggcacagtcgctgtatttcttctctttcaggtagacacggattccctggaagtacctcctcaaggtcagtgcagggctgctaattgccccagcagattctccttctcccactacctgcagcaagcaggtctccaggtgttgcagttgctgatgaagtccagtgtggagttggtctaggagggtcatgttccaggcagcagaggagcgctctgtgtggaagaggctgaagatctgctgcagcatctcatggaggacagacatgacatgggccttctgcaactggctcccttttaccatctcctgggggaacctgaagtctcttctgtccttgagacacaagaaaggggagattctcctcatttggtgcagaagcaccaaggtgttcctgctaagtaggccatggttctgaggcagatcacagcccagagatccaacagggctatagctggtcatcactagggctgccagtagagggaacaggagggccattgggaaatgaggatgctcctggctttactgagctgggatatggcttaaccttggaccctaggttttctgaagacattgcttgtatgcatggcttttaataggaaacacatggttttcattttctgaacatttctctgtactttcagtttcttttactgttttcatttgtgtgttctccctatgaccttaagaggatgacaacaatctattaattttgcattagacttcagctaaactccagtaaacttcagctgtgtcaatacaaatgaatgcttaatcaaatgaaaaacgtctgggtactaaagtcataagtgtatatactatatgcatgtaaataatcagacacacactacactaacaatatatatattatatatttatgtatacacactatagtgaatatatgtatatatgtgtatatataatatatattcatatatatatgaaaaaaatcattttctctgttctagaagcaaaattttaacccttattctagcctccatttttaccctccttactttatgtaggaagtcaggccctataggtttctatatttgcttcaggtttaccagatcatctgcagcaaataagctctttagaaccaagaacagcattttgctgttgtttgtttgttttttagagatggggtcttaatccgtcacccaggttggagtgtggtggcatgatcagaggtcactgcagcctttaactcctgggctcaagcaatctctgtgcctcagccccctgagtacctgggacaacaggtgtgcaccatcatgcctggctaatttttttgttgttgttgttgttagagatgaggtcccactatgttgttcaggctggtctcaaactcctggcctgaagctgaggcctcctgcctcagcctcccaagtagttggaattacagatatgagccaaaaacgcagttttgtttgctgttttattcacaacagaggatgatgatgattagcgaatgagcttctctgacatttttcttccttctagaaaacattcatgcaggtccatgtggttacgcttcactgggaccacaaggtgaagattaatatagacactgctttttctttccatcatttgcttactgaggtcaatagtgctcccctatctgtcaatatcccagctggaatcctgattctttacaagcgcatatggatgtagagattctaattcgcagatattttactttcccagcgtctcctcacacacaaggtagttatcacatctagtaataccttttcctctagagtaacaaatactctcaacccaaactcttccagactcgctcccagggagcagtctcacaacatcctgataacttcagaactcttttggtgagagggtagtggttactttgtgagcaaagcaactaaccctccaagacccttgccggtgcccctagagtgtttgtctggaggaccctggctctcagtggcgacctcctttcctcctgacccatgtgtccaggtatcaaaagtttcgacagccctcaggtactgatagcaaaggtttcttttgtctaaggaaggtggaaggattacccaattataatcattttaccttcattagtcaaataattttccaccatttgcttactgaggtcaatagtgctccactggctgtgtcagtatcccagctcggaatcctgacacggtttttattgttcaattcttttacgtaagctattgaacatttgttatcctcagtgtttctcaggtgggcacaggggatcaatgatgatgttgtctttcattagaagcttatatgtgccaaattttctagatccagtctatcgttgttggacatttgggttggttccaagtctttgctattgtgaatagtcccgcaataaacatacgtgtgcatgtgtctttatagcagcatgatttgtaatcctttgggtatatacccagtaatgggatggctgggtcaaatggtatttctagttctagatccctgaggaatcgccacgctgacttccacaatggtcgaactagtttacagtcccaccaacagtgtaaaagtgttcctgtttctccacatcctctccagcacctgttgtttcctgacttgttgatgatcgccattctaactggtgtgagatggtatctcattgtggttttgatttgcatttctctgatggccagtgatgatgagcattttttcatgtgtcttttggctgcataaatgtcttcttttgagaagtgtctgttcatatccttcgcccactttttgatggggttgtttgtttttttcttgtaactttgtttgagttcattgtagattctggatattagccctttgtcatatgagtagattgcaaaaattttctcccattctgtaggttgcctgttcactctgatggtagtttcttttgctgtgcagaagctctttagtttaattagatcccatttgtcaattttggcttttgttgccattgcttttggtgttttagacatgaagtccttgcccctgcctatgtcctgaatggtattgcctaggttttcttctagggtttttatggttttaggtctaacatttaagtctttaatccatcttga

SEQ ID NO: 588496 - DNA, 4001 bp, Homo sapiens
aacaaggcaaattcttcatgtgtgaaatgggaataatactatctaccttgcagggttattgtgagaactaaatgagagactgtgaaaattggtaaactgaatactataccaagttgaaaaacatttcctattatataggaggcagtaaattagatggttaagattcatgtaaaataaaggtcttgataataataaaatgtagtccggtagaaaagacagacataaaagaacatattagaatgcagtaaatactatattgacaacagacaaaactgcattggttccccagaggaactagaaaaaaacagaagataaactggtgttgaactatgacagatggagaaagtggaattctaagtttaaaaaaaaaatgcatgtacaaagagcatagagacatggagagcatacagcataatgtgttcagggaattgtgacaaattcgaaatgtctagagtaagagagataacagagggagatgaatctagtaaaacagattagggagattgtgtgaaaggccctatgtaatgctgtactataagaatggaaagccggccaggcgtggtggctcacgcttataatccagcactttggaaggcagaggagggcagattatgaggtcaagagattgagactatcctggccaacatggtgaaactcgtttctactaaaaacacaaaatttagctgggcatggtggcgcgctcctgtagtcccagctactcgggaggctgaggcaggaatcgcttgaacccgggaggcgagggttgcagtgagccgagatcgcgccactgcactcagcctggcagcagagcgacactccgtctcaaaaaaaaaaaaaaaaaaaaaaaaaaaaaaaaaaaaaaaataatggaaagccatcacaggttgtcaaacagagaaaaaacaattaagtgtatatttcagaaagataattatattttaatgtgtaggattggctggagagaaggggtagaaaggccagagaaatgttgaaataatttaagtaggactaattggtacagatttctaacagatagctagaaatacagatctagagtttggagaagacaatatgggaatacagctctagaaataagccaagtagtaaataatccacccagggaggggatatgatagcaaagaagtatcaaaagtcagcatttcaagaatgatctcccaaaccaggggaaaagtgattccaaacctagagtaggagttttaggaagggagaagtcagaaaagtgtgaattgggcttagcaatttagaaaggtttgtggaaaagtgtagttggatgcgagagaatagcggatgggaagaaaacaaagtaaggagacaggtcatgtttaccctggcactcaataaggtctgataatgactagcaagtagcaccacgggtgggtgggcggcggggttgttaaaaatacgtatctcagctctaactcagacctactgaatcagaatctacattttaacaagccgccagagaaaagtagttatacctttaaaaaattgacttggaccaccgtatttgctaaatttgacaacagagagtaggagattcagataacttgaaacggaggaatagttcaatgattaatagttcccaatttggcctcaagctttctcgttttaattgaaaaacaaggttaacttgcaaaaacctcgagattctcagggaaaagcagtgaggatgacctaacagtagacaccaaacaacctcactcagccattccgccatgcccagcgcgaaagactcaggtttaaaatatccggattcggcgcgccggatgtccacgccagctggcgcggcattatgggaattgtagtcccggcccgcttcccgatttaccacaaactgttgggcccggagtcggaagagacccgggtttgggaaggaccccagggtcaggcgtcctggtggaagggcgggcctctttctctcttgctcagcagggagtccagagccctggaggaaagccagctcagctccgcatcggcgtcggcggttgggacgcacacactctgcgtcatggagggctgaggccgatgatgaattccggagtgcctgtcaggcttgctgtgtcactcggcccgctcggcgcgccccttcccagccgcccttccgtaccggctctcgggctcttccggtctccggccgccccttacctgcaggctcttctcccgccgcggcccggcgctctccgagtcgcccctgcggactggtctcgcacagtgcctgggcaccgggcgccagacagacactggccatgacgagcggcgcaaccaggtaccggctgagctgctcgctccggggccacgagctggacgtacggggcctggtgtgctgcgcctatccgccgggagcctttgtgtccgtgtcccgagaccgcaccacccgcctctgggccccagacaggtgagcgctgggagtcgggttgccccggctgtgttgcacgcttcccggagagtggaaggagagtgacccttccctgtcagtcctgccgtctctctctccccccagccttccctctgctctccgctcccttccaattctcagactattagaactctgtaagaaaccatcgggatttaagtggaaagagcacagggttgggggaccaaagacctgccttgttgtgctaacttgaccacagacgagtctcctaccttttgggccttcagtttttggacgatgatctcccaagtttcttttagacttgaaaatttactgattgcagttgcaccctccgaagtgaggtagtttgaaggcatctgaaatgtcctctttttttttttttttcgaagaagatgctctgtagtcttctgtaaaatttaatttttgaagactttagttctcaaaaattgcactggtgaatcctcttttcgtccaggttagaattttagtctgtggtctgtgctggtcctgagggagtgaaacctctcggatgttttgtttctgtgcatgtgctgtttcttgaggagaagcagcatccattgccttcaaaggatttatcagaagggttcacgaaccaaaaaaaaaaagaagaaaaaggttaggaatcagtcctgatcgagttcacgggttcagccctgatttggctggttgtaacaggatatttaagacctagaagacagattgcagttcagagaaagaaaaattgaggttagttattttgttatttagtaggtctcccactgctagagattttagaatttgagtcaccatccataaattcagttgataactgttgagtgcctcctctttgtttgggatactggagaggaataaagacagacaagttgccagtgtttctggagctttcttacagtctgatggggaagatagattaaaaaacaagccaataaataattaaaaactggcatgtgaagaaaacatacagttaattaggtggagagatatattaaaggaagcctctctgaggagttgtttgtttaaagttgacatttgaagcatgagatggatggagctggtcgtggaagagcaaatagggaggattgaattggaagagcattccaggcagctggaggagcaaacaggagggaattagctgtgaggtgagggcaggttttgaggctggcaagagccaggttatggagtttgcagatggaagccttcaaatagtttcaagcagggagcaacatgatctgatttccgtgttgagaagtttctgctagctgatggtagagaatagattgagaagggataagtgtagaagtgggtttgcttggaggcttttgaagtagtataatcaacacaagatggtccactaggctagggatagtatagagcaaattcctgtattgaattgaatgagatgatctctaaagatctaactctaaaattctataatatccaaaactacttagtaatactaatatggaactttttgtttgagtacagttattaagtttttgcctttaaaattgaatccagtagaagcataagcccagtagaatataaccattgcagtaaggagtat

SEQ ID NO: 588497 - DNA, 4001 bp, Homo sapiens
tgcattggttccccagaggaactagaaaaaaacagaagataaactggtgttgaactatgacagatggagaaagtggaattctaagtttaaaaaaaaaatgcatgtacaaagagcatagagacatggagagcatacagcataatgtgttcagggaattgtgacaaattcgaaatgtctagagtaagagagataacagagggagatgaatctagtaaaacagattagggagattgtgtgaaaggccctatgtaatgctgtactataagaatggaaagccggccaggcgtggtggctcacgcttataatccagcactttggaaggcagaggagggcagattatgaggtcaagagattgagactatcctggccaacatggtgaaactcgtttctactaaaaacacaaaatttagctgggcatggtggcgcgctcctgtagtcccagctactcgggaggctgaggcaggaatcgcttgaacccgggaggcgagggttgcagtgagccgagatcgcgccactgcactcagcctggcagcagagcgacactccgtctcaaaaaaaaaaaaaaaaaaaaaaaaaaaaaaaaaaaaaaaataatggaaagccatcacaggttgtcaaacagagaaaaaacaattaagtgtatatttcagaaagataattatattttaatgtgtaggattggctggagagaaggggtagaaaggccagagaaatgttgaaataatttaagtaggactaattggtacagatttctaacagatagctagaaatacagatctagagtttggagaagacaatatgggaatacagctctagaaataagccaagtagtaaataatccacccagggaggggatatgatagcaaagaagtatcaaaagtcagcatttcaagaatgatctcccaaaccaggggaaaagtgattccaaacctagagtaggagttttaggaagggagaagtcagaaaagtgtgaattgggcttagcaatttagaaaggtttgtggaaaagtgtagttggatgcgagagaatagcggatgggaagaaaacaaagtaaggagacaggtcatgtttaccctggcactcaataaggtctgataatgactagcaagtagcaccacgggtgggtgggcggcggggttgttaaaaatacgtatctcagctctaactcagacctactgaatcagaatctacattttaacaagccgccagagaaaagtagttatacctttaaaaaattgacttggaccaccgtatttgctaaatttgacaacagagagtaggagattcagataacttgaaacggaggaatagttcaatgattaatagttcccaatttggcctcaagctttctcgttttaattgaaaaacaaggttaacttgcaaaaacctcgagattctcagggaaaagcagtgaggatgacctaacagtagacaccaaacaacctcactcagccattccgccatgcccagcgcgaaagactcaggtttaaaatatccggattcggcgcgccggatgtccacgccagctggcgcggcattatgggaattgtagtcccggcccgcttcccgatttaccacaaactgttgggcccggagtcggaagagacccgggtttgggaaggaccccagggtcaggcgtcctggtggaagggcgggcctctttctctcttgctcagcagggagtccagagccctggaggaaagccagctcagctccgcatcggcgtcggcggttgggacgcacacactctgcgtcatggagggctgaggccgatgatgaattccggagtgcctgtcaggcttgctgtgtcactcggcccgctcggcgcgccccttcccagccgcccttccgtaccggctctcgggctcttccggtctccggccgccccttacctgcaggctcttctcccgccgcggcccggcgctctccgagtcgcccctgcggactggtctcgcacagtgcctgggcaccgggcgccagacagacactggccatgacgagcggcgcaaccaggtaccggctgagctgctcgctccggggccacgagctggacgtacggggcctggtgtgctgcgcctatccgccgggagcctttgtgtccgtgtcccgagaccgcaccacccgcctctgggccccagacaggtgagcgctgggagtcgggttgccccggctgtgttgcacgcttcccggagagtggaaggagagtgacccttccctgtcagtcctgccgtctctctctccccccagccttccctctgctctccgctcccttccaattctcagactattagaactctgtaagaaaccatcgggatttaagtggaaagagcacagggttgggggaccaaagacctgccttgttgtgctaacttgaccacagacgagtctcctaccttttgggccttcagtttttggacgatgatctcccaagtttcttttagacttgaaaatttactgattgcagttgcaccctccgaagtgaggtagtttgaaggcatctgaaatgtcctctttttttttttttttcgaagaagatgctctgtagtcttctgtaaaatttaatttttgaagactttagttctcaaaaattgcactggtgaatcctcttttcgtccaggttagaattttagtctgtggtctgtgctggtcctgagggagtgaaacctctcggatgttttgtttctgtgcatgtgctgtttcttgaggagaagcagcatccattgccttcaaaggatttatcagaagggttcacgaaccaaaaaaaaaaagaagaaaaaggttaggaatcagtcctgatcgagttcacgggttcagccctgatttggctggttgtaacaggatatttaagacctagaagacagattgcagttcagagaaagaaaaattgaggttagttattttgttatttagtaggtctcccactgctagagattttagaatttgagtcaccatccataaattcagttgataactgttgagtgcctcctctttgtttgggatactggagaggaataaagacagacaagttgccagtgtttctggagctttcttacagtctgatggggaagatagattaaaaaacaagccaataaataattaaaaactggcatgtgaagaaaacatacagttaattaggtggagagatatattaaaggaagcctctctgaggagttgtttgtttaaagttgacatttgaagcatgagatggatggagctggtcgtggaagagcaaatagggaggattgaattggaagagcattccaggcagctggaggagcaaacaggagggaattagctgtgaggtgagggcaggttttgaggctggcaagagccaggttatggagtttgcagatggaagccttcaaatagtttcaagcagggagcaacatgatctgatttccgtgttgagaagtttctgctagctgatggtagagaatagattgagaagggataagtgtagaagtgggtttgcttggaggcttttgaagtagtataatcaacacaagatggtccactaggctagggatagtatagagcaaattcctgtattgaattgaatgagatgatctctaaagatctaactctaaaattctataatatccaaaactacttagtaatactaatatggaactttttgtttgagtacagttattaagtttttgcctttaaaattgaatccagtagaagcataagcccagtagaatataaccattgcagtaaggagtataatcaaggatgcctgttttaataatggaatcctgtcattaaacttttgggactgtactagtttgacaagggtttaatcactggagtggttgtgcttaccaggaacttgaagaactttgggctgaactgattctctatttgaaaagtgattttgttgttcattgaactattgattttttttttttgagacagagttttgctcttgttgcccaggctggagtgcaatggcacaatcttggctcactgcaacctccgcctccggggttcaagcgat

SEQ ID NO: 588498 - DNA, 4001 bp, Homo sapiens
tgggaatccttccatgaccagtccataactggtcttggaatcttcgtcttcttcaatttcagtgtataggcctgttctacatgctaccatgcatcctgtgtattactttattccagaacctatcacaccacttgaaatgatctgcttaagtatttctcaccctttatggcaagagctgaatcttaatcatctttatatccccaaaatctgtctcagtgataagcaaaaactttgttctctcttgtatcttttaaatttcctcgtacataaaggtattgccaattacaaaaatttactaaattgttaaaaagcaaacaaagcgaccgggagcggtggctcacgcctgtaatcccagaactttgggaggccgaggcgggtggatcacgagatcaggagatggagaccatcctggctaacatagtgaaaccctatctctactaaaaatacaaaaaaaaaattatccgggcgtggtggcgggcgtagtcccaggaggcggagcttgcagtgagccgagatcgcgccactgcactccagcctgggcgactgagcaagactccgtctcaaaaaaaaaaaaggcaaacaaagcgtgtgttggactaaaatgatttctctgtttctacactctatgtccagtactacttttctgacttttcttagcattactcgtaatcagtccttggactgcttctatcctttctacagtcatgcatctttataactccaactatgtgtacggctcactaatcaatgtctacagttctgccctttcaactgggcaccaattttgagttttcaattgtttatctgaaatttccattcagatatctcatttgaatatgttcacatcaatcttcctgaccccactagctccctgattctaattccttgccattttgaactctatgtacaaagcaaaagaatttcaaatggaaaaaggaatttcatgaaatgactctttgaaaaggaagacggtgtatgatcaaaatggtttttccagaagaaaacgagtacaataaacatctctttccagtggaaaagatattactctaggtttcctgctaactttgagaaaatgtacaacataaaaaatttcacccaattttctttgccaccgttttactgtggtgaaaaaaagcttaccattatattattaccagtgggattaagaggcgggcattagcaacaaatataccactaacttcggggttattcaatcaaagagtcacacaatttccaattattcacacagagaggcagcctggcctttggatccagaatgattagcgatacaaactagtgctgacaaagttagcggctgcataatcttgccaccttaattaacccctcaggatttcatcttctgtaaaacagaagggtgacatctaccttgcagggctgttgtgaagacgataagtattacatttaaaacatctgcttctaattattattactatcgttatcctccctaagccaaccattctcacacaggtgaataagtggaaagttgctaactgcccgcactgtgatcaacagacagaaataagtcccttccactgtaagaggcagaaatgtattgctttgactaaaatccttcagcccatcgcggtccttccctctgctctgtgcttggcgggtctcctgcggggggtcggggaggggtcgggctgttggaggaggtctgttcgcaaccttcgctcgactagaattggtacatgcctggcctggctacaggcccgacggtaacagttagctaagaccgagtttgaatttgttttgtttggagcggatcagcatctccaaggcaagagaacagacgtgggagggagggaggaagagatgggacccggggattctcacctccgccggcgcggaaggagggcagttgcccggctcgcgggtgccttaacttctttctgaggcccacgctcagttttcctcggctctcaggcctacccactaactgccgtgcgccgcggcgtatcccggcaacgggggcgggatagcggaggctcctcatcctgagtgaccaatcctccgcctcagcccttggttacacacggagctctcgcgagaattgaggatatgtttgtttcttcaccacgcttcagtgctttttggaaaaagtggaaaacagcggggcggctggaagacaaacattttatgtgaacgtttggttttcttgataatcagagcaacctccgtgtgccttacttgaagtaactctagcgagttttgctatgtccctaggtaacctcacgtcggctaacgttgttaacaggttacatttgaagttaagtggtaggcagcattgtgcaattttctaaactcctaatttgtggtagttttccttcctattaggacggcatagcgtacacaacgcatcatgaagtatggatgcgattctggcaccaactgttccgttcctgctttcaccagaagctttgcgtctttaagcttcctttcattagaatttggatccaagtttgtggggaagactgtgaattcaatggaaagtgtcctttttttttttttttttaatttaagaactacttcaccttaaatcccacttctctaataaaataacttttactgtatgtttccttccaatcttcattgataacagcttaaatgtgattgcatatgtattgggattttaacattattttacacattatttccaacttgcctgccttcgaggagttaaaaatcaatacaacacaaaatgagataatgttatgtggctgaattctcccttagtttgtgaaacattttcatgtaattatctcatttgagctcaccctatttgcagtggccatttgtcatccttttggcagagtttctcccttaccctgccccccaacacccttacaggaactgaaagtgacagatactggctttcctagtcttccttattactgggacatgagtattattgcttgctagactctccaatctaatttggtggactcaactcaaacttgaatgacaaccagaagcaggacttcagagagtctgttgaagtaagggtgacagccgcagtaactacatcgtttccgagactgcaatgttctatcaccagcaaccagtgtccagcatcagtgtgttgttgcaagctgcagtgttaggtactcagaggctttattgggaggagaacctctagcttgtttcttcagcttctgggagagtctgtgagctgcttaatgtcctttaataaattcattttcagcttttatatcatttatagatgatttctgttccttgcacttaaggaccctgacagatattaacagttgaaattggcaggacagatactattatccaagttttaaagagattaaataatttgcttaagctcatttaggtagtaagtattgatccctgtccccatttctttttcatgatgaaaaaggaatagagaataggaatacatctcacttatttgcctctgagcttccttagagtaggcaccatatcttatttgactttggatcattatgtattaggttctgttgcttttaaggttatatcaaattggaattaggttatatcaagttgtaatttggttagtaattaggttatgtcaaattttaagtttattgtaagactacttgtgtttcaagttcctttctgtctctagtccttttcactgcaattctctcttcctggaatctttgtccctctgcttttcactgtccaaagtcctgttcatcattcaggtcttaacccaaatgtcttttattagagaggtcttctctgccagtccatactagattagtgctccaactccttctggccccccacctcattatatgtcctcagtgcaccctgtactattcctatctgttaaaaggtaaactttggcacattaaaattttaaagagcttatttgaacagacagcaattcatgaattaggcagctccaaatcataagtggtttggggctcccccagaggtagttgaaagctttcagagagtaaatgcagagcacagcaaagaaatta

SEQ ID NO: 588499 - DNA, 4001 bp, Homo sapiens
gtgaattaacggctgaggaaagcagttataaaaacgagtgataggaactagcaaaaggaaagagacaggactgtttaagtgccacagggcggaaaccaactgttccgagtgaaagggacctcaacaatgactccactggggctgatatggccagagaggggaagggacccgtccagggccactcagggagccagcggcagcacagatgcacccccagccagctctgtcctccatggggagcttcagctaggaacagccaatggtgactttcctgtgctcaactggccacacactggttttacatttcccaggactggaggcttcctgccccatctccaacaacccattgcgtctcctggacttgggtacatctacctgaactacttgagaggaaagactactagatacttcttaaggcttggaaaggtctcaccccaccccaggcttctttcttgaagctaagtcattacactgacttaggcactaaagtctggacttggtctctgggctcaggccagaattatttcccagaagcctgaactccaggccgaaacccaggctccttgggactcactggccaccttctcactcaccctaaactcagcactgcccactccaggcaaagtacacagcggcacttcaaaacctagtgggtggaatacactcatgcttaggaagccggtaaagcagtgctaacgttttggtttctttttgtttggttttcaaaaggtacataaagagggtgggcaactatagcactcagagattattttactgtgatgttaatgaagcttaagtttctaagtccctagcatttcataataagtttctaagtccctagcagttctattcctttacttaaggcaggactctccaaattatatatgttttagaagcacgaaacctgagtctgcccctaatagcaccacaatcttttcagaccttacgtctccaaaggtcttacttctcctggatggagctccctcagcatcccagctcagccccttcccacaccgggggccctggtgctctggtgctgtggcctggtgactactgattccccagtctggaactcatcctcctcctgcatcctcaacttcccttcctcccctatcctctacttcccttcctcccccaacctcaacttcccttcctccccattcaaacaatccacctagcgctggatacctgggaactcggatccccctccttaactcccagtctcctgctgggcaaacataccatgcctacaaataagtgactgcatcagcaggtacttaagtaccaaaaggggtagcaggctcaccaaaaattcgactagcacagtgagtggcgtctccaaggattctcgccccagtctctctgagcacgaggagagatatgaaatactgctccctaaggggaaactgagtgccaggcagcgccgtccaccactgggcagggggatccttcgctccacaccccagagggttggaatccctccttctctacccacccaatccccgaccctgactcaccgaactcgcaagggccgtcgcgcgccttgtgcaggtgaccggggtgcgcgcggggcgtgtgccgagcgcgcaggcgcagcgcgcagacgctggggtacgagcgaccgtcggagccgcagacggtgccgcgctgcgcgcacacgcagagcccggtgccctcgggcgctgccccagcggcctggctcgcgcataccaggccggggccacagcgcccgccggcgcggcccccgcagctcgcgccctcggctcccaggcagcgggcgcagcagccgcactcgtcgagcgccgagatcccgggcgccgggcagggcgcaggcgccgggcagccctctggccggcacggaccacacttggggcgccggccgcccacgtcgcggatcccaaggctcggggacagcggcggcagcagcggcagcagcagcagaagcagcagcggcaagagcagagacaagcgcggcatggcttgctccgggacagcggcggcgcctctgcttcgcgctccgctccgcgcccgccgagcagtcaccgctcccgccccgcggccgctgattggccgggcctgcaccgcggggcgcccgcagaccgctgctccagcccgggacccgcgcggtgcccgcggcccgggtctccgagctggagggtcgccccgagagcagctctccgacctccgattggactcttgagggaaccgagacccagtcggggcgacaacttgcccgaggtcgctatggcagagtcaggattggataaccgtacggtctccggatccaaggctggctccagatagtatgcccgtaaatcctcccagaaggatgcgctattttatttaattttattttgcattcagtagttttcaaagttttattttataaagagaatatatggtttaaaatgtagattttacatatacatctaaggatgaaaagagggttaccctaccaccttgtatccccatcctccaactcggcttccagaggccactcttgctatcgggtttttgtatatcttttcagaaattttctctatgcctataaaagtacatgtgcctaaaaaagccccttcctttaaaacacacacactctgtttctctctcacacacacagagtagcgtgccatacacattagtctgcacttggtttttgcacttacagtgtttcacagtttccccacctcttgtcatctgtgaaactgggtttcttatacaatcaatgggagcatagttcattggctctgtgagtgtgtttcttaatgctgcataaagtcatggtacatctccgtccacagtgactttgttgtgatgagatatggtgatatattttggagttcatacagagtggcctttccacagggtttagttgcagttatttaaccacttattttccatcctttggttaatacgaataatgctttgatgaagtcttggtgcacaagggtcagtgtacctgtggcttactggggaatgcatgttggaaagatgcagtttcttgtagtcagttattcatgccgccgttgcgccttctctgggccaggctctgtgcacaccatcctgcctgagttctggcagggcacccagacgagaaacctaagagagtcttggctgctgggatttgatgtgttgctgggtaaatgcactggatggagggagggactcgctgagcaggttttataggagacttttcctgcctttactggccacccctcatgtgtcttgtgctctattgttttttctttgctgaactcctggagatggagaaagcctcttgcagcctgggaagaccagctacaccgttcttgggtggggttcattttgcttttcaagcccagttccttcccagtttgcagtcttcttatccccagaaaggagcctcttctgaggccactttatgtggtggtcagaggagggccatctgcctggtccacgccaggccttaccttacaatcagccacacagagcaggggcggttaggcaccatgaaggggtggtggtaaggaataaatataacaatgttggtaatgcactcagcgcagctctcagaacctatcaacagtgactttcaacctggaggctgctgtctttaccaggagtggccttttaaagtgctctcaccgcttgacccctctgtgctcttccaggaatctctcctaaaaaaatgatcactatgtgtgaagatttcatcctggagttggttactatagcaaaaaataaataaataaataaaataaaaataaaaaaagttaacgacctaaatgcccaccgagaggcaatcgttaaataaattatggtacatctaacaatagaggattatgcaggcattaacaattagaaagaaaatatgggttaatagaaatgaaaacatgtttataatacattgtttagtaaaatagcggttaaaaagtgcacatctaatgtaatggcatatttgtaaatatgtgaatgtgtaaacatgcaaaaatttaagattgtttttaatgatgtgaaggaaa

SEQ ID NO: 588500 - DNA, 4001 bp, Homo sapiens
taacatatcatgcaggtttttttgttttttgagacggagtttcgctcttattgcccaggctggggtgcaatggcgcgatctcggctcaccgcaacatctgcctcccgggttcaagcgattctcctgcctcagcctccggagtagctgggattacaggcgcccggcaccatgcccagttaatttttgtatttttagtagagacagggtttcaccatgttggccaggctgttcttgaactcctaacctcaagtgatccacccgcctctgcctcccaaagtgctgggattacaggcctgagccaccgtgcctggctgcgtttttcatctttaaacatcataaaaacgcctcaaaactagtttctctgaaatttcacacccatcagccttattcccttatcttctcggaggaagacttccctccacttctttccaggctaggaaaggaatatcctccatattgccacaggacctaggcctattagtactctttcttggacatctgcaacctccaaccttcctgcctccactgattcaaactcttcgcagttcttaaatgtgctaaagatccctccacaccaaaggtcaatcgtggattctctcttaatttcctgataactgcttcattttcttcccttgctccttcgactatccacctcttggctagacatcacatgcatgattacatataccaggtagatcaccaatacgctgattaggcctaaatgcctagccctgactgaattagcccaaacttaccactaaacccacattttcaacctcctgatagaatcacaagcatgtctcacatgcacatcaaatgcgacctggaaagcaaagaacttgctattcttcccccaaatgacagttcccactatttggggacagaccatttctactctatgtccccaagctgaaaaactgtctttgctgcctttttgcttactcttcatacggatctattcattgattagttccgtggctgtcaatatacagttgaattctttacgatccggtttgtggcctacatccaacaccgactgagcacttgctaagtactgggatctgaagattactcagccactgtctccacggagatcatcgttaacgggagagaaagccacgtaaaacaccacgttagatggagaagcacagaggacaccacctccacgaaaaagtctcacacgcgagaaaggacccgcaccacagcacccgagcctctattaaccgccgccttccatcgtgaattaatactctcgctttcagcgttattatcaaccccctgcaagcaatcaagaggctgggttaagtccggctggaggggcagcaggcatccctgggctgtcgcgcctcccagcgcccccgatggagcaggtggcaaggctgcaaaaagaatttaaggctctaggaaagaggtggtgcagcccgcactccagtccccggcccgcagcaggcagaggaggctccgggtctccttcacccggacaccgccggcggagaggtccactcccgtgcccctaccctggatggatcgcttacctgaggacccccaaacagaggtgcgtccggcctcgcctccccagccacgcgcagccggctacccagagtcagctcccacagtccgcacccagagtcggctccgaattgcgcacgcgtctctgtccgcggctcccgctctctctccgacggcactaggcctccaaggatggaggcgccctccaggggaaaacgctgaagcgctgcaaagaagccagcgactcaatgggtgcgtcaactaggcagccgcagcactgggagtgcggcgcgggagtgacgtcaccaggcggagggggcgaggccgggcccgcttctggtcacttacggcggccggccttctttgtaggcctggcaccgtagaggtagaggagctacattggccgcgtcccctgtccctctgccctcttgcccatctgcccaaacttttgtatttgatctctgttttgatgtcgaaccccaaagcactgtaattggggggggcgggggggggggtggaacctgcggacctgagagcagcgcgcgtgcgcacgacacgcgctgtgcgccggaagagcacgcccagtccgggctgcgcggaggaagcgctggggtcccggagggcgggggtggcggcgccggaggtcgccatggctaccgagcccgaagccgcggagccggtggtgccttcgctcgtggatcgatacttcactcgctggtacaaaccgggtaagtgcggagtgatgttgatccctccttggccgcactggcctaatgctgtgtagactatgttgacagatcataagccacgcgcgctctccctggctctccgtccccacgtcagaaggcactggacttctgtgttccgtctagccccagggaatggcatttgcaaagacctggtggcctgaaatacttcagggcgcattctggggccggcgattgcagtgcgagctctagggtgttgctcgcagtaagatgagtactctaaacggaggccccaaaggtaggcggagggctaggttgcaacagtccttaagtgcctggagggattgaggggctcactctcacagggagtagcgatacataaaattatttaaatgatcagatcgaaactaaggtagaggcagtagggatggcgagaagagggtgggttagattagagacatttagaaagaagaagaatctatacatttaccttaagagacgccatctgccacttagaagtaggtattctttttgtactgttttgtgtaagcagaaccagtggtgggagcatcgttggggactctcctttcttcctttcattcagtgataatggttatactcagtttaaaaaatatatattgtagcatattttctgttggccaaacatagggtgaccaacctgtcctagttcacccatgactgaggggtttcccagaatgtcggacttgcaccaacatcaggacagtcctggaaaccaccaacaaaaaatatatatcataaagaacgggatgctaattgcattttcctagcaaaaatactacgtgtactcattttgaagtgagtgtaaagtaagatggagcaaggagttaattaccttaatgttgaataaattattctatctgggccagatctctttaaatactttctaggaaacctttaggtatgtctttttgagtaatgaagggatacccgtgatcagcatgcagcatgtatgtgtccagtcttcattatcaactatatgacccaaagaaagtaccacatagtggtagtaaatattgatttcagccaccaacagactcatgtattcttctagatgtcaaaggaaaattttgtgaggaccactgtatactacagcactctaaccggtaagcaaattgggaattttaaattatcaaaaatttttttttcctggtattgtagcctggtatggtcttgtggtcttggattgaacaaatgttcactaaacaaacatgcattaattatcttctactgtgttgaaatggtattattataggagtttgtttggcaagaatgagtattccagtgcctggccactctgaacatataaatttgattactcaaacatccaaatggaggaccacatcatcagctgctacttgaagtggccagtctgtgcccaactactgaactgttcagagcccacagaaagggctacggtagagacatgtatggtatctcgtatacacaggcatgccttatttctttgtcttctaccccagtgctacctacctaaagacctctggtactcttccctttcctgggaaagaaattcaatcttgttttctcttttattattgtattctctattctacagttatgccccaatagtagccaaaggaaaaagggggaagatgatagtttgactaaacaaataccagttcatacattcttgttccaataggagttatgggaggaaaaattattccaagcaatcacacaggatcaactttttctccttgtagaatatgtgtcatcacattggca

SEQ ID NO: 588501 - DNA, 4001 bp, Homo sapiens
ggagaacgaaggggcaggcggggaaagggctctgggaacaagaccagaagaggaagagcacggacccttcaggagtaggagtagagcagagcagggcctccacctgtctgtgtgtctgtctgagtgtgtccagttggctcacccctggccacccagccacacttaccctgcttagccccaccctacctcggtgatcccagcagcagagtgtccatagcctctaggacttcctctcaccagctacagcccccgtctcctactccactcagttctgggaccccagagccatcccctccttccccttccctgccccgccccctctaagccctggagctctgccgcccctagccaggccccctccctgctcctgcctcctccctccttccctcccacccaaggccctgggaagggaagaggcctcccccaagtctggaaaggaagccacagacacagccaaggccagcaagagggaaaggagggtggctaatacttatgtccctgtcagtgagagatgccctgtgttttcacacagccagacacagtcacattcacacacagactcaagaggcacagttaacaaaagggcatgcctttgaacacacgtggacacaatcaaatgaaaaatcagatacaaactccccctcttttcactcctcaccaaatgtttccttagggtacagctggctgtgcttccaggggaagggaggccccaggttgggggatataaggagaggccaaagagtccagttccccctcccctggaagttccagccatttctcacctccccctccattctttgggccccagcaccaggaaatgcctttggtcccttggtgccagatacacaagacccacagttaccctcagactcatacactctcacatgcggtcactcacagtcacacgggcacagccacaccgcctcagactcagacacacttacacatattcatacactcacgcagtcacacacgcacacagcccctaccagggctcacagcaccgcctaaaagcaactcttcatcatggtctaagccccctctctcagggagctcttagccggggcagacccgcatctcatcactgttacaggcccccaactagccagagatcaagatcagcagggaaggcaggcataggggcacagagagagacagagagaaaggaaaggcaaaactggaaatgcacccacacagagagaccaggggaacaaagctgtgaagaaacacacagaggtatctctagtaagacagcaatagggacagaaaacggcacgtaagggaaactgagccaagcagggaaacagaaaataaggagcagtagacctgatgctggggattcttgagcagaggaaggaggggaagccacgtgtgttgtgggtgtgtctgtcaatgctggacacttaagagaaaggtcagtcccatgggctcttgaggtaggtcccccaatacatgaatacagctgtactcccacacggtttaagttaggacccaggacacacacatagtcacaaacctcacttttgctctgctactgctgaagtcacacattggcacacacaaagccagccacccactctcacgctggcagacatggtctcaaaccccacagagaccttcccaaaacacattccctcatgtggtcacagtccctctcacacaaacacacaacccagtcccaccaaaaatgtgcattgacagatacacacataatcccacacttgcacagccacatgcacctccagctccatgcacactgacacacgcagtcacattagctgacagctgcaccaagtgacactcagaatcgcacacaatgatactgtcacacagacacagcctcacaggcacatacacactgacagtcgttagtcactcccggcctttcagatcatacatcaccctgccccgcccactcctgacaagactttggcgtctacaccaggcctcaccttccgcggccgctgccgccagcgccctctgccctcgccctcgccctctgccccggcctctactccctcccgccctgggcccccgcagcgggggtggctccgcccaggcgccaatggaaggagaggagtgaaataggggggctcctggcccattggagactccaactgccaatcacctccacccccacctccgccggacacttcctgtcccgtcccggactgaagaggctgcttgggacagagtctggagctggattcctgggtctccgcctgaaggcctatccaccctggaacagcaggactggaaacaagagccactggccaggtgattggagaagctgaaggtgcccctgactccagataagataaagaagaaggagggctgtgtagggcagtggttctcaaactttgctggatattgtggtttgaaaactgcaaaaccccaccccataccaattaaatcagagtctctggaggttggacctaggcaccagtattgtttaaaacttcccagatgattccaaaatgcagccaaatcagaggtgtaaggtgtgtcgggtatatgtatgcctcaagaaaccagccacccactcagggttctcatctactccccagtcatgggaagctcgagggaaatgtgtgcatactatgtctatcagatcttccagaccagggcaacactcccaagttccaggtacttcccctccaggatctcagggaagaaaaaccctggtctggaaggcaggcagccaagtttctcctgggccagattcagtcactgtccagccttagtgtgatttccccacccacaggcttggttcccctggggaaagaacgaaggcaaaaaccattctggccatccctgcatcattcacaatgcctgccttcgccttaaaatttggaggacaccagtggcatcaggtctcctgtgttgcatagactgttgttcccacagcgttgccagggaaacaggtccagaggggactgaatagaccccaggtcactctgagagccataccttccttccaggccctagggttcctaactctagcagtcccttctctgtcagagctgtttctgtttgtgcaatgattggggcacaagggcagcagaagtatatggtgcccgcacatgtgagagtctggaggagccaaggacacaaagccacgtacacgctccctacacactccctacccgcccctttagcccctgtgggctggagcagagccaagctgcagccactcacaaagccagggttctggccagcagcccaggatctggccactgaccactgggatcaggatccagctcacccgctccccatcaaaccctcaggcccaggcttggagctgacaccctaggggtggtggcaaagggggctctggccttcccaaagcctcagccacaaccaagacacaagattttaaaacagtttcctaaactgggaatgctgtcattacaccaagagtaagagaatctataggctagatataatactgaatattaattttgttcagaaatttggggtagatttttgcatcaagattttacacatctgtagacaaagaaaagttgtagctggagctatgcctttagcttttaaccctagatctctgaaggttcacactcctctgatattagagtatgtgataaaagtttgagatgcacagttttattaatgctatatctgcccaaattccaggccaggattcaaggccctttctgcttaattcagcaagactgttgaaaacaaaaaaggattcaaggccctgtggtcggcgtggtcaggcgatggttgctgtctccctgtccttctgccccaggtggtaatgaacctcaggaagtgcccttagtctctctgcagcctggaaaagggacagggagcaattaaggaggataagggctgggctgccaagaatggtggcatggacttcattttttttttttttttgagacgaggtcttgctctgttgcccaggctggaatgcaatgatgccatgatgatggctcactgcagcctcaaactcctgggcccaagtgatcctatct

SEQ ID NO: 588502 - DNA, 4001 bp, Homo sapiens
gtctggaggcatatattcatgtgtggaaagaaaaggcagagaaaattgtgaggaggcagaaagcaaggaataaagaaaagaaaacaatcttcaaaggaaagtctgtaaatgaagaatagtagcaaaactgatgagcttttgaatttctccacttagggtatcaattccttgtttttccacaaaagtttatttttgagggggtggtacctctcaattcttgtatttgaaactgacagtgagaaataacagtgagaaaattatgacagtgaaggagatctgacataaccaacccccatcatgcttttaacttccatattgcctttggtcattcctgggcttgggccaagctaactttgggagaaatttagggtatggtttaaatgataataacccttcaccaaaagtaaaccaccttggtaaaaataatgaaagaccaccaagttaggagtttgagagggtcctgaattctgctaagatgtaggcatagtaaaatgattactagccatgattctggaggtcacaagatttgcaacttccccagtgactactgtaaataacatcactattgtataagctaagattgaccttcagagatgtctgttcaggcttttgcatttctgatgaccagtgactactctgtggctcccacccagaaatagactcagtgcatacacgaggaccatttttcacatgcctgtgattttattcccaaccaatcagcagcacctattcccctaagccctttgcccatcaaactaaccttgaaaaaccctagcctccaaatttttggggagatttgaataataactttgaatcctctgtggcatggctggctggccctgtgtcaattaaactcttcactgccatgccatggtttcagtgaattggttttgtctgtgcagatcagagattaaagtccagggtcaggtcccattaagaaaaaagaactaaagaacaattccaaactacttcatttagtgcatctctaatcctctttgtgaagctattttttattcaaagtttccatcattttttttggagatgacatttagctcttgttacccaggctggagtgtaatggcatgatcttgcctcactgcaacctccacctcctgggttcaagcgattctcctgccttagcctcccgagtagctgggattacaggtgcccaccaccacacccagctagttttgtttgtttgtttttgtatttttagtagagacagggtttcatcctcttggccaggctggctgcaaactcctgacctcaggcgattcacccacctcggcctcccaaagtgttgggattacaggcttgaaccaccacacttagtgatgtcccccttttactgaaaaccacttgtaaacaattgcaagcatgtttgtcttgagtaagcattaggagttagaagtagaattatcaacttgctttataaagtttccagcctggcaacaaagcaaagaccctatctctacataaactaaaaaaattacccaggcatagtggcgtgtgcctgtagttccagctgcttgggaagctgagatgggatgattgcttgagcccaggaattggaggctgcagtgagctaggatcacgccactgtgctccagcctgcgctacagagcaagatcccatctcttaaaaaacataaaataaaataaaataaagtttcatggagggggcagaatttactataaaaactattacaatctctttcagcaatttattaattttacaaatcacccaaaggaaagcaaatggaattataagttagtaacagctattgtcattgacttttactgctattagcaataataacaaattggccttatcatttatttttcaggaaaaaaaaaaaaacacagttctccatggttcccaaggtttaactttgcaaaatctgactaaaaatctcccagaatattcagtcttaccttgtgatcttgttttgatttcttccctgaagagctgcagctctgtgttcggaggagtctgtagactctttttattagccaaagtttggcagagacccaaattgccttagaagggagatctgggcgggtgagattttagcaggcttgaaatctcatgtaaagagccaacagagttacaattctgtcaacatctaaggctcactactttctgcgtcctccctccatctgaatattttaaaccagcaattatgattcttcttctgcccctaaactttatgttttggctctctttggagttgaactcctaaacttcaacttcagcactgtccattttgaaattctgttgccatttatatattcacttttggccgttggcttcttaatttacaaacttcattaagagatcagtgtattcttccaaattcctttataatagaaatttgcgaccccctttggcctatcagtaataagcagctcgtctgcaaataaaagctctgaaatactctgtattccaacatatctgacgggctttcctgctccccactgttcatcttttctttctattcatctcaaaaatctcgcagaagataatactttatcacaaaagcaaatcctgtactatagatcccatgagaagttgttcttcttacctcatgagaaattttgctcctactcaccctctctccatctcgtttggcatctgtagcagaaaataaagggatgaagtaatgctcttttaagacttggactgattccacatcctaagatcacacattggaaggaagactgctgctgtacttagaaggatattgtgatggactgttaccctagcaagcctctacatccattcaatctacaagattagaagggtgaccttgaaacaaaggggcagcagaaaaaagtttactgtaaaatgaaataggaattttttagtttttctcatggcatgttgaaggatagaatgttagggttctggaatccaggggaaagagaaaatgagacagcaacagatggctgaccaggcttgggaaaatgtgactatgatggagtcccctttggaaaaaacaactaaggaactctgttatcttgtttaaagttgtttcattttctgtgcagtaatcccctttaatcatccccaaacctgagcaatcatctgctacaagccatagtgttgcatttgtgagtaatgaagaaagatggctatgtctgccctttggataaagcagtgaagcaagcggacaggatgccaacatgacaagaatgaatcaggaattgagctgtgtgcaataaataggagggaggggtgacaagtaacagccaagggaatattagcatactctactctgggaattcttgcaaatactgaggaaattacaaaggatgaataatgtatctttattatgtatattgaaccctccttcattatttcaaaaatttctctttttatctctaattatgcttcatgccttaaagtctgctttgtccatttgtctgctttctccattagcagagctttgcaaacattcttttggttagtattcacatagtgtatctcttttcatcttttttctttcaaactttctgtgtccttacattaaagatgtgtcacatataagtagtatactggttttttttcccagtttgacaataatttgtctttgaactggaacatctattgtaattattgatatatttgaatttgcttctactatcttactttttttctctgctattttgtccccctggcttatgctcttttttggataaaacaattatttatttatttatttatttattttgagatggagtctcgctccgtcgcccaggctggagtgcagtggcgtgatctcagctcacttcaagctccgcctcccaggttcacactattctcctgcctcagcctcctgagtagctgggactacaggcgcccgccaccatgcccggctaattttttgtattttgtagtagagacggggtttcactgtgttagccaggatggtctcgatctcctgacctcgtgatctgccccccttggcctcccaaagtgctgggattacaggcgtgagc

SEQ ID NO: 588503 - DNA, 4001 bp, Homo sapiens
tgtcgcccaggctgcagtgcagtggtgcaatctcggctcactgcaacctccgcctcctgggttcaagaaattctcctgcctcagcctccctagtagctgggattacaggtgcccgccaccatgcccagctaatttttgtattttagtagagacggggttcctgacctcaagcagtccacccgacttggcctcccaaagtactgggattacaggcgtgagccaccgctcccggcctgctattcattttttaaattctggctacagtaactgccctatgctaaattttctcttattcaaatacatttactatattggggaaatgttcatagtaaagaaattcctgctgtcattaccttgtcctgaagagtttgctgccattttcctattttgtttcaagtatgtccagtggcaattggtcagcacttcacaatcacctataaaatatgtgtacacacatatacaatgcaccatattttaatcacaaactaaaaggaacagctagcctccttacaatgaaatgtttgctgtttcttaatctcttcagaaagatacatttgtgccgggcgcggtggctcacgcctgtaatcccagcactttgggaggccgaggcgggcggatcacgaggtcagcagatcgagaccatcctggctaacatggtgaaacccagtctctactaaaaataaaattaaaaaaaaaaatcagccgggtgtggtggcaagcgcctgcagtcccagctactcgggagggcgagacgggagaatcacttgaacccgggtggcggaggttgcagtgagccgagatcgcgccactgcactccagtttgggccacagagcgagacagcgagactcggtctcaaaaaaaaaaaaaaagaaaagaaagaaagatacatttgaaatgtacacagactgaaacaaatgtaaactctgctagtgcctcaagcatttaattaaatacggcattgtttattcttgcagatgttcataccatttagcattactgtctttaataaacgtcattaggttgtatttaccaaatatatcaaccaattgatagagtcaatataatcatggtgctaggaagaaaaatcattcatctatggtgtctctgcattcgtctaaaacacatacccaaaaactactgtgtacactgaaagctaaaaaaggtaaaggagtactgtatctgctctgcaccatacactgtgtaacatgctcgaaattagttcctttatttatttatcaccattttatagatgaggaaaccgtacccagggtcatagagctagtaggaattatttgggctgctggtttccaaacttcgtgctttcgtactaaatcctggggagatccaagatgagcaagaccctaatcctgctttcagaagggaaaataaagtcttattcaagcaaccatactattaattaaaaaaaaaaaaagcttaacaaacccgctctttaaaaggtgggcacagtgccggaggcaaagaattgatttcattggcagcaaagagtgatgccttagtctagggagcccgggaaagacacaagggatagaaaacagacaccggtttttagtaaatgaatcgttaggtgtctccagcggctgaaacacagagcgagcaatgcggggttaggactggaggacaacagggccatcttgtgacagggtagactggcgtgccagaaaggtccctgcctacggatgtgcagagccggctgggcccgggctgtgaacgagacgaaggaagcaagtaggagccagaaatgttaggtggcaaggtcggaagggaggtcgctgcctgtagcaacaaagacggcggcgacaggttagcaccggagccacacttttctattgcccggtgcctccagactgtcgtacttacctgggacccgaggacaccgggaccgcctctccttacaatcgctgctcttaaagggggcgcgaccacttaggcaagaggagctcaactcgcggcactacaaccttcccgcccccgctgcgcttccgcctcctgactgacgtgcgccccagggagcggaaaccccgcctcccgccgggacccaacggccaccgcccgtcgtgattcgcactttagcggccacctcagtgcagacgtcacttttttttccaaagagtgacagtcgaagaggctcacgggagatgcaaacggtacttttgggggctgggccagggtggggcgtggcccggggcgggggaggggcggggctgccaggcaggggcgggacggagaacacctgggtccctagcaccaagactggctttttattcattgccaccgcctggccggtcttgcgacggtgcgagtccacctcggctgggcctcggaggaggggcgactctagaagctaaactcgctttcgagctttaacaaccatctcggattgcgcatccgcacacacacacacacacacacacacacacacacaaattcaggaatattttttgtctacagtttacataattatacacaatgaaagcactgaatatggaggatttttattacagtgcaataatctgcatttaagaagtggatgtgccacatcgcagaacaccaagttgccactagtgggatcacctgctgcccacctgattccagcacagtagatagctacacatttgaattaaaaggtaatcgtatattgacatgtgttcaaattgcactctttttaatttaaaaaaatattttttatggtgacagtgtctcgctttgttgcccaggctggtcttgaactcctggcctcaagggatctgcccacctcagcctcccaaagtgctgggattacaggcgtgagccacctgccctgcttaaaattgcagtgtcttaatctcttccgaaagatacatttgaaaaacgcacagacttaaatcacaaatgtaagctccccaagcgcctcaagcatttaattaaatagaatggataatgaatttgaacatatgtttttaataattgatgtttgctcaagagtaaaatgtttatgatgcacaattttcttgtgcatggatcaatgactgaaataatcgtttcaatatcaagtatttatttactgaaaaccaagcatgtatttactctataccaagcagctattgagtgccttctacaatgcgaggtgcttcctgtgcatcagctctggtcctgctgttccctgatttatatttgagactcatgtttcttgctctatgtcaagtagcgagctaagattcaaatttaaagatctgccagatgctaaggcctgagttcttaaatctcacacattgcctctgctctggaggaatgaattcctctgagaccagttcttgctgacttgactttaatccagatataaagcctaacacatgagcattttgatggtaggccaggagtcctttcagttaagaggacttggtgagttctagtatgactaaaaagatgactgagatctatatggctgatagaaccttagaatttttttttgttttgtggcctagctaatatagaaactagggcacagaaagttccagtctaagtttcaaatggacattctgaacaaagcttatttaaggaggtgggagtaaaaacagttctaaccctaaacaacattttataatttcttagcaaattcagcctctgagagttgaaagaacattatcaggagaaagataaatttaacttgctgccaattcttttgccttttacttggtaggtcatagcccttgaaacccttctgtcttctcctagagtttttggaacttctgcctcattgtgttaacctctaacacagtggttaatagtgagtcagtttacttgaatgcaaattcgagctttgccacttaatgatggtgagccctggtttaaccttttggtgcctctgttttgtcatctataaaatgggaataaaaataagtgattgggtatacgtaaatcacttagaatagcacctggcacataataagaactcaataaatgttgactattagaatataaacaatgaacaatctgttttact

SEQ ID NO: 588504 - DNA, 4001 bp, Homo sapiens
ccaagtcatagtgggagcatctcaggacaggcccccagactgagaccccaagacaagaccaggcttgggagaggtcatgggttcagctgcagttccttccagcaacagctggagcccaccaaaatgttcctcatgagcaagtggctaaacgaaagtagcctcaacacatctggggcctcttgccgcagaaaaaaacaaagggggcaggccgggcgcagtggcccacgccgggaatcccagcactttgggaggccgaggccaggagttcgagaccagcctcgccaacacggcgaaaccccgcccctactaaaaatacaaaatttagctgggtgtggtggcgggcgcctgtaatcccagattctcaggaggctgcggcaggaggatcccttgaacccaggaggcagaggttgcagtgagccgggatcgcgccgctgcactccagcctgggcgacagagagagtaacaaacaaaaacaaccaaaggggcggatcgtatacattgacgacatttcccaagactaaacaagaaaaagcgccagatacgtaattgtatgcaggatgccatcctgtctaccttaacacaacgtcacgcccacgaatggttctgaaacgcacaggaaaagttctgggaagggcgctgctgtggggtggggctgggagatggggtggctgcgggagacccgcttcgttctttccggttaggcatcttaaacgctgctgatgggaacggtctcacgaggttccagcagcctgaacactacaacgaaggcggcgcgggcgctgcacccgccaggccctccctacctgctgcggacgtccttgctgcggatgggcgccaggaggctgaaggaggatttggccgagcgaagggaacagtcgtcgcaggccagggggctccgcggccggccggggcccaggctgctgtgggcccgcaccaggagcggctgcgcgcggagcttgtagtctgcaagatccgagtcgaccttgtttgctgtcctcagggagtcggaggcgatgtccaggctcagggcaggcggtgggcgcgggggcagcaggctgggcagcctgggcgagctccccgccacggcggcgtctctgtgcgggaggttcggggagctgctggccaccccagagagagggttaccccccgaggacgggctccctctctcactgctcaggaccccgcgggacttggggatttcctgcaaggaggtgctcaggcagggcggggagcagctgtgggcgggggccccggggccctcgctctgcactgagcccctggagggactggtcccattccgggcttccaggtcctcctggctgcctcgaaaacgcctcctcctccagcccttgtcgtccagggacagggctcgctccagtcgaggcctggcggggggccgcggggcgatgggtgctgctcgggctggcgggtcctcgccgctgggcgtggccggagtgctgcaggcaagcgcggggctctcggagcccggagcatcgggtggggaccccgcgcgctgggccggcggagcgccgggaagctgtccttggagcgtcctcccttccggcggctgcggggccggctcggagggccgcagattctccgccttggacggcatggacggtctctcccggggcaggcctcggcgcgaggccgcaggcagcgcgaggggtcacgggtgccgggtccggggtcgccggcgcagcgaggagcagaaacgccgctgcggctcccgcttgggccggggatggtcgcggaggggcgggggcggctgccgcatggcccgggccccgagtcccgccagcccctcggggctcccagacgccgttcccagggcggtccgcaggcaaggcctgggggaacaggcggctgggcgcctgtcgcgggggaggttcgaccccgacggggacgccgctcggggagaggggtgggaagcgggcacccctggctgggctcgcagactccgaagtcgacccggtactcgcggaggcccggccgcccagaagcggagtcagcccggccgggacccagcaaccgccgccgcggggccgcgcccggtccccgccccgcgccccggccccgcccacagcggcccctggcggccggaggactgcgccgcaccggacccggacgggtctcccacgcccctcccaacccggcagccccgcagtccggcaggtcccagcgaggcaggtgcaggtccccggagaggacctgggtgcggtccaggacagcgccgaggcctgcggacacctgcactcactcgcttccagcaaaccaaagggaaccacaggtgaaggtgcttgaaggagcgcaaaatattttattcaacaatttgcaatgtaacaattctcatttaggaaaaatagccgctcccgcctggaggaagcttcttgaatcaaaagtcgtggcagtcgaccccagaacagcgggcagagccgaccggaagaggtcccaggattcacacgagctgaccgagggacagagagggctgccccgtcacagggactggcctttctccaagtgacaaggacaaatggatccagcgggacacgcctgtggaacattttggaaaacatcctgggtggtctgggctaaatgatcaagtgaaacagaaagccaggaaggatctgtgctaattccacattctacaatttctacacttaaatttaaaacaccaaacagtttgtattcctccagcagaacctacagaaattatctactgatttttattagtatttaaatcttttcttcagtctctttagacttgacaagaatacgaagagtttcagaacagtcagagaagccttaaagctttgcatcagtgagaggaggcccgtctctgagttgaacagggttgagtccaccaggagctactcaaagtctcagtgtggcaaaactcggggcagaaatactaagttccagagctgctgtcaagaaactgtgttaagatactctccccaagtgctaccaacctctgaaccaacgtcccccaggggagaaagtgggtcatgtggattgtaccacgaaaagtgctcacggaaagtgcagccttttagagaagtgcatccagcttccttaacagtgagtctaaccgtgctcctacacacgaaatgaagcccaaatcaaacatcacacggtcagttttcaacctggatgaccaccctgagccatcatgtcagacagccggctctctggggctccttcccagtgactgggccacacggtgggcagtccccagcgctttgggtacacaaaatcacccatggtcctcatcaggccacagaaagtaaagtgaggctggaagcgtctttgcaacaggaaagaaattcactgcagtaactaaggcctctctcaaaaaccgtgaactaatgccgaaggaaccccacggctcctcggaggcgctgattgagaacacagcgccctccactcattcagccaggttcaaacacggcgagggcccagatggtgcagagcaggggttggggtctgcctcagtcaccctctctttgctcccagcaccttaaaggaagcgcgggactcactgggcagtgactcacagctgggcttggagaggccctggttactaccgaccatgtggctctcctgtggcagagacagctccggcttcaatgaatgaacattcttaaatgaccaggaatactatatccttaaatcatcctaaatgactaagaaagtcacatcattcttttcggcaaacaattctgagtcaaagattcagtctttccatccagaatctgaaaggatggtggaattaattttcaaaataattcattacgatgggcggtgaggagggaggcacagtgtgcgaccagctctgagtcactgctgtgtctccctgggggcgggacggagatcgcggaggtcggtcgggttcttcggggagaacagcagcgtcagggctccaagtgcaagttcacagcagggcaagcctagttcagcaccaggtgcttcctctggccaatcctccctagccttgagct

SEQ ID NO: 588505 - DNA, 4001 bp, Homo sapiens
cactcttctaatgaccctctaaatgcctataccataccacttttgactctccctgacactgttttgattgataacctcaatgcattatgtactggatagcaatagggaattttttttataatcacaagttattctaatagaaagattcagatattcaaatctgatccacataaatctatacatctatatcagtggatcttagctaaaaggctgagaagcaacatacatctatatgtgtcgacaccaaatgttaacatttgttatccatgaatactttccatttttcttgttaaatttatctatatttgtcaaagtatttaaatgaggattttcacttatttactgaaaaaaagtgaaatttaaatagaaattatagtacagcatgctcttccttagtttgcattagaaattgtttggactttgtggtattcttcccttattttatagtaaaatgaaacaagctctgactaataatgtaaaaaaaggaaataactttgaaatcgttatataaatcacacaaaatccaagtgcattcactgtgcacgataactttaaacagagtcatttaatgatttaatgaagtgtatgcatatgggttacaagaagcagttctggagtcacacattgctggttcaaaacctgtgtcatttgtattaaatgtaaaacaatgtttagtaatttaacttagcttttcagaacttaatacgacctattagacagaatatagtagcctctatctcttttcgaaactgcccctgctagttttaacttagctggcaatttatctttatgaataccttgttacttggtaaagtttgaaaactatcctggtattgaactttcctcaattctgaaatcttgcttttaaagaaaatgctttgcagtctcaaatgttgaaaacactaatcaaatcagctatgatggtctgaacagtgaaattcccttgtctctggtccccttcaatttcccctctagtcatccaggccactttctttctcttcatctcatctctctcaacacactacaagagtagattcaaagaaatgggaggcaaggtgctctgttggtgtgcattaaaaaaaacttttttgtaagaggacgtttttggtgacatagaccactgcccagcttaatgacaaaggatgagagttattaaatctaagccccctttatctcacattccaggaacctaacagaggtctcagtgtgctgcccctaggccaataggtgcataaacagaaatgataatcagctcatcacctcactgtttgtcccctttcttcttaattgaagatgcctggcccaggcatctcattgcaatcacacctgttttctggcctgcccagctttcctgggggtctgggagtacacctcacctcctgctggtgtttgagaatagtcaccttctctgaggattccctgttttctccaccctgtatctctggctgccaggtgggaaaggcaccaagagcctccaaggtgaggctgttcttctgtttttcctgcagcttctcctctacccccaacttcccatgagatttctggtgagacccttttaataaaagcacattacaatgaaaaaccacaaacttgtaggcactagccacagtagagtctgagttgactacaggcagtcaatgagatctggagcctgttttttcaggcctcattctgattgtttggtagtccagggctctcacctttgggacgtccagattccagcagccaccctcctggggtggtggtgaatgtcttctcaggcatggggcaatatgacagcaagtgttttccaaatcggggaccacatcccctcagctctgctgctaggctttctctaaggagttggctcagcagcagccagattgctggcagataggaccggaacaggctggccatcctggacctgaactctcctgttctgggtgttctcagcctttctttagagacttgctgctgtagcctaccagactgtgctggtgtgtcccttctgggctccagactgctttctgcatgccttcatcaggcatttatttgcttagggctattactcagcttttgcgtcaatggtgtcagttccacccctttcccacccacctacaaggaactttctccctcagttcttatttagtctccctacttgccctacccacactctcatatccctctttgctcccaatgtgctgctgcactttgcttgttttgaatttggttgttctacttctttttcttaactttcctcctgtaatactatttttatgcttactaaaataatggtaatttttaatgtcctttgcttagatgaaataaaaatagaactgacctgtaagctcattggctagaaattatcttagttaacatttggcatataagcttttaattgcgggggtctgtcccacagaccctgacccaacgacggatgaataacatacactgacacagatagtttgcctgtcagtccagctgagggtccgggccacctacagacaccaaggagggtgctgtaaagagttgcagccgtggccccgatcagccagcaaagctcacatttattcagcatagattaaatgacgaaggtcttgagtaaacaccactagaaggtaattgacattgccaacctcccgagtagagagcaattatgcacccgcggttgatcaaagattagtcttaggaccacatgagtaaacaaactagataaactacattcatttgtatctgtgccttaagctattaactcaaggtaaggattaggctgccttcagcctgatctattactggagcttatacaaacccctccggcgtttcaaaaaggtttgcgtctttttcttataactatctgaaaaaattttcccaccagcctgactgaactctcacatctcccccctttctgttctttgcatcgggttctgttgacttaagagtacagatgtgtgcagcaacaggtttgttaggttttgcttttattccggctttgcatcatagaattagcaaataacgtaagacaatcatgagtataattagtaacattcctttccagtcaaagtgtgacccccaggatcgggggtataaccaggagaaatgatcttgcacacctttccatatggctgtttgttgagtatgtagatctatcatgtgaagggattctaaaattttagttttaagttgctttacgtctgctgttaaattgtcatgaaagtttccccagaggtgttgtttcacctcatcccaactatgtattgattgattccaaggtaaaaatgtgacacagatatgtttatgctcccagtcacagtttaattgctatcagaatgctagggcatcttgtcgctcccccacaaattccaaggcagcctcgagggcttgcagacgtgcaagaatctcttgatctataccctgctgtaagagaagttcattagacacatttctggccaaattgtctacaaaagcagctgtttgcactgattcggtagtagatgctatagccacactagcagttgctaggatgactatggctgagactataaaggttataagtgtgcctataaatcttttgggtctgacctgggatagggcacattctaaggtggcaaaggaagaggaaccttgccaatagtgtgtcaaattgacgggtaggaatgcctcagattgtctccttaataccatgacactagtagtatttaaattagatatattgtaattagtggtacatgaggcaaacaaagcctgtccttgcacccgggtcacaaacatggaattttgggttgtaatagaaatattagttcccataaggaaaacatatggatggagttgcaaattagggactgatcagtgtgattatgaataaaggttatagtatagttgttactgtaattatgatatgtcccatgccaggtgtcaagggaggtgctaagatgtcccaggcaacataaagtgtcttggggaggcatcaactttactcggggtctgggatatcctatcctcccatcggcccaaatcataaggga

SEQ ID NO: 588506 - DNA, 4001 bp, Homo sapiens
ggaggtctaaaaataaaattttgactacagtattatagcataggtagtgaaagcacagtatttgatgtgagagaaatgcccacccaacataaagcagaaagggaaggctctccttgcactcctgggagaaaagaacaagaaagaggagtttaaaagaaaaaaaaaagagagagacagacagtaaactggaccttgttactcaaaagtgtgggccacgaactagcagcacctgggagctagttaaaaacgaaaaatatcaggccccaccccaggtctactaactcagagtcggtaaattaacaggattcccaaatgattcatatgcacattaaagcgtgagagtcactgaactaaagtaaaagtagaagactggggagagacacttccttcattataacagaaggacaaggtgaggtttgtatgtgggttagtttgatgggtcggtttgaaaatgatcatgaatcagtctcatggtttctgtctttaaaagtttttattctttcagcaacagtgactttataaattctattcattcattccaaaaaagctaatgagtgcctacaatgtgcattgtttgacttttttcagtcctctacattagggtctctttttggcatgatagtttactcatttccttaatttcagaaatcttcacttttacaagatttgtccaaatcaaatcaactgaattactgtaaaaggcagtaatcttcttcctatggatacactataaacaaagtgcaatttcttttaaaatgacaaatcatactgggactaaaatgtcttagtcacaaaatgtaaaaacatagtaagatataccaatgaatctggaacaagaatatccttcctgcagactgcttgaaagcatcaagtataaattcagcgcatattaaacacatgcgatgtgctaggccatctgctaagcatttcagacaaaaatatgcatgaaatagtccctataatacagtatggtatatagggctgactttatgggactgaaacctatgtagtcacacaggccttgcatttggtttaaatgttcctttgttgttctgaataaatttacctttgaaactttaagtgaatgaaatacaagtacgtaaactcttaaatgaagcctgataggagaacggaccaggcctatctcctggtacgtgaccaggggatatggacaagtaaggaaaacagttttatattttactacctttattttcatggccctttcctgcttttttgaacaaggtactctgcatttttatcttctacaaggttgggctgattctgtagccaatgacgacagtcaaatacaactatgtgctagatactgtggtagaaaggacaatggagccattggccatgaaaaggtcaatgatgacttcacagggaaaatgatacttaagttgggctttgaaggacaaaaaggagtttgccagatgactggcactccagaaaagaacaacattcttacataaatatgtagacttacaagtgtacatttatttcctccaagttaaaaaaaaaagcgcttcattgaagttttgtatattttcaatacactgttttttacaattttttaaagagctgtgtactaggcacaaattccacttcctggggaagctcaccttctggcagagcaaatgcaggaataagaaatatacagaggtgaacaaacatgccttcggtttcgatttttacctgggtttgtgcctcttccccgggccggggaagcggtttgcgggctttcgaactggtatgggctgtaggcttcgaccttctccgaggcctgtgcaatcaaccgtgagaaaggggtttcctcctcgaaacggaactggctccagttggcatggccgcagagtttttctatttctttcaccaagtacctgccgcacagcttcctggcactgctgatgtcgctcagttcacgagaaaaccgaaccagcaggagtccaagccacagcagggacaagcggaggagccgcggcatccctgtgaccccaggctagtcctccgcgttgtgcaatggcggtcggccggaccctgctccctgtctgcgcctgcgccaggccgagcggcgcgcacaaacactgcggaattccgagcgcgtgggggcgtcgccagaacttcaagggaaggcgcgcgccggctgcgtcaaggctttcccgccagctcaggggtctcaggtggtcgaaggtagcaggccctggctcctaaaatgaaagccaaaaatcccctcactaccccgccaccccctagtttgattcatttttctttccttcctcaatgggagattcctcaccaagcgtgagaacataggatccctgttacctgataacgtaggttaaaaagtgttgctccctccacctggaatgcgtttctcgttcttgtttgccaggttgttaataaagcttcgtctccctcacagaaaccccctgtcatctctttcacggtgttaatcgacctgtttccatttgtgggcgtgtaacctctttcctgagacccccgcttcatgaaggcaagggcctgcgtctgttcttgctttccatcgtaccccgggatctggcatttagctggcaatcaaatatgtggtgaaacgtttaagtgttgcatatggccatgtgcgtttagtcaggttcaaagcttcttcagaaaaatcctactggttcacagggaggcatgggccttagcctcaatctccagaaaaaagaagtagggacgctgtcttgaggtacctgggatggaaatctggttctttcggttagataatgtagaggattgtgtattaccaaattaacttgtgacagggacccctagaggatttgccttgtaagaataacagcatgcagcatgaaatgctcatttaggtgagataattttgctcagttaggagggaaggggcagggaagcgaagcgcaatcggcataggtagctttatcattttaaatgaagttctgtgttactagtgtgttggcgtggaaggatgtactatcggccacaagagggcattcggtggctgtctcaggaataaggttcaggatgctgaagccacaggtgcaagcttatcagtgatctcaccatttccctatacaattttatttttttctccctttcttttctgtcttctgactctatgtctttttcttaattttccgtttccctatcttttccctgcttcccagtggcatccatgaatgctgttaaattaactgccaattggattttttaaatggttgatataatatagattagtaaaatttaatcaccttccttaaaaaataacttatgtccaaactatagtgggccatgagtcctagtcagaactttatcaggtaaggtttttgagaacggaaaatattaatcatactgagatgaatgtaagccttgtggtaaccacaaggcaaaacctatagtagatatataaaagataaaaaagaagaaatcaagcataccactacaggatatcatctaatcacaaagagaacaagagaaaaagaaaagaacaaaggatctacaaaataaccactaaacaattaacaaaatgcagtagtaaattctaacccatcaataactactttgaatgtaaatggattatgttctttgatcaaaaaacagggctgaatggataaaaaaaaaaagactcaactatatactgcccacaagagactcatcaaaagacttgaactatactttggaacaagtggagctaacagatatttatgggacattccatccaacagcaacagaatacgcattcttctaaaatgcacagagaacattcaccagaatagatcatatgttatgctacaaagcaagtcctaataaatttagaagaataaaataatatcaaatatcttttctggccacaatggaatgaaagtagaaatcaataaaaggaggaacttttgaaaactcacaaatatgtggaaattaaagaacatgttcctaactaccagtgggtcaaagaagaaatataaagggagtttaaaaaatatcttgagacaggc

SEQ ID NO: 588507 - DNA, 4001 bp, Homo sapiens
gcactgttctaaactctaagacctgtcatttttcattctaagtgatcagagttttaggcacatcagaaccacaaaaaaagttctttataccctttgaaaaatacactaaaaatgtgatctctgttttatatatatgtgtgtgtgtgtatatattatacatatataaattatatatacacatatataatatatataatatatatacatataatatatatattatatatacatatatattatatatataatatatattatatatataatatatatgtatatatattatatatattatatatatacatataatatatatacatatataatatatattatatatacatatataatatatatattatatatacatatattatatatatattatatatacatatattatatatattatatatacatatattatatatataatatatattatatatacatatattatatatattatatgtacatataatatatatattatatgtacatataatatatatattatatgtacatatataatatatatattatatgtacatatataatatatatattatatatacatatataatatatatattatatatacatatattatatatattatatgtacatatattatatatattatatatatatactttttacttcataattcttagcacttagcacagtaacaggtatatagccagtactcagtagatgtttgttggatgaaaggtcacaggctgagtgctaagtccaaaaagtgagcaggatcaaagtttaatttcttgaataatgagttcatacttacaagtctctgctcttttaaaatttcccatttcaactatctttgggctctgtcaggggcgtggacaagagataggagcactagtctaggagttaggccgccttggtaagagtattggctctatcactgtctaattttgtcaccctgagaaagccattatgcagggctctttttttttcttaagaaaaaatgtattttttgcccctttaagaaaataaatcattttttatagaaaaaagtcaaaaccactttgataaagtgctataaaatgcaaaggtgtcatcatccttgcctaattatacaacaagcccgtgtaataaatgctctaataattataaccgtacaaaactagaggtactgcagtcacactcataggaagagtaattctgattaggactaaagggttggttgttcgggaagttctcagagatggtgacatttaagatagcattccagagagagaacgggtaaggccattccaggcagcaggaaagctgaagcaaaggcgggagcagggagaaccacaaaagcacagtgtgcctcctgggtactaagcagagatcgcgtgggctcctggacctcactgagtgtttgcagaagaagccgcagagctacctggggccaagttaggatcctcgactgctttgctagggaatttcgtaattatactggaggagcgatccacgccttagcagcaatcactcacacagttttccagtttacgacgtgctatcccatcccgtaccacatctactccttacaggagccctcagagacaatcagggataagtcattgactcattcaactgaggccccgagtggtggctctgactttataatgcaggaattagagcagaaagaagaggcagcgggcgaggaggccaatgatggaggctcaggccacagcctaggccaggaaggccgtgagtctgcagcaggggccaaggcggtgcggaccgaatgatctgagcctccccagccaggccccctcctactcaccctcgcctcctccaggactgacgtcccgggggcggctccaggaggcgcaacccggaccgggccgcccctcctgccgggccggtacactatatccagccaggtcagaccccacggcgctgaagctagccgagcccctcaaaaggccgcccgaggctttcggccgcacatccttctgggaattgtagttcccatcctctgaagcaccgcgtacacccgccctccgcccttctatcccacaggaccccgcgcgcagaggactcagtggaccggggccgagagcccaatgggaaaggaagttctagatgacggacgacgtgcggggtgaggctagtgcaggactacatttcccgaagtgcaccgaggtgggcaggacccggaagtgagggtgtgagaggcctctctggaagttgtcccgggtgttcgccgctggagcccgggtcgagaggacgaggtgccgctgcctggagaatcctccgctgccgtcggctcccggagcccagccctttcctaacccaacccaacctagcccagtcccagccgccagcgcctgtccctgtcacggaccccagcgttaccatgcatcctgccgtcttcctatccttacccgacctcagatgctcccttctgctcctggtgagtgagggaatgacagacccatcgacaaacgcacgaacggcctccggccctcgcccagggggaacactgctactcctgcccctgcttttccgtcttttcctgcagtgttttggagtgcaccctcccccgctgccctcactctcgcctgtcggcttccaggcgcggagtccccgaggcctgagaaaccagtgtcgggggagaatgggagaattagccctgagggactgatacgtagtcacggcgtaggagcttccccttctccccgaagtccgggggtttcggtttcgagggctagtggacctggtggtagcttgaatcggaaaagaccaagcatagacctagcgttccttcccaccctctccatttgggaagagtgtgaggtcgacaggtgctggggttgtgtgactctcactgggtctagatccctgaagcggtgcccgggttggcagatccctctgttgtggcttgatgcgattggttgggaacccggaactggagactggtttggattccactgggagaatagagtttgaagggtggaaggtgtggttacctgacaatctcagctcaaggcctccctcaaatcttattgcaacgtatttccccatggaagcagatttcttcttcattgcgccttatttgaatatgcattcattcctaactgcctaacctgctcagcatcatcccatcttaaaagaatctttccctagtccctcttgccccagagtacgtcttgagtgtgcagactaattgatccaggcttcaggtcaaattgagacaaaagcgaaggactaaacacgtatggcaaaatggcttatatttaattgggctgttaattataatgtaatatttgaaagtaccttaattgtagtagatttttagaaattcagatttaaacattaagaactactttctttacaatttaagaaacgatttagtgacgcatatgaagtcacacagctagttacaggcagagctgggattagaaacaagtctcttgacttccagtgcttattccgccatatcccattaaatgtttaatatttgtgtttgaaatagttctttcttttcttttgtcacttggaccttttcggaaaaagcactgtaaaaaactaaatggcatgtcaaagtacttttgagaacaaaaagttgtgtataaacattgtaatattaaatgatagagtgtcttattgccacttcttataagtatacaacagtgaatgacttctgtatcgaggaaaatattctgtatagtgttgtttcttggtgatttcattatacactgtgatacatttttccttctagaagtgttagaataataccattattagagaccactctctccttaagaagactggatactaatcttatccacaaaatggcttgagttatgaattgtgtgcacttttaggaaatcaaaaaaaaagggcaaaaatcttaagatattgtaaagaaaagttgagacactgaacaggcaaactatatcagatgcactttcctcaaatggtatggtttggttgtaaagctaagttatgaagaagaaataatttattttggaata

SEQ ID NO: 588508 - DNA, 4001 bp, Homo sapiens
tctaaataaataaataaataaaaataaacaatcattacaatcagagctgtgcaacagggtagggccaggctgccctggagatgcctactcagggaagggggtggacacatacttgtctggaacgtgcagagagatccaagtgccagaggcaactgcgtcaaagcctctgctctttcaacatgggtgtccttttgctccaagcctgaaacttgctgcttcatctgccactacttttgaaatttaatgtatcagccctcactaaagaaaagtcttaggtttacctaaaatgcagagatacatctaatcttaccaaggaattggaagattagtatttgttttgggaaaggattcaggggatcagcacagtaacccaacaacaaaaggactcacgcagaaacatccctcactttgccaatagtggactacacaagagaaggacagctttaggttagcctggtccattattaattcacctaaagatcttgagcaaagcttgtagtctctgttctttagttccctgtgctaatgagcaacaaaatccaaaggcacaacctaggggctacctgggtgtttgcagcttacactacagctgaccaatgcacccagcataggaacaacagaagcaaggcaggactccactgcctacatcatccctgacaagctgttcgactcgggcaatgcccttaacctctctgattttcactttatttatctgtccaagggatgacaattatcacttgctaagcataacttgatgggttcctgcgtaactggtctttgcaacaatcccacaaagtgaattctactactagttccacttcacaaatgtagacactgagattcctgtgcctttaacacccatgctctaactcctccctacatgacacctatcctcgcctccctcacccccctcccccgttccagccggccacattcctgcgtggttgtaccagacagcaaaaggtcagagagatctgggccctcacagaaacccacacgcttcactcttgggattcacctttgcgagatcttactgcagtttctaaaactttcaccctcgttgaattcaggtgaaagccttcaaattctaaaaggttgagaagaggacctgtggacaacatccccttactattaacagcacagcaattccgtagtctcacgaggctgaactcttttggtgctgagagtaacagcactgtgggcactctgcttcttcctccagtgctggccgggccctccgtcccaaccaagcctccaccccactgcggcctggcagtccggcgggcatccaggcgggaggcggcaccgcgtgaggctgagcgcggcaccgacggggcggggagggggatgtggaactgactctgacggggaacgggaatactgaggggacgacagaccggccaggagaaggatctggggcaatgggagactgacccagtagagaggggatactggggtgatgaggaacccaagcggtagggggggatgctggagggtgggggaattccggagaccggccggggaggaggaaggtactggggggacgtggaaccgaccctgttgaggaaacggataatgggggcggggtgataccggccgtcggagtgaggtaccggacctgcgccgcacgtccaccgctcacctgcgcgtgggccaccaccaggctcttattgccctctccgtggtacccccattcattctcgtccatcttcccctcttccatgcccaggcgcagccctggcgcctcgcgggctaggactcggggacgcgagctgggggccgcccgcctcgctgggaaccagccgctgcggtcgggggaggagcgcctgtcagctgccgcccccgctcgaccccgccgcggcgactagcaagctgtggccgccggaagccacgcccccggcgcctgccatgacggagtcgggcaattccgggttcgtgacactttcctcacaccgatcgcgacggtggatgggccggcggccatcttaggtactggtagagcgactcatttccggaacgcggtcttgggagccggaagagaagcttccggcctcggcgccggatgtgtagctggcggaaggagccggcggcttttcggcgcccggtagtgaccggcagtccccgggtagccagggtgtctgggtgttgggaccgcttagtcgcgagaccccagcaaacctcttggcgtctctgagcctcagcttttgcttctgtagaatagggtgtactcatcgtacatttcatgggaatacctaacgcagtcatttggatggtcctgtgaggtagaaaacattgtccaacgttctacgcgaggaaatgtggctgggccacaggactggactccccagtcccgcttttgcctgaagacttcgagggacgcagttggagcgcaaggctcctgcttggcggtgaggcagagggctaacgaccttccttctcctaaattcactgatgcggcggcaagaatggcaccgcctcgtagagctaccgcatttcccaaactcgtagtctcaggaccactttatactcataaaaatgagggccccaagcttttgctaatgtgggttacagctatcgatgttaccacattctaagttaaaatgctttaaagttttttgttgtttcgtttaaaagtaaacagccgggcgcggtagctcacgcctgtaatcccagcactttgggaggctgaggcgggcgtatcacctgaggtcaggagtttgagaccagcctggccaacatggtgaaaccctgtctctactaaaaatacaaaaatgagccaggtatggtggcgcaggcctgtaatcccagctactccggaggctgaggcaagagaatcatttgaacccaggaggcggaggttgcggtaagccaagatcgcgccattgcactccagcgtggacgacagagtgagactccatctcaaaaaaaaaaaaaaaaaaaaaagtaaacattacattccacgcccaccaccaaaataaaggagtggtattgttttacacttttgcaaatctttttaaaatctgacctaataggttctcacatgtgcttcggcattcggtctgctgcaatatattgcattggttgacatacacattgtgaagaacatctgcagttatgtagttcacaaagagaggacctgcagacccaactttgagaacggctgggcaccttgccaggccttgggaattgtagtgaaatcaggccagtgactcaggaaaatgagctgaaggctttgagcatctctttcctccattttaggcctcaaaagggaggctggggcagggcatggtgactcatgcctgtaatcccagcattctgggaggccgaggtgggcggatcgcttgagcttaggaattccaaaccagcctggcaacatggtgaaaccctgtctctacaaaaaattagcagggtgtggtatctgtgcctgtagccccagctacttgtagggctgaggggctgaggcgggaggatcgcttgtgcccgggaggttgaggctgcagtgagccgtgatcaagccactgcactctagcctgggtgacaaagcaagattctgtctcaaaaaaaaaaagtgggggaggctgggtgtggtggctcacgcctgtaatcccagcactttgggaggccaaggcggtggatcatgaggtcaggagtttgagaccagcctggccaatatggtgaaaccccatctctactaaaaatacaaaaattagctgggtgtgtggtgcacgcctgcaatcccagctactcgggaggctgaggcaggagaattacttgaacccgggaggtagaggttgcagtgagcccagatcgtgccactgcattccagcctgggcaacagagcaagactccgtctgaaagagaaaaaaggaggcggtggggggggggtggtggggaagctgggtgggaggtggctcaggaccctccacagggatggttgagaaatgggggcagaaacagccactcctggaggtaagtagctcccaacagagagagaggacctt

SEQ ID NO: 588509 - DNA, 4001 bp, Homo sapiens
cccagcgaaaccctgtctcaaaaaaaaaaaaaaaaaaaagaaattctgaaggaagaggtaacatgtcaaatggtgatggagaaagacatcagggaccaggcatggtggctcacacctgtaatccctgcacactgggagcctgaggcagtggactgcttgagcccaggagttcgagaccagcctgggcaacccagggagaccctaggtgcatgcatgacggtgcacaccggtggtcccagcgacttgggagcctgaggtgggaggatcgcttgggcccaggaggttgacgctgcagtgtgccatgattgcaccactgaactacagcctgggagatagagtgagaccctgtctccaaaaacaaaacaaacaaaaacaaacaaacaaacaaaaaacaaaaaacaaaaaacccagttaatagggttgctaaaaagcaaaaaagaaaaggcaaaaactgttcctgaaccttctggctcttcctggatctaccattaccagtggaagaattctgaataattcttactgagattgaaagagacacaaagaatgagttgtgccctctagttcttaaaaccttgtttaattctacatcccacggtgtatgaaaataagcttgctcctacagaaaagaggtaatatagaatgatacataatcagtacactagtagtaccatatataatcagggtaatatcaaaggcctaaaaaattgattataaaaataaattctctcacctgatcacaattttcttctactttgctacaaacttattttctggtaataggcccttttggcattagatgcaacagaatcgatgagtcaatttaaatcgttttttttcccagtctctaagcgaatggttgcataaagtcgtctccttcactaaaaggggagtgtatgtaggaacgtgatcataaatttttcttttggggtgaaagtattttggaactagatagaggtgatggttgcacgacactgtgaatgtcttaaatggcactgaattgtaccctttaaaaggactaattttatgttatgtggattttccttccactaaaaaactgaacggtgcggccggaacactgagctcagtgaattctctaagtaatcaatggttgcactctggtgccctctgagtgtttgacctttcacccagaaaaggctgtaaactcactctgggaaatcatcttttgtcctaagagcctaggcttgctagaggcacagagggagtttcaaaggcctcaatcacccaggacaccggcaagtaacgctttgcgcgccgcggccgtgacctcggcaggagccgggggctttgttgtcgctgtgctcgccctctgcgaacgctgtcgccccgacacagcggtccttcggacagcctggtccctccccaccccacgcacctccaggctaggactccgggccaccaccgggaacccccgccaccgggcacgttcagcctctgcttaaccggaacggccgaacagcgcaggccggcaggagtgtggaggcgatcggcccccggggacgcccacccccgggatcccctccggcccgcacgcggttgccgcgcggcctgacgggaaacgtagtttccggggccaagagagcagccccgcccgggacttgtttatcgttgcaaagaggggccggaggcgaaggaggcggcgaggctgtgcggcgggtcggagcgacgccgaggtctgacgtgtccgcgtccctgcggccccactcccggccgccgtgacctccccttgcacggggcggacacgagcaatgtcacgggccccgccgcgcgccgcgagcactcaccagggtgagggctgcccgggtgggctgcagcttcctcttgctcacagcccggacagttgcccggactaaggaagccgacatcttcgccgtcccggcgccccggtgcctcgggccgaaggtcggccgcctcagcttctctccatggacacggcgggcgcattgacgccacaagcttcggcgcacggcgccctcagtcctagccccgccccccgccgccaccattgggtgagttgcatgagtgacgagccgggggcggggcaagccgctcggggcggggttttgccgctcaacgccgggggtctagcagctgggttgcgcacggtctccggcagtggggttaccacgctgcagggcgcagggcccgggaggaatgtcttcaccgccgaggacggagtcggcgtgacgtcggggagcgggcgggagggggcgaggaatgacctcagacctgctgactccggatgcacgtagcttcaccacctgcccccggggcaaggtgcagcgtcaccccctgctttaatactcaccgtgacaaacaccatcataggcggtgacacttaaggacgcataagtcaaccctgcactgggagcttatgctctcaaatgcagagtgatcgttccgatgcccagacatctacatccattttcattcttcttttgtggtccaattaggctgttcttaagagcatggcgttaccgcagagttgtataatcgccaccctccacccttctccccagcgtgctgtactgctggggatgctgaagggtggtgactaatgcagttttcattctggtgctgaactgggaaccaaccctacttgaaaatgtgactgggcagcagtgtgaatagtcacatttatagcgagcaacaattactcgatttaaaacgtgttgtcagaccttgtcctggctgctcaggggcttaattctgccttttgatgcagtattcctgagcaccagacactgcacaggcgcggtacccaggcatacacaggaagccaggtaaagaggggccagggaagaatgagatactggcaggacagggctagcagatgaagagaggaggacatcaagacaggtggcatttgtcattgaagtgctagaagtgaaggaaaaagggcaggaggggtctatgaagcagtcctggggaggacagattcgcagtgtttgaatgtgggaagaactaatcagtgaaacattttttaaagccaagtttatcttcgatctcctgcagtttctgaaaggatagttcaaaattccatcaagtagttctgacttcctgctacagaaatgcaatcgcattgacaataagaggacgcttttttttttcccctaagccttatctgcacataaactgggggccgggcgcgtggctcacgcctgtaatcccagcactttgggaggccgaggcggggagatcacctgaggtcaggagttcgagaccaggttggccaacatggtgagaccccatctctgctaaaaatacaaaaattagccgggtgtggtggtgcacacctgttatcctagctactcaggaggctgaggcaggagaatcgcttgaacctgggaggcggaggttgcagtgagctgagatcgtgccactgcactcccagcctgggcaacggagtgagactctgtctcaaaaaaaaaaagaaagaacggaagataggaagagagagacagacagacagatagaaagaagaaagaaagagagagaaagaaagaaaataaaagaaactgggggccgggcgcagtggctcacacgtgtaatcccagcactttgggaggccggaggccggcagattacttgagataaggagttctagaccagcctggccaacatggtgaaaccccgtctctactaaaaatacaaaaattagccgggcgtgtttgcgggcacctgtaatcccagctacccaggaggcggaggttgcagtgagccaagattgcgccactgcaccccagcctgggtgacagagcgagactgcatctcgaaagaaagaaactgaaaaagtgatgggagggaggaagggagggagggagggacatagagaggtggtggtgtggtgggtttgtttcttggccttcatctttgactacctgggggtttgggatctcatatcctccctcctacagatattgtgaagattaaatgagttaatacaggagaagcccttagaggggtgcaaggcacacagcctc

SEQ ID NO: 588510 - DNA, 4001 bp, Homo sapiens
ttcccagtattacagctgttgccagcaatatgagaaatagagcaatctctcgattctcagcctttcttggatcctcgtctggaaggagaaacaggaaaatatgaaagtgagttttggagaagagaaatagcttgtgacatttattcagaatagaaaactcttttaacctcagtttgccctgtttactacttcatcactgttccatgcttattttgacctttattacttttagtctcctaggttctacaaaactgttgctgatagctgtcagcaaaattcttcccagcctaatttcttcattccaagcctagcctcttcatttctcagcctttcagttgattcagtgccaaattatttatactggtcaaaatttcacccaacaccctagctccattttgtaacactaccatgacctccattaaaggtcatgtagtgacccaacaaatacatgtagaataaatcagtgagcaaccctgctccttaatccctgtcccttcaaaattccataccatgatctttgttacctccacaatattctcctttgaagcacctgttagtcatgcgaagacacgtccaacaatcaagaatgggaccttcaaccacaactgataaagaggagaagaaagataatcagaaagagggcatggcacgagggttccttagtcatacatcaagtgtggaggatttgatctcaagcattcccaggactctcaagtttgcattgctgtgaatttcttcttctcctagaaatcaagtttcttgatggatcaaaatctgtaagtctgatctccaggaaaaagcgggaaaaggatgcctcagcttatactggggcaatgggttgtaaaccatatgttagaaggcctcctagtacctcaaaaatatgtggggtgtctgagatttcatgagctaggtttcgttatcaggtattgttgacgttaccccttgtaaccacagctctaggaattggtttcccagtgtaacaggtgggagagatagggccatatagagcaaaggagatgggaaaatatgggctgaaacctcaaggcgtcacatgtactgtactcactgcaatcttcagaacaagctagaagagaatcagaaagttctaatgagtttaaaaccagctacagtttgccatatttatacccaagtagtctttgtttaccctttaagttccagttacctctccacccattctaaataactctattatgaacttgcatttcttccctcatcccgcattttctattcccttcatataacttcagtgctgttatatagaaagttttacttaccaatttcagagaagttctttagtaattctttcagtttggattccaggttttggcagacatcgagaagcttgccttgatagataaagacacctaagagggagtggaaggggtgtcaaaaaatagaagtagctcttcccttcagaagttaattatgtctgtttttatctttgttttccccagccaaattttctgaggcttgcttgagcaatacaaacttttaacattgaaacagtacctcacctttccatgtttcattgcccagtttataaaattcattcttcaaccatgttctcaacttaacaacctgctgaacagctagagagggagagtaaaggtacatgtaggggaataattacatctatgcaggaagttatgtagacccaggtgttctcttccttgcctcccttctccgtttaagcccctggactctcaggaactcaagcttccctcacccaacacccgaagcctcttgtcactgtgggagaccttgaagcttaaatgaatcatctccttaatctgccgttcaagcagctgagttcggccggggacttctgaaggtatcagatttcccagcaaggagccaacatcctctataaatttggggtcacattctaaacagcctttgactccatggaaggctgagaggggcaggagcaggaataaccacaggtcacccatttctttcttcacccccgctccccgacagcaggttgtcctggcaactagttcacttagttccttttccttcaaaaatccgggaatgagagcctggttctggatagtctgactccacttttcccgctgtttccatcccactatcgggcaatctttagttgtttagtttaatgatctttagttgtttactgactattatccttcattctaggagagggaactgccagctggggagcggatacctgagttctgagtgtagaacaccaagagatagagaagccttgagctcacacaagcagagttctgtgcagggagatgtctcagaaaaagtgtttctttagccctctccctgacttgcatcctcatgagactcttaaaccccctcctgaccttcagagatgtttatcatcagagatgggttatggaagtgatcctatagaacctgagagattgcttaactcaaactctgcttctacattagaggtaagaaaagccaagaatattgagtttcttgcgggtctcggtccctactggggcagtattgttgacaaatactggtggcagtattgttgagaataaaggagtgagcatttatctagaataatatttggcaattttaatagacagtaacatatttcaggctacatttatcactaggatgattttctagacatgacttgtaatcttttccttttcttcttgctttcttctcttttctttcccttccttccttccttccttccttccttccttccttccttccttccttccttccttccttccttccttctttctttctccttttcttttcttttcttttcttttcttttcttttcttttcttttcttttcttttcttttcttttttttcttttcttttcttctttcgagatgggatttcactcttgttgcccgggctggagtgcaatggcatgatctcagctcacttcaacctccgctcccgggttccagtgtttctcctgcatcagcctcctgagtagctgggattacaggcatgtgccatcatgcctggcttattttgtatttttagtagagatgaggtttctccatgttggtcaagctggtcttgaactcccgacctcaggtgattcacccgcctcggcctcccaaagtgctgggattacaggcatgagccactgtgcctggtgatttctaatctttttatagcattcttcttatagagagtgtggagtcagatactagaaacaatagttgaggaatactgagtgatgaatccaataaagttcagatcctttaacaagtgcattctaaaatactggcaaagtatgtaacatataaaaacatagtggttatcatgggcttccctctcagaccacctacaaggaagatgtccaaataaacatgttctcctttcaatggccctttgaataaaaatattctgtgttatttgaataaattgaggttgcttttcagactcttaagagcactggttacctcttttctaatacattgcctgtatggctgtgaccttctggaaaccaggaaacactggcaatctacagggttagtggtagaatttatatttaagatatggggtgatcacagtggaatgttgtgcgggaagttaaaagaattaccattacttatacgtctaccaagtccatgtgacagacattgtgctaaacatttcaggtagtcacaaattctcatggcgcgcaatcctttggagattgtcatttctatgttactggtaagaaattgagactcagagatgtaaaagaatcctcgctggaagaataatttagagtatgagttcagggttcaagctcatgtcttgtgtggttccaaaccctatacattttactgcctctcaacaacaacttgctgggataacacagaaaattatctcttggaatttgataagtcaaaatatgaaggccaatacagattacttgatttatggtttaaattagcatatctctgctcagattttttttttattcccttggctagatgatctcatttttagaggatttcccaaaagattttc

SEQ ID NO: 588511 - DNA, 4001 bp, Homo sapiens
agtccctaaaactgctataaattgcaaatacaggatattcagttagagcaaaaacaagcatggtgtgctcttctggccagcaagtactgcagctttcctattcaggtaaatacatgtactattaaggcaagtgctggatacatccagtctgtacatacgttacacaccaacagacaaatgcatgtacaagcaaataattctcacacttaaagtggtataaggtgaggcggatgggggaagggaggccaaaaattgattattcatcttcaaatgttctgggtgttatatcaaaatacaagctgatcatcccttatctgaaaagctgcaaaatctgaaacattttgagcaccaacatgatgctacaaggggaaaattccccgcataggtacttaatacaaactttgtttcatgcacagacgtattaaaaatattgcaaatgacttagtggctgtgtgaataaggtctatatgaaacaaacgaatttcgtatttacacttgggtcccatcctcaagatgtctgattttgtatatgcaaacattccaaaatttttaaaaaaaatccaaaacacttttggtcccaagcattctggagaagggatacaaaatctttatttgcagtagcccaacaactcactgtacaaacttattatgaaaccaaaagcaatcatttcccttattcccacttccagtttccttctccatactcagccgctcctaccctttcattcagagaaatggagtttctcctaacagattagtaattactggaaaacaaactgggtaaattcaaccgacacagcaagcttaggcagataaaaccatgaggaaacattcaatgtggtagcagaaaccccagcaagaatagctaacgtgttctcccaaaagctatctcttattgcttggaaatactcctctttaaaggattaagaatctctggctgcttaagaagaaagggtaatggacaacgtttttcgtttctctgcaaagtcacgttatgtgtaaagccaacaaaaaaatgtttcttaaaggatccaagacgaacaacaaaacaccccaaaattactctcccagatcaacattaaaagtttagcactgacattttcagaagagtaagcaacaatgagccctgcctctcttcacacgcttccaaccttccctacgcacgcactcccagctccagacaccttcgcctttactgcagcgataaaggacagcacacccaccgtcgcgggaggaggaggaagagcctctttttctgcagaagagaaacagttcacatcttgttcctgttgcctgcttctgaaacctaaaaacagaagcagcagttaactactaccacataaatccaggggaaacaaatgctttttctaggctgtttaagtgtctagaaaattttaaaaaggaataaggaggcgggagcgagggaattataagacacaaatggaagcaaatatcaccagcaagactcgttctaggtgtcgtcttaaagaggaagatttttctggctcagaagtttgctgccactagcagggggcaggcgggaccaaaaggtaggaagggggtggagagacagctgctgccccccacccagaagccaggcagagataacacccaccggctacacagatcgggcgaccagagcgcgccctcgagcccgcaggggcggctcctacccggcgggtcaaggtctgcgaagccccgggacgggcacggctctgaacgacctccaggctgggccctcgggggccctccagtgtgggctcagctcccactcacatccctcggcagcgaggaccaggcctctccctgcgccgcagcagccctcagccccgacgcgcgccgcaagcccgggccgaggggcccgaccggccgagaagccgaagtggcgacgcgaacacccaagcgagccgggcgccggcccagcctgtcagcgccgagggaggccgttagcggcgtccgctgctgcccccttctgctcctcttcctctctccttcctgcagccccacaccactcccacttcgggcagccgggaagcccgtcacagttgtctccaccctctccggggccacaccgtcttctcaacgccgcgggcgacactggcttcgccgccctgctagcttcgaactcagcctcccggttggcctgcagtctccccgaatggcaggagaccgggccggatagaggctgggggagagccggacgcgcgtcctgcagtgcgcgtgcgccgctcggtgctggtcgcgggaccggcaggcgcgggccacgcagggcagctgcctctcgggaagccggcgagcgcgcgtggagattcctgggacggcccctgggcgtgagcgcgcaaggaagttaaggcggcggcgcctcgcgaaacgctggtgcccggctggagctaggcgccagcgctgggcccggccctcactagatgggcgggtgtgtgtgtggccgccgccctccagggaagcggccgggagtgactcaccctggctggctccccagcgcgcagcctgcactggaggaggccgggctgcctccgcgcggagactcccctcccgcacacttctccgctttcggcttttccttccacctcccgggtacagcagacccgtccttccccagtccaggctgctaggccgaggggaagtggcgccgggggccggggacaacgcgctcacacacgctgtttcgtggcaatgcgccctcgagagcctgactcccatcagccaccttggctggaaaggggtgagggtgggatgaagcgcccagccgcctgcgggttggcaacaaggcctagcgaatgtttctcctagaggagaaacaactttaccggcgtggcctggtgtagcccgggagagggtggagacaacggctgtgacgggcttcccggctgccaaagggcctcattcattcattcaaatatttactgagtgtctactaggtgccgggctgtaggtccccagagataccaggtgaacacgaccccacacactccttgccctactggattgtattctgatggaagcgacaaaacaacaaacaacgctttaaatgcataatgtgcggggtgtgtaattgccactaagaaaatgcatagttttctgctgccatatacataataacaaagaaaaggagtagaaagtgaggagggggtgtgctattttacggtggccaggaacgatttcctagaataagtgacatttgagcagagatctgaaggatgagaatgaaccagtcccatgactatctgggaaaagaatttcaggcagagggactcctgaaggcaaagaccttgagaagggaaagtgtttggcaagttcaaggatcaggaaagaggtcactgtggctggaggacacggaaggagggggcagtggtaagaggtgaggccaaagaagtagcctggcaccagatcgtgtagggatttttttcaagtattagccctctttctgtcaacctaaatgaagtgacgcattcatagctcctgtttccccatacacaactgatgctgctcttcaggtctgtcttgcacttaatggtttctttaaataaacctcaccaaagcaactcctgcatttcttcttacataagacccattgcaaaaggtctttaagcaaatgatagcagcataggaaattacttgaattcaccctgaatcttttaaataatgaactagagctgtataagagggagggatttacaggaaaattgcattcctacggctactgcttcataggtaatatatgggcaaagttagtaagaatttctaattattaattgtgactcaatggcttagaatatcaaggccgcaattacaaacagtgactaccaaaagagttccttttttcctgcaaacaaaaactgctactgaggtaaaagctagaacacagacccacataatgaagaagagctaaagatgagcttaacgtcatgggtaaatgaaaagcatcacaactgtggaaatggaaatgtgatattttgtgaggggaagaaaatgcttgttttaga

SEQ ID NO: 588512 - DNA, 4001 bp, Homo sapiens
tgaggctacgccttgcttctcagtggtgacattgacttccttggtcagtcatggcttgaggggaggtcagggaaactggtcactcagaagagacaactgccccttacagagactgtgggcaggccagctctctataagaggctgtgaataaggtagggtgtattccctgatagaaaagtttttttatcagccatttatgaagcaccaataattatatgtaagagtgttttggcgtatggggatgtgactctgggagagcagggctcttttttgtcagtcacataagggtatatctctttaattgaagttggggttgggggcaggggaataatcggaggtttattcttactgtccttgtgctcggggagtcagccgcagtccctggtgaccggctcacatatcctcatgtggctagcaacacccacctaccatggcagtacaggagaacgcttaactcactgtaatctccaatgcctaagtgcaaacgattctctcgcctcagcctccgaagtagctaggactacaagtatgcaccaccatgcctggctaatttcttttacagagatggaggtcttgctatgttgcctaggtttcgaacccctggcctcaatcaagcctcccactttggcctcccagaaccctgggattgcaggggtgagccaccgcatctggcagagaatgcattcttttacaaaaatgccaactcacctcaaagaaaagttgagtgaagaaggatgagaaattgtgactttatcttatttactttggtcctgctccaaggaagatgacagactgaggcccgcataaggagggagtcccacatggacttgggagtgtcatcaccatctccttggggcatgcagagagcggtcaccatctcttgacctctctcctcagcatgctccccacttccctactctacttccttgtggtttccttcctttgtgccctcagtctagtgtccttacccctgtcctggagaccccatctcttttctccagtacatagtgcccctcctcggtcccttcctgcacattccactcagctggcactatcgctttccttggcccagcttcgccagctctgaaaaagcaaggggtgaggtgcagtccatcagatggaagagatgatataattgatgatcagatccagggcaggtgcccagcagtaacaactgtggcaaatttctacataagctagctgagaaacaagctaatagaatgagcttatttcccagtgacaatgcaatctagtgttctatgaccggctccttgcaaaacaataaccctggcattatgacaagattcacattaactgtgcagggccctgtcttgactacccaggtggctagcacctacttggataagaatgtcctgagcttcaaatctcttccctgataaaaagagggctgctgctctcaaggaacttcagtcaaggggagtgggggaagacagtcccacacacagacaaaaaactagggggtgaaaggccaatgagtggtgggaaggaaagggaaagaagcttccagaagtaagtgctgaatgggagattaaacttggctgggggccacggtggagcacaggtgtaatggagggtggggcctctttcaaacctcactcgtggctgtgtgcacgcgtgtccgttcccactggagtggcggtgctttcttgtggcaggggatgggttgcttccctccgaagtcttcgctagaactccctcctcctcctgcttcctttcacctgttcgttccaaacatacattgagctgcacgttctgggttccctcacgaaggagatttcaggtctatgcccacttgccacgattttactttacttggttcccagttctactcctttccctgagcttcacagtgttgagaaaaaaagccctcagcctccccgagtccctcaggccacgcaccctctcactttgctaatttccaaccactcgctgctgagcaggctggagcacgcccgcttcggacgccccgaaacaccctcgggcgcatgctcagtaactcccccacgcccctacccgggcgcatgctcagtaactcccccacgcccctacctgggcgcatgctcagtaactcccccacgcccctacccgggcgcatgctcagtaactccccctaccccgcccgtcccaccactgctgcccttcgccgccgcccccggcagtgctcgctctctctaggccccatgtaaatcgctgtgtttgctggggagcccttagttcaattctcaggggattagggccattgagattcttaatcaattgctgggttccacgcgatcctctttagaaactttttgcttaatatgcatctagagacatgcacggcccgcctgcagcgctggagccgatggagtggagcctgggaggctgcaggcgacccccaggcttctaaacagcaacgtcagtttaattattgcagatccgtcacagctgccaagtcctctctgtcttcgttgttgttaacggggaaacttgccgcccggtggctttgcttcaggcggaagtccgcgtgctttgataccctcagggggcacttacaggctaggtggacacaggtgggctgcgggactccgcgaatttaccttccaggggaatgcactgcacacatgctgcacacaggagacagggaagcctggcgaggttgggttttcaggcgccactgtatacactctcagttccactgataccctttctttcttctacccgctttcaggcgccactgtatacactctcagttccactgataccctttctttcttctacccgctttcaggcgccactgtatacactctcagttccactgataccctttctttcttctacccgctttcaggcgccactgtatacactctcagttccactgataccctttctttcttctacccggaggccctggtagttggctctcgccagacaatgtaaactggcactacaagtggaatagaccagacgtttattttctggtaagtcaggcctctgtcctgcctgcacctttggcctgattttgattaacgttgtcagaagcggatgccatgtgtgggggtgctggctaaactttctggaagtgtcaattgtaaacagtgttaccttacattttgggcagcacttttgagtttccaaaacatgttcccatgcattatctcattgggtttcctcagtagattggaagaatgtggaggaacttgcaccctctttcacagtgaaaaaaaccctgaagctcagagcagtatagtatcttcgccagaattgcaggactagaaagtgaaagaacaagaaaccaggtcttctggtccttagtctggagacttttggcagtcacatatacttttttattatctcactaataactcttgataatcttgttggataacagaacagtttgttcatccgtgtcgtgttctctcattgcattaaggaagtgatgagggagctgatttctcaattgttttttagagctataatgccttgaaaatcattcccttatcctggctatcagtaatttgccatctcctaatatgtagtaaaaatagtaaacgtaaaaactagctgccaagctaatgccacaaacatcaagtaggaactgggttggattcagtaacatcggtccagagagagcactgctcctcaagatgggtgcaacatcaaggacttagggatcaggaatgtgcacggctctccaaatggttttcaaccaaggtgatgctgcatttcctctagtaatttcataattaaaaacttagtgattatcagaaatttagtttttgctttcttttttgtttgttttggtttttgagacagggtctcactctgttgcccaggctggagtgcagtgacacaatcatagctcactgtagccttgaactcctggattcatgcctcagccccccaagtagctgagactacaggcaggcaccaccatacctaggtaatttttgtattttttgtagaaacggggttttgacatgtttgtcagactagtctcg

SEQ ID NO: 588513 - DNA, 4001 bp, Homo sapiens
ctagtcttgaatgtatcaattccagtggccatttgcctgtggttttttggtttctttctttggggccagtttggatattttaaaaaattacttttaagcctagtcttttttccttctaacattccctgccgagcgcgcacgcacacgcacacacacacacacacacacccagaactcactttcgctgaggcagaacctcgactagagtgatttatggactaggcaagtctagagcccagaaagcatccctgtgccctaaggggataaaatgtattcccaacttgtgggtctctacaggaggcaattattcctctactggcagcttctcttccatccttattcattttaacctccccataggacagccaatacttaatttttcttccattgcttcagcagcacctttccccaaacctagtaacagaaaaaggatcaaagttaatcacctctcagttttctcactcagtctctatcttagaaaaacttcctaagtagctgccttaaaatgagggagaagggctgggagatggaagaatgactgctaatcggtataggggttctttttgggggcaacgaaatggaatcagatggtagtgatgatttcataactttacggatatattaaaaaccactgaattttgaccttagaagagtaaatttatatgtttattacacttcaattttttttaaataaaacgtgctcaacattttagtagagaaagttggatgaaaggagaaactggcagatgaacagctacttagctgttaacgccacctaaaaatgaacttgaataaactcaggaattcaatataagcaaacagaccctcatttccattcagctccagaggtggggggcaatgacggtgaggaaaggaactgcacgattacacatctggatgattaagcttccttattagcctcgggtatcagggtctaatagaatccactatttaataagatgggctgaccctccgcagaggccacgtgcggaaagcgagcgctggcggacgccataaattgttaacgccaactcgcccaaggccttcactaggtcacgctcgtgcagcacggctcgtgctgacccgcaagagccaccaagaacagttgcctctgaaagttccacgggacccgggtgaaggagatgaacggtcaaggagccgtggctgccgcgagcgccactgcgtgttgcccaaagcggcacagaaaacgcaacattcggggaccagcccgcttcagggcccctacaccttccctcgacctggaaccgcgggacctcggaaacccacgctgcccgcgccgggttgggccgccccagaggccgcagcgcccacgcccctcccccgcctccccgccctccagccccggccgaagccacctcggagttggcggagggcgacccgaggccacctgcccctctggggccgaggataaaggggtcttgaccgccactccctcccgcgaagggcaacatccaactccacggagagccgcttcagagagggtcccccgttccgccccgggctagggaagggcccagaggcatccgagggacagagcgccgggccggggtagccaggcgcccgcaccctcccgccggccggcccggcccgaactttctcgctgctccgtgcccggcgcgcctctccctcctccagaccggccgagcgccgccgctgcagagcgcgccaaactccgacggccgcggggccgacgccacctctcggacccccccccaggaccgccccgaggccgccgggttcacccgcacgagcgggagcccgcgggggctgccctccgccaccgccacggccgccgcgcaaccccggcgcgcgccaagtcggctccgcgcggggccagcccgaggcaggggtaggggcctcgcgctccgggacaacctcgccgcggcacggggcgcggcacggccccgccgcgtcactcaccttcggccgctcctcccaacctgccggccgctcgctcgctccgccgcggacccggagctcggggaagggcggggcgcagggggcggagtcggccccggctggcaagcgccagaattaaagcccgaaccgcacggccgccgccggggcggggaagccggggcggaccagcaagcctctcacccgcggtgggcgacagctgtggctgcgccccggagcggcgcgtgagaagaacggcgcgggccggcgaagccccggctgctccctccgcccagaggacgcccggctccccgcgggggcgctctttgtaccgcggagccggccgcgggcggccctcagtgcgcctgcgcgccgctgcaactccaccaggcccgcggggcaccttcgtgcaccttcgtcgccgcgcctggcccgcgggcctcgccgcggcgagaactaagcagaagaacttcctccaccgcggttcgctccttctgccaacccgtatttaccacgtccatcctcgcacacacacccgcaaggggagaagaaatccagcccccgtgagacggtgcggtgctcccatctccggctggggcgggggttctggcaacgaggctggcctgctcgacgtcctcccccagcgcctctgtacctcctctccctccccgggtgagggggaccggagcgtgcagagctctgtttcctgcaggtgcctcgtcagcacggtcgccccggcggccagaaacctcccgcctccaagggcacctcccttgtgacctccgtgcattcgccctggctcggctgcaggacagagtcctcggcggaaaggggaggatgcgtgttcagaaggttgcaggtctctggggactccacagaagacccaacgcctgcctcgggggctcaggattgaactggcttcctagttcagtcccaaatactcgatttggagcaatccagtaggtccatgagaaattagtagggattgagaagctgtgacttcagtctttttcaaattgaaggtggcttgaacaaacagaagaggagcttgggaactgaagggacgactttataaaaaccaggtattactcaaaaaacaatgttagctctgcagtcaactgattttcttaagggagagagtcctcccctcacccccaagctctctagcaccgcacacatccagcagggcgttacacacgctcagtcttttttgtgagtgtgcaagtgaagagccatcaaacttcacaaggcgacatgcttgcctctggggagaagacgctgcttttccacagttcacagcgaagcacacctgcaaattcctgaacttgatggctcctgactgtttagggaataggcaaagggcagccggaagatatgtgaaggcaggaaagctcattttgaatctcagcgcctttgccagctcactgggtggcagtaagcaaactctttcctcctcctgggccttgctttttcgtctgtagagtagggcatttggatgcagtagatattttctaaaatcccccaccaccaccaccccgccccaaatgtctactcttctatgaaaaggagaattgtttgcatggtgataagggatgagatatcagaggcaggaagactcctgcattttaaaagtgctcgtcggccaggcgcagtggctcaggcctataatcctcacactttgggaggccgagacaggtagatcagttgaccccaggagttctgggcaatacagtgaaattctgttttcaccaaaaaaaaaaaaaaaaaaaaaaaaaaatcagctgggcgcgatggcgcgcgcctgtagtcccagctactctggaggctaaggtaggaggatcgcctgagccctggaggtcgaggcggcagtgagcagagattgagccactgcattctagtccaggctacagagtgtgaccctgtctcaaaaataaataaataaatagtgccctcgaccgggtgcactggctcacacctataatcccagcactttgtgaggccgagatgggtggatcacttgaggccaggagttcaacaccggcctggccaacatggtgaaaccccatgtctactaaaaaatacaa

SEQ ID NO: 588514 - DNA, 4001 bp, Homo sapiens
caatgagtgaaaatgtaagccatcagtctccctgccctctcctgagtatacaaacccacttgactgctgtccagtttgaagtaacttccagcaaacctggttgctgtctgccctcccaacccccagcactgccgaacatttacacccgacagtgtgaatgctgtgaagaacacttctgcttccatctgcccgctttcttcccaaatgttggaaagaaagtacaaaaataagattgccaagcagaggaataaaaaggacgtatattccttacgtcccaatttaaaacaatattaaattgctctagctgttcgattctaacacgtgtgggaagtgaattctatgtgaaagaagtgcccagcagcagtcatgctctagcctaagaatgggagggctggtcgggagggctgtgcctggaaacttgtgctcgtgttaaaagaacgtagctgtccttctctctttcccttttaactttcatctccacatggagaaggtgatcactcaaaatatgcagccagacctgtctccagtactgtctgaaattccattaacaggagagaagctgcagcagccagacctgtctccaggactgtctgaaattccattaacaggagagaagctgcagcagccagacctgtctccaggactgtctgaaattccattaacaggagagaagctgcagcagccagacctgtctccaggactgtctgaaactccattaacaggagagaagctgcagcagccagacctgtctccaggactgtctgaaactccattaacaggagagaagctgcagcagccagacctgtctccaggaatgtctgaaactccattaacaggagagaagctgcagcagccagacctgtctccaggactgtctgaaactccattaacaggagagaagctgcagcagccagacctgtctccaggactgtctgaaactccattaacaggagagaagctgcagcagccagacctgtctccaggactgtctgaaactccattaacaggagagaagctgcagcagccagacctgtctccaggaatgtctgaaactccattaacaggagagaagctgcagcagccagacctgtctccaggactgtctgaaactccattaacaggagagaagctgcagcagccagacctgtctccaggactgtctgaaactccattaacaggagagaagctgcagcagccagacctgtctccaggaatgtctgaaactccattaacaggagagaagctgcagcagccagacctgtctccaggactgtctgaaactccattaacaggagagaagctgcagcagccagacctgtctccaggactgtctgaaactccattaacaggagagaagctgcagcttggctgtcaggcaggctgatccgggcctcccgggatgtgtgtgtgggagccggcgggtctaagctggactcccgtaggcctgcggtggagtgaagcggcccagcagtgcgcaccttcccggccggcccccctcgcccaggccccccggaattcggccagcggtggccgccccacgccgctcgcagctcacctaccacgtggcgcccgccgcgctccccgccagcccgcgctgccccgcacagctcgctccagctcagccggacccggcctcgggcgccctcgatcctcaccccgtgaggagaagtttcaacattcgtgtaaacttggccggccacgctcggatgccataggctgagctttcaccggcgaggtctccctccggctgcagtgacaccacccccgccgcactcagctgttccgcattccctgttttcttaatgaaaacaggaaaccggtatcttctgaaaatgtgtgttcttcactcccgctttgccagctgatttttaaataaagctagcactttaagcatctctacagagaggctctgtttttcctatactagtcactgcttcatgaaagagtctgtgtcctcctgcccagccctcggtcacctgaggaggtgcagaggcacaatcagccccactgttctctgcgggttctcaggatccgggcagcactcactggttccagagcactgcctgactcttctcagccctgggcttatgacacgtggcaagtagttatcctttatcattaatttcaactgagcctttgccactgatgaaaagttcttcttaaaaaatgaaagaaaaacaaacctttttccagatacgaaagtagtacatgcttgtaaaacattaaaaaaaaaaaaaagccacatacagataatttaaagaacgtaaaaaaagggcactcagatcctaccatcaagtggcaagcgttaatattttggtgtaactcctactttttctatacttttcccacttaaggattttcagtaggaaagatgaactgactcaacatcagtatttaaaacacaacaaaacttatcacagtttttaccaaaacctaactggtccatctttagttatttctttagttcaccttgtagaaatcacaaaaagcatgtatcacgttgtattacccccaaatgaactttggacttctgggaatcagaagaggttagaatttaactaagttaggcttgcttatttcctaatactgctcaaaccaggctacccaaaggacttgtaattcaagtttcattctccagcaagtaaaaaagtaagatgtgttttcaaggtgtcattttcacaaacaattgtccatggtaaaaattattctacaataaaactacccggtgtcattatttttttaatatcctgttttctagtgtatgtttacatacatcaacataaattaggcacttatgagtccctgatttatttcccaactttaacaagacgaaaacacttttttgtcttttgtaccagactataagcacccagagagcaaaaaacttaattaaaaaaaattttttttggagagcacgctggctcatgcctgtaatcccagcactttgggagaccgaggagggtggatcacttgaaggtcaggagctcgagaccaacctggccaacatggtgaaaccccatctccactaaaaatataaaaaattacccaagcatagtggcgggcacctgtaatcccagctacttgggaggctgaggcaggagaatcgcttgaacctgggaggtgaaggttgcagtgagccaagatcacacacattgcactccagcctgggcaacaagagcaaaacttcatctccgcccccacccccccaaaaaaaatatacattttttttttcattgcttcctctcccaaccacacaccaattatcaacatgctgggaagaaaggagatgtctgacaacgtttactgaaggaataaataactgaatatatagtataacataataaacttgctagagtgcagtggcgccatcttggctcactgcaacctccacctccctggttcaagggattctcctgcctcgtcctcccgaggagctgggattacaggcgtgtgccaccacgcccagctactttttgtatttttagtagagatggggtttcactatgttggccaggctggtctcaaactcctgacctcaggtaatctgcctgcctcggcctcccaaagtgctgggattacagctgtgagccactgtgcctggccaacagaataagataataaactttgaaaaacatcttgatgctctgaagacagaagttgttcgttaaatattagtgttaaggacatttcttccatgatattgtttcagttgttatctttaggttgtggaattatagatgatttttattctttatattttataatttttacaacacgtgggtattgctctttttttttttttttttttttttttgagacagggtccgactctgttgcccaggctggagtgacgtggtgcgatcatggctcactatagtctctatctcctgggctcaagtgatcctcccgcctcagcttcctgagtagctgggaactataggtatgtagcaccacgcctggctaattttaattttttaaaattatttttaatagagatgagt

SEQ ID NO: 588515 - DNA, 4001 bp, Homo sapiens
gttgcctggcaccctcctccccatgtgagagctggtggggaaacccgccccacagagctccccccaccaccaggcagcacgaaggttcttctttctgcagctgaagccacctgcctgggccgcaagccttggcctcacctggagctcagctccccgctcccgagcccagccaagcccaggtcctgctccctccccaagcctgacgcctgacatccctccactgccggcggctgctctgcctgcagtgtgacagggaatctctgttgcaacggaggccagctcagtccagcggggaggaggagctgtcccgggccggtgggcagggccaattgggagagacaggtgtctggaaggacccggaggatgaggcctggagctaaaggctggaccctgaggacactgtcctgccggctcgtctggagcaggtcaggcccagcagggtaggtgataaactccagcagaatggccagggagggcaacgctaggctggggagggagatggtaggggccggccagcccacaaagatgagggcaatccaggacccccttggggtcattttctctgtgcctgacaggcatcccccggatagtccctcagagcacgtccaggctgtgcccacttcccaaggacatcaccaagtcactgtccaccctcagagcacctgctcctcacacacgctgtaccccggactcccccgggtgccaggtgggtgctgtgcctgcctcttgattctgggaacctcctctccagcctggtccctcaccagaggcagcccttaaagaccatccgccctacctcctcattttacactcggggaaactgagtcccatagaacaaacaggcagccgcaccaggcctcccgctctcaggtatgctcttccacccccttctctggcctcaggacagcctgagactgggcaggatccagaagaaagggctctgtcctggtggggaggggttcgcccaaggcagtgaccggctctgcccagggttccctggagtctggctctggggacagggtgaggggcagacttgcctgttttcaagagctgagggatgggggagaggatggggaacctggaccctggggcaacctccgctcaggactgtcccactcagctgccggtccgtgcctctgcactggtcactgggtggacggcagacgcatggcatcccaggacactgcacagggaacagctagctccaggtcacctgaatgccattctcaactggccctctcctcccagggataggccagcggggaacgaggagtgaccagaacccaggactcccgccctcatctgacagccacttagcccacttcccactggggactcttccttggaaggttgctctggaaaccccctactgtgtggggtaacctcgccgggcaccccaccctggccgagcactgccatgccacacaagaaggatggaaccttcctccccaagctggggtggggcaggggctgggggagatggaaggccctgcaccgcccccagcctccctgccactccccacacctgggagatgctcaggacccccatgtagccacggccgctccccccagcttcttaccaggtcgaggacagatggggacggacgctgctgcctcggcacctgctgattagtgcggcccaccctgaggggcgcccctgttccccaaggtggttgggagggcactcgcgggtcctggggaagttggatggccctgggaatggcgggtcctggagggtgcgggagcctgagggggaacttgggggtcttaggttagaccggggcctccccgcgtggggagggcgcagcagactgtacctgggggcgcattggccgtcgtcaaactcgaaggtccggttggtgtagcccccgccgcgcgcctcccggcagacgccccccggggtccgcgccccgtcagggagtggcatgcggcctggcagctcggacccgacccgagggagaagcgagtgggagccgccaccttcttccctcgcgttgccctgaaaaacattttttttttcctcgcagattagcgaggaaaagacgccagttccagggtcgggtgcaggcgtctgtccgcgcgcgccccctgccggccgcgccgggacccgcggcggctctggcccaggctgggacgggggtgcggggtagggagggcgatccgctcccgccgcggccctctgagccctcaaaactccgaaaaacaggacggggttcgtcaatggctagaaaagcccaagcgcgccgccaccgggccctacacccctgggagggctccgtggtgggcgggggctcagggggctctgggtccttggcgggcagcagggcacatgcgctgctcggaccgccagcgtccagccgctgcgcccagggaccgtcagcacctcccgcttgtgctgctctgccgtggtcaacactggtcattgaacacaagccagattcaagacgactccccgcccccccgcccccacaccccccgcaggctgcggcatctgtgggtgggcgccacatcctgggcttggcctgggggagggggatgactgcaccccgccctgtgctctcacccagacgggcacacacagcacctttagacgggtggggaggggccccaacttaagatgctgcaggccaaagactaggaagcagagggtccccctgcgggccccctttcccgtgcacgtgctcacactgttacacatgcgtcaccctggctcagcctcacacagagctctggagaactgcgatttctgtccccagagctttgttggtttgcagggtggaccaggcccctcactaagccaggactgtgcccacgagggccagggggagggccaggtccatttggagggcgcatgccatgtactttgtggtccctggcctccccagtgtctctccagagggtccttccctgtttctccaggaggcagcaggctgaacacagatgcttttgaggggtgggtggggaacactcggggaagtctaggatgctaagtccccagcagaggttcagcctgtgcccccgccacacagctcgtgggcatcttgggggtttttcctcaggtccctagattggccggtgctgctgccggggtcccaccacccctgggcgggtgccgccggggcaagatggtggcctttctgccaacgccctcctgcctggggaactcagaaaaaactgagaggccgcaccatctgcatctgtgattaattagcagtaattacacgtgttgtcaacggcaggagagtcacaggtttgatgacattccgagggctttagggaaacaaaaacttggccccactctgccactgaggagccccagatcgccagcccgtccatccctccctggccaggggcagggccgggagaggggcccaggtccccgagagcttttgccctcctctccaaccccgtcctcctccatgtctgacctgcagccaaggctgggcggagcagggatggagacaccaccttatattacataacctccctctgctccaaacacccttcacccatctttggcccaaagtccaggatgccagcccgaggcccagagccgcgccttctccacaggagactggggcaccccggacagacgtccccgtgtggtggcacctgcccgggctccttcttgcctcccctctcgggaggagagcccctgccacccaccccacctcctcccgctacgacctcagcacgagccaggccagggatgtcctcccaacagtccagcctcaccccccaccctcgtcccctctgcttccctgagggccccccgcaacctccgtgaaagaggaagggtctccacctcccccttccctccgtcatccccccaaaagtatgtactgggggactcaagcccagcgcagggcggctcctggagttcagcggggaggtgagcaaacacctggcgccggagctttctgaatttggatgggcaggacccccgcgatcccgcagaaacctgttgagagtgtgaggtgaggggtcgagctggggcccca

SEQ ID NO: 588516 - DNA, 4001 bp, Homo sapiens
ctacagtttctttcaaaaactgaagccatttctgcttgtccccttaaaaaaaaatggtggtcataaccatctcaaaggctgtgatgccacaatgagataagctttgtcaggacactggatgctcaataactggtaaataacagtaatgatgacgcatcttctttaaaacctgtcttttaaaggtttgaagacgaaatctagatttggagatttctacgactaagtcaaattcacttacttactgatctgctgagttctctttccaccacttttgacatccatcgccgttttgttagctgtatgcggcgattgggggtgggggggaagacgaggatcagaagccaaagcctggtggctgataaccaggggagggaggagcagctcactgggctggggaagaggatgggaaagcccagggcaaaggtactcaccgcggcccaccaccaggagtgggggatggtagtgaagttggtgctgggcacatcgtgctccacagagtagacagccgcagagaaagtgaagatgcccatggcgatgaagagcagcaggcagcccacctgctggtagcactggcgcagcgtgaagccgaaggcacgcagtccggtggagtggcgcgccagcttgaggatgcggaagatgcgcatgaggcgcatgacgcgcaacacctgacccaccttacccacgctgcccaccgtctggccgcgttggtggccctcgcccgtgaagcactcgagcagcagctgaaggtagagcggcaggatggccaccaggtccaccaggttgagggcgctgcgcgcgaagcgcctcaggtcgggcgtggaggctaggcgcagcaggtactcgagcgtgaagaagcccatgcacagcatctccacgtgctccaggatgggccgcaggtctgggccgccctcgccctgccccgagtgctgctgcatctcctccacggtgttgagcgccagcgccaccacggagacgagcacgaaggtgctggaggccaccccgatggccttggcggccaccgaggagaatggcttctccatgaggttccagaggcggcgccgctgcgggccgtagaagcgcatgtcgcggaagagttcctccgcctcctcgacctgcgcctgcgcgcgcagctcgtgctggatcttgagccgttcgctcagctcgtcgcgccgctcctcgaagcagatgcggcagcagcgtggcgtgtacttgagccgcacgccccagtagcccagctcctccaggaagcggcgcggacacagcccgtcgagcaccagcagcaccccggacaggtagaaattgtagaccagctggaagacggccgggtcgcggtcgaagaagtattcgtctgtctgctcctcgtagtcgtcgcacaggcttagctggcggctgcggctggtggaggtggccaggcgacctaggcgcgtcttggggaagccggccagctcgcagtagtccagctggtagctgtggccacccacgttcacattcagcgtggacagcagggccggagggtcgctggggccctcgggcttggcggtggtgacctcccctgcctgctggtcctcttctgccaggtcgtccttccactggtcctcctcctcgccgtcttcgtcttcctcgatgtagtagttatagttgccctctgtccagccgtggatgctggcctgggagccggaacgggcacccagggagcaaatgctcctgcggtgttggctgccctcattctccgtcgtgttccagggcctgtagctccaggaccgtctcctctcactctgtttgagcatggctgcggaaagtggacgcctagctttttcctcctggctgtggtaggggtccctcacctgctcactgcctctaggaggatggatcacgtggcctgcactgtcttagagaggccagcccggaccagcacagctaggggctcagacattgccaccggagctgccccttctcaggtcctgggcaggccagcccagcctgcagggtctgaacgcagtcagctgttgactgctctaatcttgctgatttggaagaagcaagtgttaggagggatttagaacctcttagcccatttcctcccccactcccttgaccctgtgaggtagaggatgattatgtggtcttaaatctctaggtaatcagaagaaggcagagattattgctaataaaaatgtcggtcaacctcgctcttaggaagcgctcagtgtatgtgtgctgagatgaaatcaactgaattagctatagaatacggatgcctgtgtcttcagcttcatggttgagatggtagcctctgccctaggtaaactcaccattagcagggatgacacatagcaacggaacaaagctgacttcatgacaagtcagtttccctctcagcgtaactcttcgtttagagcatataagatctaaagccatctccttcttgtccattcacatgatcacatttttttttttttttcaaatggattctccctggggcactgttcaggtccagtcggatctttgagtcagcttcagcttctctctctcctttttatctcctccctttctcttaaaggatagagacatgtttcaaggtagaattccaggaatggtaggaagacgtttttagggcctcacaaccctgctcagcaatattaggccatatttaaagggagcctgacttccacccaaaaaaaaagggtcttcttcatccttcaaaacatcactttaaaaaaaaaaaaaaaacccttttcatgattaaggcaatgtgcaaatgctggatatgcaaacacgatggagacacagttgtagcagtcaaagaactcttggttttgttggggatataaacatgcaaggataacaaaagatgcaataaatactggggaggagagaagcaggagggatttgctttgagcagggaattggtttttctattcaatttattttgcatagctaatacacattcatgataaaaaattgtaaaggtaaaaagacatattacagtagaaagtttatgtctttcccacccataatttcaagacatcaggtgtacctcaaggaagcaaccactattactaccttttggctatccttccagaaatattctaaacatatacaagcaaaaatatacctacctttatccatcatctcagtacctcttcattattaatagaaatcatagaatgctatatactttgccttttccagttggccatataaaagatgttttcatatttgaacacaaatatctaccttattttaaaaatagccactgagcactttcctaatgacagacattcagaatgtttctacctttgcttttatggacaattatgcaacaaataccttatatgtacatcactttacacatgttcaagatatataaaggataaattcttagaggtgagattactaggtcaaagattgcacatttgtaattttgattagtagtgctacatttctctccataaaagttttaccaatttacaattcatcaacggttgaaaatgtcttatacttttttaactctaccaattttgtaagtgaaaaatgatgtgtgggttaatttgtatttcttataaatgtgattgaacactttttcatgtgattaaaagctatttctttttctgggaactgtctgttcatcgactttgcctatattttccactgagttgtttacatttttcttattgatttgtaggagagcttaatacattatgaaaaaagaccctttacttgtgatatggattgcaccttttttcggttttaactttaatattttttccatgtaaaaatctttattttatgatttctgggtgttgtgtagtattagaaaaggcttcacctctctgtaaataaaacttttctttttatagttttaacatcagaaattaattttgatgtaaagagtgaagtaggggcctaactttattttccaagcttttatccagatgtttcaacacattaattgcataatccatcatttcctcactgatttgtggtactatctttgtcac

SEQ ID NO: 588517 - DNA, 4001 bp, Homo sapiens
taaagtctgttaataaaaagaaataagtcttcggtttaaattgtactgtattaccaagtttgcgggatactgtaaagcttatgtgaaaacttttcataacactgaaattgggagaaaaagcacctaaaaaacccgaacaaccgtgtaatccgttccaaaacaaactatgggcgggttgcgcggaggccagcaaggtaagaaagcaagcgataatcgcaaagcagagccgactgcttcctaataaaaaatggacctttaaaaattaaaaccactagttttcaaccacaacacttcgaaatgagaatattagtcaccgttgccatagaaacagtaaagccaagctgcccggaatttagacatttttttaaataccgcaaactgaaatgggtgaaaatagggcagagtttagtgtgaacctaagtggccggaacctactagtaactttcaccaggataaaagtgactctgcttttctaacctacatttccgaacagtgctttataaatcacctctcggggttagtttatcaagcgcaaaaaaaagtttaccttgtctcttccggaagaaggaacctgacaaaacccctcccggtagtattgcccacaatcagagccagccagcgcaggcttgcaccgcgcagcaaagggggagcccagcatcaagtccacgcggaaagcatctgaatcccggctgctggctttactggcggagcacagaggaaaaccccaagctcctgcctacagccccggcctgtctggctccctcctccacgtccccactccacgccacgttctgtgcctggcagtccacgcgccctaatccaactcgcatttatttaagcacccgccgtctacaccgcatcatggttcctccaggcactgcaggaagaaatggccccatgccgggggaaagaaacaccaaaaggacagccgcgagggctgaagacgaccccgaatgacgggatgactgcctgcaacgggtggtcaggagaggagctcccaccctcaccccgcgggtcgtgacactcccagggaagggagggccccgaggggtgcaccaggcccggccttcctggagtccgccacagccgactggcggcgttaagaggtccgcatcccaggaccgcccgagcgctcctctgccccaaggaggcgaccccgactccggatcccgggaaaacggcgagcgcgggtaccgaacctcggtaagggccggagcgggctgtcaccggcccccgcatccctcccctgcggccgcggccggccgctccctccccagcttgacagtcgctgcagtcacggacggagcgtctctgccccagcgtcgccgctcgcccggacgcccgcacccccgtgccccacgcggaggggggcagtgccgggaagacctctccggaccctccccccgccctggcccccagactccggaaaagcggttacctggcgcgcgggttggggcgagagcacgactcggtggaggaggaagagaagacagtggcctccggcccagggagatttgggaaatttgggagacttgttccgcactaggtgacagctgttcgctgcgcacgcgcacaggaccccggccgcccgatcactgcgccgcgcctcaccctcccgtcgagggggtgggtgggaggcagcggcgaaggcgcgcgcaccgccggctctccctgcgcgagggcgcgcgcgccgtcacgtgaccgctggggcccgcacttggtgagtcacgtgggcttacaaacagcttaaaggtgcccggcacgctcttgctttgggctcaacttccgcgctgtggttaacttaggcttgctggcgcgcatcttcttgtcctttggacacaggcatatcccattctttccggaggggaaagatactcgcgtagaaggagaaaacaggtgcacagaaccttgcccggaagcgctggctggggtcccgcagggctggacctgatgtagtccacgcgccacacgtcctcctgggcgccgacgcgcacctatggcggcctccgacgcgcggacgtcagcgtggcgttaccggggtggagcctcggaatgtactggagagcctggcgagaaagtcggggctcgcagctctccggcgatgacagcgctgtgttcccgttctcccttcacccggtggccgggaccactgagcctccttcccacaatgggagatcccgaataggcgaagagtatcttcgtgtcccaaccctttaacaactaccgcgcaggagcgtgtcagcctctggaagcaaaactgtccggtgttgagtcacctacacccagcacgtcccgccccgacccgcccaagtgtgctcttaagatagggaggcacaaaggtgaccccaataggaatcctgggctggcggtccctcagaaactagagttgataacagtttggccagaactgaagtgactagaaatgcaggtgcctccagcgtctgagactagataagttaacttcctacaacttgttgcttttcctctgtaactccgccttccgaggtgtcagaaggaaccaaccagaccttaagcccctgtactgccaaagacagatggttgagcatcagatgttttgcaaagctgaatgattttttttttaaacttcctacagagctcccagctgggtcccttgtggcgttttctctaacgtcttagctaagaaagattgggcatatcttcacaccagtgagcaaagttgggctaatatgctgaattttctgttacattatactgataacagaattttaaaaatatatcgacaccgcttaccacgcgcttgaactcgtttctcactggggtgaacattgtgaggacagatggaatgtgattaattgagctaaggctaacgggattattgggtcaccatatttctttagttgttaaaaacaaagttccgctacacacacagacacactcttttttgagacggagtcttgctgtgtcgcccagtttggagtgcaatggcgctatctcggcttactgcaacctccgcctcacgggttcgagagattctcctgcctcagcctcccgagtagctgggattacagtcgcccgccaccacgcccagctaatttttgtattttcagtagagacagggtttcgccatgttggccaggctggtcacaaactcctgacctcaggtgatccgcccgcctcggcctcccaaagtgctgggattacaggcgtgagccacttcacccggccacacacaattctgaacttggctaacgtatactcaactgggaattttccaaatgtgtgcatgtaacgtcaggatcccaaccatccttacaagtaaattggatatgctaaaataataaatatgcaacctaacacttacttagaacagtaatgtgagctacacactgtcttcagagcttcacatgtattaataaatacttataataattcaatgaataggtactattaatacctcattgttacagatgtggaaactgaagcatagcggttaagaaatatgtccacaatcaagcagctagggtcttttggaagccatatgctatattagaaatcttgtgcaccagaataaaaaatctggaaacctgaaatccattttcttcagaatttgcagatgcacaaataacatttctttaccattgtgaattagagtatgacttttttttaacctgaagaactgaagtggatatacgaaccttgctaacttcactgagcactttttaattttaaggaagataatgtaaaatgtcaaaacacttcaaaagctgtaaagcactatgtgaatccattaagtgcttcacagtcttggaaagtgaagagagcctactagaaaatcaactggactcatggcactgagggcagtcttgtgtccctaatgtatcaaaatacctccatattatgaattatcgtgaaaacattttagccatatagtaaattttttatttagattcaattgtttaaatcccaattgcaatatattaatggaaggctgtatgaacaatacatagattccccttgaa

SEQ ID NO: 588518 - DNA, 4001 bp, Homo sapiens
ccacagatgtgtgccactacacccagctaattttttaaaaaatcttttgtaggccggatgcggtggctcatacctgtaattccagcattttgggaggcggaggcaggcggatcacctgaggttgagagttcgagaccagcctgaccaacatggagaaaccccatctctactaaaaatacaaaattagctgggcatggtggtgcatgtctgtaatcgcagctactcgggagcctgaggcaggagaatcacttgaacctgggaggcagaggttgcagtgagccgagatcgcgccattgcactccagcctgggcaacaagagcaaaactccatctcaaaaaaaaaaaaatatatagacatagggttttgccatgttgctcaggcttgcgtcaaactcctgagctcaacagatctgcccgcctcagcctcccaaagtgctaggattacaggcttgagccaccaagcccagcctccaaatctctaaatattcactgatgggtagcatgtactatcagacccagggaaatcttttccatttcatctaacccagcccacactgtctagtaacaactaggacactgggaggaaactgaatcctcccaattcactgcttaggcaagaacatgcactacaagatcccagggagtcttatcacagcccttaacctggcccacatccctctttcttccaaaaaggcttcgtgaccttaccaggctcaggttggatgccaaatttgtcaaggctaacagagttgtcctaggctattggggaaccagcacggaacagttcctctacaactacaaaaacaaattttaatttttaattggatttaaacattgcttttaggccaggcatggaggttcatgcctataattccagatctttgggaggtcaaggcaagaggattgcttgcacccaggagctcaacaccaacctgggcagcatagtgagacccaatctctacaaaaattaaaaaatgggccaggcgcggtggctcaagcctgtaatcccagcactttgggaggccaaggtgggcagataatgaggtcaggagtttgagaccagcatggccaatatgatgaaacccagtctctactaaaaatacaaaaaattagccgggcgtggcggcaggcacctgtaatcccagctactcaggaggctgaggcaggagaattgcttgaacccgggaggcggaggttgcagtgagccgagaccacgccactgcactacagcctgggcaaaagagcgagactccgtctcaggaaaaaaaaaaaaaaaaagagggccgggcatggtggctcatgcctgtaatcccagcactttgggaggccgagacgggtaggtcgcttaaggccaggagtttgagaccagcctgcccaacatggcaaaaccctgtctctactaaaaatacaaaaattagtcaggtgtcgtggcacatgcctgtggtcccagctacttgggaggcaaaggcacaagaatcgcttgaacctgagaggtgaaggttgcagtgagcccagattgcgccactgccctctgtcctgggtgggagagagagagagagagactctgtctcaaaaaaaaaaaaaaaaaaaaaagttaatttaaaattaaaaaaaaaaaaaaaaaaaagccaggcatagtggcatgcactggtaatcccagctactgggaagactggggtgggagaatcacctgagcctgggatgttgaggctgcagtgaggtgtgattgcaccactgccctctagcctgggcaacagagaccttgattctaaaaaaataaaaataaagaaattaacattgctttaagtgtgacagaaccaccaactatgtacaaagtgtcctggattatgttcagagcagcactcacctgcagctgcttcttcagtcctcttccagggcagcccatagtgcttcatcaaacatcctttagcctcttccacatgaatgcagaacactccaactattcaacaactttcaggtcacagaccatcatgtcagccatctgtggagtgaggggattgtatttgtccttgattaagcttctcagtagtacagggttacacttctgagatcaattgtggttccaagaaacaatgagtcggtgaattatctcaggtacccacttttcacattttcaaatgaggatagaagaccactagaagataaactataaggccaggggtggtgactcacgcctttaatcccagcactttgggaggccgaggtgggcagatcacttgaggtagggagtttgagaccagtctgaccaacatggagaaacctggtctgtactaaaaatagaaaataatccgggagtggtagcacatgcctgtaatcccagctacttgggagtctgaggcagaagaatcacttgaacccaggaggcagaggttgcagagagccgaggttgcagtgagccgagatcgcaccattgcactccagcctgggcaataagagcaaaactccatctcaaaaaaaaaagaagataaactataaatattaatacatctagctgggcacggtggctcacacctgtaatcccaacactttgggaggctgaggcgggcagatcgcctgaggtcaggagttcgagaccatcctggccagcatggtgaaaccccgtctctactaaaaatacaaaaattagctgggcgtggtggcaaacggctgtaatcccagctacttgggaggctgaggcaggagaatcgcttcaacccaggaggcggaggttgcagtgagccgaggtcgcgtgccattgcactccagcctaggcaacagagtgaattccgtctcaaaaaaaaaaaaaaaaaaaattaatacatccgattgtggatagctgtgggggtcattctgttataatctttttgccctgcaggactgaaaagtgcaagattatatggctcaacaataaccgtgactgcacagttttcaaaaaatcactggtatatctgtcagggcaaactgttggtaatgaaaaataagaaaaaggggccaggtgcagtggctcatgcctgtaatcccagcactttgggaggctgaggtgggcagatcacctgagatcaggagttcgagaccagactggccaacatgctgaaactccatctctactaaaaatacaaaattagccggccgtggtggcaggcacctgtaatcccagctactcgggaggctggggcaggaaattgcttgaacccgggaggcggaggttgcagtgagccaagatcgtgccattgcactccagcctaggcgacaagagctaaactccatctcaaaaaaaaaaaaacaaaagaaaaaaataatcactcgtacatattcagacaatttgtttgttgtataggatatcaagacatatattaccaacagcttcattattcacaattgtctgcattgctgaaatatttttgaatccactttaaatattccaaatttgattttgactcagcatttccagtcggctttaaagaccaaagtatttttatcagcttgaggggtgctggcaggaaagggagtgaaagagtgtttaggccctcataggtggttgaggaggtggttcaaattgactagatggtggtagtgggtaagatcgccaggaaatactggaacccagggtccccaggttttcaggtttttgggtatacgacgtggaaatactgtaacccagggccctgggttttcaggtttttgggtatacaacatgaaaaaatacccacttgagacccttgagtgttgtttcaaaaagttccaggaagaagctgagcctcagcaaaacaaaaaccagctggatccagagatgcctgagatggatacaaaatgtggctaagtcttattaccatactaaaaaccctcgcccaggtgttatagaacctaactggggtccactcacctgcctgacacagtgaggttgtgcagcagtagaaaggaaggcatgtatttattttttgttatttttggagacagagtcttgctctgttgcccaggctggagtgcagtggtgtgatctcg

SEQ ID NO: 588519 - DNA, 4001 bp, Homo sapiens
tgcaatttgctttgcttgggaaccctgtaccttcgtaatgaatcatcacattcaatagtgtctcttggaattcgcccccctttttcctttccctctattaccccattcaggctcctgttacctcttgctcagttttgtttagatcctatctgctttgatccactttccgctgcctgattaaccttccagtagcacacctatttcatgtcatttccatgctccaatagcttcaaagctttcccactgccttcaggaaaaagttccaactcaggcattcacagccattcaaaatgtggtcttaattcaccccactcatcaccaccacacaggagccactattcttatcagaatagtgaagtttaaagccattctctctaccaacacaatttctacccatccttcaaattcagtttaaatgacattttcttatagaccaacctctacatgttagcattcctcaaatctttgccctagggaacttcccttctctctccacacttctccctaggtggtctcatccaatctcctggctttttatgctgagtactcccaaatcatgtctccattatgaacttctccttggggtccaaacttgtgtataactgcttatctgatacctctaattatgtgtctaacaggaaccttacccttaatatgtccaaaacataattctctatgttgttctttatgttattgttgtttgccccacaaacaacaatatactatttttccctgccctatcgtcctccatctcagccaatggcacatcatctactttactgctcaagtaagaaatctgagttacccttgacattttcctctctactctgccacgctgaaccataagttagttctcttaaatgtcccttacgtcaccaccctaatgcaaactattaccaatacaatctcttgagcttccaaatgtaatacattttctaaagagaaccagggcctattcatgattctcacttgcttacaagtcttcaatgttttctacacatggtaataggaacggaaatgttttcctattgtacagaaaaaaaaattccccatcatgaccttcaaggccctacagaacctagttccactctatccggctaactttatcttgtactctaactatactccttcctagctcccatctcaggaacttagcccattatcgcctctgcttgaagtactccctgagcttccaaatctccgtttaaagatcacttcttcagactccactatctgccaactcagcatccagttcgtttcctcccagcacttagaatctgcgtacattcaggcaaaccgcctagcactggagttggggtttgtgaagtagcacagacaggctgatcaggccgagcacgggctgggattccggagtgaagctagtccactctaacccggcacgcagggcaacgtggtgggagagaggtcggagtcccgcccttctttttttttttttttttttttttgagacggagtcttgctctgtctcccaggctggagtgtagtggcacgatcttggctcactgcaagctccgcctcccgggttcacgccattctcctgcctcagcctcccaagtagctgggaccacaggcgcccgccaccatgcccggctaattttttgtagttttagtagagacggggtttcaccgtgttagccaggatggtctcgatctcctgaccttgtgatccgcccgcctcggcctcccaaagtgctgggattacaggcgtgagccaccgcgcccggccagtcccgcccttcttgccaggctccagtcagtcccaaactcctagcccagaaagaggccagaggagactgcccagtggacaacagccccgagagaccttcccgacttccagcgcccggcagggtgcgaacccctcccaagagcgaccgctgagcctgccacactcaccgcacacgtgggaccgagacagctcgcgcagcggatcccgaccgcctctccgcttccgcttccttgccttgctccgcccccgggccgctttttttcatcttccgcggcggatcagggactaagaggtggagcttcccagagaatacaaaaattcggaatttctattggtccgctgctgttatgcctcctcttgaggcgcgaggattttggcccttgcaagaatccgtcgggcggaggacgcgacaacggccacgggaaatgacgtcattaaccctgtggcttccgtgctggaaagagagggagagctcttgcgaggcagaacaggctgctgaaggacagacctggctggcgcggttaataagaggcctgcatcccgtagcctgaacaaatattgaagtagctaaagtttctaaagtgtgttaatttgcatacttcctcagcagtccagcgtggaggataaaaggggtatcttgtgagtcgatttgaattgtaatcccgtttttttcacttgctagctgtgtggctctgggaaaattacagtttttatgagctttggcttcctgatcaataaaatagaaataattaagtgatacgtgcaaagcgcttagcatggaacgctctcaataaatgtttgccatttttagtgtctgctcgtgcctggaaactgctgttattccattttatacttcaggaaataagattgtggttaggatatatgccccattttccagatgaagaaactgacaccacaaacttgctcgtgtcaagcaacagaattttattctttaactgttctagaggcaagaattccaaaatcaagctgttggcagagccctgcaccttttgaaggctctaggggagaatgctttgcttcttcagcttctaacggttccaggcggtccgtggcctcttgttgcatgactccaatctcggcctgtcttctaatggccttctcctgtgcctgtgccacttctctgtgtgtttttaggacactgaacattgaatttagagtccacggggataatccaagatcatctcatctggaggtccttaatcacatctgcaaaggcccttttcccaaataaggtcactttcacatgtcctgggagttaggacatagacatatcttttggagactattcaacccactgcatctgtaaagttgaggaactggcacttgatccctggtgccagacttcagattttactgtcttccaacttactccgttttctggccactaaggagttagagttgaaactggtaatttagtagactgtatgcttcttgatgacaggggccatcattactttccaggcacttatctcactatgcagcacatagatacttgataagttcttgtcgtctaccttaactgttactagtttacatttcagctcatttaaatctcataagaacgttttaaataggtcttttctcattttacagagaaaggcaaaacatagtagctttggtccagtgagcctgactctaaactcaacgtggctgcctccgtactgctttcaataattcagtaaatgctaagagaagagaatatggaacaggaattgcaggaggcccatcagctgtgccttttgggcaaatagcatagtagtggggatattagacaccttgaaacacctgacaagtaaatgctggccaaaaagaaagaaaaatcgcaaaatacaccctatcacacaaccctgggaagggatacgtttgtgttttcaactcgacagacagcagcaccccatatccttgaagataggtccatgcagttgccttaagcatctgcaccaaaaccctgctattcatttgccttttcaccagggaggaaaaaaaaaatgttatcacatatcaaagcccttgattattattaaaaacttttttatcaagtcttctgtgaaagtggattgatttggattttttttttttttttggagtgaattgaaagcatcgtgtggttttgcagaacagcacaaaaaaagcttatcctgtaatttttttttttgtcaagcaaacccattaattcttcaaatatctaatgatctaaatgtagaccactaggtgtactcctacaagcctaaga

SEQ ID NO: 588520 - DNA, 4001 bp, Homo sapiens
tcggtatttatgaccccagcgtgggtccgcggcgccccggaactacacttcccacaaagcattgaggcgaaccccggcggcgggcggggcggcctgggattcagggtgaccaccgctctccccagacagggaccgccgtccccgggaaggctgcaccgcgtacgatcgagggggcactaactctcctttctgaaagcgctgtcaccccgtggtttctcctgcggttcgaccggcgaccctctccgccctccctgctccatctgagggtcaccgcctattcgtgacctttcggctgattactagagtgtcacaaaaaggcaccttctcccccttcccgaaagctccatttctataactcaaccagccgtcggggacccggggccaggcggggtcagacgggacgggcggacactgcccgtcaccccggggctccggccctcccgccagccgaggctcagtgggcagggggctgggctcccccgaccccgggccagggcggatcgcgggcagaggtggctccgcccggggctccggtttcaatttcgcaacgtgacggtgcaaacctgaggcctacaaacgccagcggcgacggtccgcgccccgcccgtccgccaggcccgggctccccagctccccgtacgccgcggccgccgcccgcccaccgggcctggcgccccagccctcatgcggccgccggcccccggcaccgcgcggcgcccgttccggctcgcggccgcaggttcggccgcggcacttactcagctcatcctgggaggcggaggcggcggccgcagccatgttgcgccggggagggaacgagggaggggctgggggggcagggcgcggccggggggctcgcggctcgcggtgcggcaggggccgcgagccgcctccgttcactcggcgcggaccgcgctgtgccccgaggcccgcccgccgccgccgcctgcgtcctccgcgtcgcgagcgtcgcccttcgctgcccccgcgagctcgcgactcgggcgctcccgcagcctcgcgcctctgcggagccgctgccgctgccgccgccgccgtctgtgcggccgaatccccgtgcgccaggcccgcgcggcggctctgcgactccgcgccgcgctcgcccaactcacgccggttttatatttagaaagagctgagccatcctcccagcggcccccccgccgggcccctcgcgcgcccgcccgccctcgctcgctcgcggctcgtcctgcccacctgtcgccgcccgccccgcgtgcgctccccgcgcggactcgacacgcggcggcctgtgcgggcggcccggcctaaccgcgccgccgcgcgcgcagggccagtcccccgcggcccgggggcgggcctctgacctgagtcggagccggtctccatgccgcggacgctgcgctcggcgccgcgaggtgagggctgtagagcgaggcgttcggcgggccgggccccggggagccgcgcgccgcagtccgtgaggggctgggccgagcgggcccgggctgccctagcggccgggggaaatcctcgaggcggggccggagcgcccttttccgaggtctgcggctgtcacgttggctgggcccgacctggggaaacacgcctgtccaaaggaagagacgtggactcagaaaagtagagccgggctcggagtcggcgggaggaagccccgccctgcgcctcccgccgaacttctcggccccggcgctgactcagtcccggacgagcccctgcgccgcagcggcccccgacagcccagttctggtgtggaggtggctggtgctcccaaaacggctagcgggagcagggggtccactcagccctgcaaaagttagataaggcaagattcctaaagttcacatggaagtatctatgcctatgtgagctctgagattttgttcagataccctatgttcttttcggtaactagagtgatttattttcgatatgctgattttaactttctgccttcgctttgtccgtgaggtcatgtacacttgcaaaatgaaattcaaattcaggggttgcataattgctgtactttaagtgatggtactgtcataacaaattagatacaagatcagatactttttttatataagaagaaatcaagtcttaaatagattgaaattgcatttattccttaaagcagaaatctataaagccctaagtaatgtcttaaaaatggaatatatgtcattcctgttgtaacataggccaagtacaaggtacaacactgaagacatttttatttcctttattgtttttgttatagaaattatacatgatcttgggccgggcgcggtggctcacgcctgtaatcccagctctttcggaggcttaggcgggtggatcacgaggtcaggagttcgagaccagcctggccaacatggtgaaaccctgtctctaattaaaaaatacaaaaattagctgggcgtggaggcgcgcgcctgtaatcccaactactcgggaggctgaggtaggagaatcgcttgaacccgggaggcggagcttgcagtgagccgagatcgcaccactgcactccagcctgggggacagagcgagactccgtctcaaaaagaaaaaaaaaagaaaaattatacataatttttgtaaaaaaaaaatgcaaatgatttggagtatcataaaattaaaagtgaaagtccttcctcctagccccaccatcccactctgcagagaaattatgactaacagttacagttaagtgtgcagaagaccttttctctggacatatatatacagccccatgtatggctttgatggggacaggtttctacaataaagttctggatcaattattccttcacacacattgttccatgttaattcaaaacactgcactaccatcacccttttttgtttgtaacttcatactacactaagttaaccaaccccttttttcatgtatgctcctcttttatttgatgttgcctccaaaataaatacacaatgaactacttacaaacaatagagaggtgtatacaggtcttctcccaactgcatacccaccatcccccctcatcccactcatgcccataaataatccctattaacagtttggtgcattcaacctttccttactgtttccgtgactatagaaagtagctgcaccaaagactggtttggggaaatttgacttcccataatttcaaatggatccttccaaagccaccccagataaatacagaatctgagtaaaaaacaatgggtttgttattttattttatttttattcatttatttatttattttattttattttttgaaacggagtttcgctcttgttgcccaggctggagtgcaatggcgcgatctcggctcaccgcaacctccgcctcctgggttcaagcgattcccctgcctcagcctcccgagtagctgggattataggcatgcgtcaccacgtccggctaattttgtgttttcagtaaagacggggtttctccatgttggccaggctggtctccaactcctgacctcaggtgatccacccacctcggcctcccaaagtgctgggattacaggtgtgagccaccatgcctggccgttaggcaattttaacctccaggcaagactagttaacaaatccttagttcctcctatgaagaaattccaggttctctgcgtgtacaaatcacatgaatgtgtgtacacagatttttgttagttttgacaaaaatggaactctacttcccatattatgtaacgttatcttttcaccaaataatgtattacaggtgtcctttcatatcagtaatgataataatggctaatggaataataattatgccagacaccattctagtgttttacttggatgaattcatctaacccccacaacaatcttatgaaatagggatttttatggcactggatggttgaggaacacatctaatgtgccacaaactggaaagtaagtggtggagctgggatttgaacctgggcagtgtggattcagagtcagcttgctt

SEQ ID NO: 588521 - DNA, 4001 bp, Homo sapiens
ttgcttggccctctcaccactccgtttttggacaagaaaccagaatccatccttggagctcaaagttgaactcttgggattcagctagaatgaaaacaacgagggggcgagatgaggaggcaacactatgtctggcgcagaccctttgcgctccccctaacagactcccagtgagccttccttggctctgcacctttcctgtcctcctcctcctcatgcagaggcactcttgggcaaaagtgtcctgagtgctatctgtggaccattgtccaccggtgcatgtagtcagagggtcacaaggacagtgtggatcgtgcttcctaaaagtgatcctgtctctcctttctctccttcgagtattcggtagcaggtagggtggtcttgggacactccatccgcagaagggtccccctagatccccagagaaagccctgtcaaaaaccacacccagaggcctcaattaggtccagagccaccccaaggcatcatgacagtgggactgccagtgaaggaagccacaccctgaaatctggggattctgtggaaatcagttcctgcagcaatctcatggccagttaaactgtcctcatccacttatttaatcatcacatttactgagcttgtaccactgcaaaaccctatgctcggcaggcaccttaatgcaacttattaacaaatatctattctttcttctgctgctccttagtactttttcccaaataaaatttgaaaaacattttatgattatgtttttcatcagctttgtgaccttgggcaaattgctaaacctctctgagtctcaatgtttaaaaggggataatttcacaaagctgttgtaagagttatatgagatgtttaaacatacctagtatactgcctagcgtactggtgctcaacaatcccatacatcctttattccttccttcaaaggcctttccctccaggacctgccaaagtcagttattccacctgatcttactgcttccttccgcacggtcaaacctaggggctcaaatctcctatctttgctttagaggcctcactggtcctcatcctcggcttagggccctgtgctctcgcagcagtttctgtctccactaaaatgcagcgtggagcaactgggctaccatggagaagaaaaatccgaatggggaaagaggaggaatggaaagaggctgcagccctagaaggcccccacctctgggccacggtgtggggatacaagtaagggcacatggaaccctacagggatcccggtggaggccaaagtccttggagccgtgggaagtcactcatggatcccatgggaggatccccctccccagtcagaggttgcttcccacagttctagggcacagtctcaggtcctccttttctagggagccctctgggggctccaccacctcgaggttcctgcggctcccctatgttcccaggtggtcttccattgagccagctccagagaccacccttgtgcctgctcccacagtgacacagaagggctctctggggccagtcccctccacgctggggctccctatggcagcaaatgcagacagcgccgcgggagtccattcccacagggggtctttatgggggcggctccccacagcacctcagggactcccccaaggcgtagaggcagcagctacttggggttcatccaatgacacaggggggccaccttggaggcggctcccacacaagcacctcagagtcccggaggactgtccgcggccgcagacccgcccctcaggtgacggcccggtccccgccgcccccgcccccgcttaccgggaccgtccgggtgcgggacgcggctccggggcggcggactctacacaccgcgggccccgcgcagcccacggcagcccgagagccggcgtgctgggccgagcgccggcagcaggcggcgcgggcggagcggcaggctgaggaggcggcggcggcggcggcggcggcggcggcgcgcgcggccggagcacacccacccgccccggggggctgcggcgtgtgcacccgcgcgaggtgccctgggccggccggtgggcgcgccccgccccgcccagtcctcttgcgcctccaggagacgccctcgcggctccgcgggcggcgggtgaccggcgacgggcgcgcgggcgtggggcgccgtgggaatgcgggaggacggcggacggctccgatgagcagacggcccaggtgcccgtgggcgccccccacgagcgcccggcactgcggcgcggggactgcgccagcggccgactgcggcaaggacagtgcccgcccggaggaggcggcccggagggggcgccttgggggcgctggggccgctcaccgctcgcgttccgcgccgggggttgggtggggggaaggcggggtccgggtggatgccgccaccagcacgtgcccggggtggggagaatgactcatccagcagggcctaccagccgtcccccgcagggctccgggctcacgacccctggcactggggcactcacctttgcagtaccccactggcctccggagggtcccaacgaaccttcacataatcctcggctggcccagcctaccctatgcgctgttttctgggattattggtttttcatctccagcagcgaggctgtgctgtcgtgtaacccactttttgctgcagcaacctcatccctcacaatatccaaacagctagcttgtcagaaggccagcaattctgagggctataatgtgcattacaccaaactacatgctttgaagagggcaagaaaaagataaaatcgtaagatagccagcaactaattataaggaaaaattgaagatatgcaaatgatatgtcgagagccctttaatttatattaattgcacttacatttttaaaatacctttattttcttgtgcattcaatttatttacctcaaatataatgcatgtcatttttttgagcgtctagtatttgttacatactgtgctaggtaccctggtgcgatataaaaaagaaattttgcccttaacatggaatttaccaatagaggatataaggcaagtatggtatatttctatcactttaaaacacgaagtgccaggtactattctaaatggtttaaatatgttgtcattaattttcacaccatccctttgagggagtctactgttagtttcgacattttgccagtgatgaaactgaggcaaagagaggttaaacaactcgcccaaggtcacatggctaatatgtgatggaggtgagactgaaattcaggtattctgatttcataccgcaagctcctatttctcagtcctgccactgagaaaggagaggctataaaccattaatatatggagttctaaaattagtacttattagttctaaaattagtgcttatttctcaagagacactatggttattttgcttgttgtgaaactagcactaaaaagcagactgagccttccatatagtctgggggtccccccctaactttctttagaattacatcataccgacagtttcacagatagacttctctgaactgtttttagtaagtgttttatttctaggctgtctgatgggcttatatggaaaaggaggttgtaacatcatcatataaatctctgtcggttaattccttccttcattcaaaaaaatttatattgtggccaggcgtggtggctcacgcctgtaattccagcactttgggaggccgaggcaggtgagtcacctgaggtcgagaccagcctggccaacatagtgaaaccccacctctactaaaaacacaacaattagccaggtgcagtggcacgcgcctgtggtcccagctactcgggaggctgaggcaggagaatctcttgaatccaggaggcagaggttgcagtgagccaagatcgcaccactgcattccagcctgggtgacagagcgaaactccgtcacacacacacacaaaagtacattgtgtatctgtacaatgccaggcattgtgctgagaactagaaagggtgcaaataagagtaaga
